United States Patent Application Publication US 2005/0208558 A1 - sequence listing, part 17

SEQ ID NO: 16367 - DNA, 2209 bp, DROSOPHILA
ctggtctggttttattttatgttaacgggagtgatcttgcgtacaaacaataacacggaatcgcagtgaaagggcgttgcacaaatgacagtgttttggcaaaatgcccgggctagttttgaccacgtttagcagtgcctagaacgcagagtgcgcgacgctaaaacaagagaaccgcgacaaaacaaaacgcggaaacgcataaagtgaaaaaaaaaacacaaacgcagacagcgaactttggacacagacaatcgtaaacgcacggggaaaacaaagaaaaacgaagaaatgtcggcgcagcgtctaaatgcagcggaacgggatttggagaagttcatcaagttcctggtcttgaagtccacccaggtggtggtgcagtcccgactgggcgagaagatgcagacacagtgcaatccactggcgggcagtgattggtttaacatagccgtgcaggatcatccggaggtcctggacgagaccaagcgggctctgaacctaaagacaggagagagcattctgcagcgcctgccgttgtgcgtggaaatatccctgaaaacgactgagggtgaccagatggtgttggaggtgtggtccctagacctgctccagccccagaatggtgcctccccggccaccaatgacctgaaccccgaaggccagaccctaaaggcagcccacgccatctacaatcgcatgggcatcatgctcaagtccctcatatcgctgacccgcaccacgcccgcctacaaattatcccggcgccagtgccccgactcgtatggcatcttctacaggatctacgtggacaggccgcaggtccacaccctgggcgagggtcacaagcacgtaaagatcggacaactcagcacgattgttggctcgctggtcatgtccgtggcctaccgcacaaagctgaccatttcgcccacggctgcccagtcagagagcaacaccataatgctgaagtcggatcactttagacccgccacggatgccaatacacctggcaaccagcagcagactcaaaatggcactgtcgtggccaagaaactgggcttgggtgccctaaatcccgcccagggtacagccgatcggcggtttatcgatatagagaagccgttgcgaccgggagccttcacagatatgggcaaactaaagcagtacactgaagatgactttgtgttgccggaaaccccgcctttcgagtggcttttgcgaggacgcggctctgtggagtccctcaatcgactggataacaattcggtcgccagtgtaaacatcagtaataacaacaatagtacgcaggatagtaaattcaaccagatcagcaatctcaacaacaactcggcaggcttcaagagtttcgagaagaactcggaaaactcagtatcgccaataaagagcctgctgatccccgccagcgccacagccacatatcgtcaccattcagagccttcgctacaaccaccgcctgatgatgataatctgctaaaagagctccacttccctttcgcctcgcccacgtcgcacgtaaacgatctggccaagttctacagggaatgctatcatgcgccaccgctgaagggacttaatgaactgcaggcagagatctcatcgatttcctcgaccccgccagcatccagtggttccggcggtgtagcagcatgcggtccgacggcggcggccacagcgatcgcaaccagttccgctgatgccagcgccatggacgatctgtcccggcaactggagcagttcgagacctcgctggaggactacgacaagctggtctcgcagttcgggctaacgggctcctcatcgacgggtagccgcagcagtggtgggctccaaatgagcaactgagcggaataatgcctctagttatgtcattagttagtttttatttatggaagggcggtcaatatggagagaggcagggacaaactaaaatatcaaggacgactttagaaagattgcttgggaaagtaaaggtcttaagttcagcatttctctcatccttttaaaatcagttttcagttatgtatttcgattagataaggaatgtaagatcagattttactgcataatgtttatatgtctttttaaaacaacctactttcttatcacccaagcaatgttgcataatgattaaagaatattttcaaagaaatggatttcagacctatactttggcttgagccctccgcat

SEQ ID NO: 16368 - protein, 523 aa, DROSOPHILA [sequence omitted]

SEQ ID NO: 16369 - DNA, 2529 bp, DROSOPHILA
tcatcaatgtttaattggttattttcagctccgaatcgagcaatgaattgtgttgtcatcgccgatgttgccaaaatgcgcagagtgactccaagacctccaggataataaatgtagcatatggccaaagcatatgatattcactttcgggactggataatatttgtttctcattttcttgaagcaaatatattgaaattcaataaaatgcatttatcaggaattctgtttgtttatatagatttactaccattgccaacgcttttaaggagtataatataaatctcacaaatattaaaacagctagcgaagtaatatataaagttaactacactagacttgcaggcttaattacgacaaatgtaattcatgcttattcacgttctagaaaaataattaacttggaataattatctgttaagtcaaagtccagttaaagttaaaatttaaatcaatacgttcaatattacattaacacaatattatggatctccaattctggtcagatatttatagcacatatagaaataagtacatgagtaacagctgtggaattgccttgaatatcattactatatatatagcggtattttgagcaaataattttccttttccgattcaaatgaaatcagatttttgtaagtccgatatagtttgagattcgctttgtggttgattatcttatttgatgcgcgtccccaagatgaatctattcaaatgcaatgtttctaacaaagattaagtttaaaaaatactaagtatacggtgttaggaaaatagattgttcaaaaaagagttaagcaactttcagcccagtagaagtttacgttttcattgtgttatcataggtatacaaaaagcttatatattatttactatattctatgctgtaaatgttcaattcatgctagcttaacaattgttatcaaggcaattgcttaaacaaatataaataactataaacagaagccaattattgaaaagtggaaattaaaatcactttatttgctctcgttgaaaacctttcttttaattcggctgacaacatatttattcaatctcacaagagtaaaacaatgcaatttattaagaccgcaggctatcggcaacatttttgcaggacccattttcgcagcgaaccatagttactgaggagccaaaatcttaataaacatcctataaaataaatattaaatttacttacctatgcacgaggctttgaccagctcacaacgggttaatttcctccagtttcggttatttcgtccgcaatatgaattgaatagatccaccgtatcatctcttgttcccacggttggctgttcacgaagacagttggcgaataaacgatcgcaaaattggcgacccgaagcttcctgagttaggacctggcacatcaatatgcagcagaaagctaaaggattggaattataaaactaagtattctccttcataagggtagcttacccaaaaataccagaagttttgacattgcagaagtttttgaggtgaacttgataactactctgactatatcgtagtatatcgccctgtatttataccgtaaacatcgatcaaggaagaatacgtttacaattgtaacaggtgtacaagggctttatcttttttacaattttatatgaacaatccaaattcaataggtcagattcatctgaaaaacagatgtggtcctatttggaacataacacttccttgtttccaacttatataaagctgagattttttattttaagccaaaaggaaatctctagttgatttacttgcacacaagcttaaaaatgcaattgacaagtattatctgcgtcatcttgttccttggctgtgtacttattaatggacaaagtcccgactgccgaaagttaagggacacttgcaatccttgcatccgaagactcaataatcccatcaataatgtggagttcatgaacgagggatgccgtgagaaagtccgtggcagatacatctggaagaatcagactcgctgcgatcttcaagtgatcgcttgcagtggtaagttaaaaaaaaccaatacttttaaaaaccaaaccaaaaacttttggaaacactttcaaaagtgaaacaaaaaattcgatttcctcaaatttaaaatatatgacactgtcacttacctttaaagtttttggcatggatctttagattttaatttaaaaatgtaaatacatcttctggactaaaagtaaatttaaaaaccaaattgattaaattttgaggacaggagaaaaaactatttcatttacttcacaaatctgtttgtttcggacatcaatctacaaaagtgcattacaattttttcctgcatttgcagctcacaagaggaaactggattgcttggtaatagccgagcttgctgggatgccaaggcgaacttagaagaatgcccaccagcattgtgattaccacaagggagcgcagctaaaatattaaaagtgattttgtccaaataaatgcatatgtgaagagatttgacttggttactctagcttgtct

SEQ ID NO: 16370 - DNA, 420 bp, DROSOPHILA
cagagtagttatcaagttcacctcaaaaacttctgcaatgtcaaaacttctggtatttttggctttctgctgcatattgatgtgccaggtcctaactcaggaagcttcgggtcgccaattttgcgatcgtttattcgccaactgtcttcgtgaacagccaaccgtgggaacaagagatgatacggtggatctattcaattcatattgcggacgaaataaccgaaactggaggaaattaacccgttgtgagctggtcaaagcctcgtgcatagtaactatggttcgctgcgaaaatgggtcctgcaaaaatgttgccgatagcctgcggtcttaataaattgcattgttttactcttgtgagattgaataaatatgttgtcagccgaattaaaagaaaggttttcaacgagagcaaataaa

SEQ ID NO: 16371 - protein, 98 aa, DROSOPHILA
MSKLLVFLAFCCILMCQVLTQEASGRQFCDRLFANCLREQPTVGTRDDTVDLFNSYCGRNNRNWRKLTRCELVKASCIVTMVRCENGSCKNVADSLRS

SEQ ID NO: 16372 - DNA, 5104 bp, DROSOPHILA
atgtatgtgctgggctatcacatgcgatggaaaagctgttcgcaaagagcgtagcaaggattccggacttccagattctctgatcgcagccaaatgagtgagtccaccgatgtacagttaaggtaagggtatgtgtgtgtgtagaaagttgcggatagatagagagggacgcaatatctatggaaaaatgcgtgggttctgctacgaaattaagtcgtacaaattgttgcacgcaaaaaaaagagcacaacatttgggtgagattttggatttttcttgtttattttaaatagaattgttatttttgttaatttatacttagtttttgtttcacttgaagtaatctttgctttgctctctctccctctcctccttccactatttctctttctatccctgttccctgtctctttcgctctggtgttggatgtaaatatgcccttttctgcgccctgtttccaatgcatccgtgtttatttaattgtattaaatttgtttaacactacaagaatttttgttaaaaggccaaaaaacaaatttcgttcatactctcgcttttgctttgtctgtctaatgtttcaattacgatttgttcttttagatttttagttttattcattaaggtatatttgtgttgcctgtatttttagttgagtttaatttttgcaatgcaaatttaaacgtacaatgttcgaatttagatttgagttttcttgtttttgtttttttccttttaagatgtatgttcattcctttcccgcacgactccttttttttccatcttcatggaattctttcgggatgtttttgagttgatcaacgcttggcgtaaatcttctaatcccctgcggatgcatcaacatggctgcagcttcgaatctgttagtgtttagctgttctgctttttgttattctcttgtatttttgttttgtttttaatttttgttaatgggttcgattggtgtgttgcacgttgttagcagtttttttttttttttttaaatattttcaaataaatacaatttagtgtgaaatagaaacgtgcaaacgcgtcttcttctgtttacatcagtgtttcctccatcacagtatgtccatgccgttccatgcgattctggcacaccttctgcagcgattttctgtggatcccttgacggcgtcaattcaaggagggcatatggccgtcgtgccagtttatttcgatatttggccacttggtctgcaggcaggtgaccatcgggttcgaggtgcagaccgacttcagatcgccttccagcaaaatggccgtgccgcaatagtagcgcacctgcatggaatatataagttaataagcgctccgtttataaattgaccatcacagtgaatgagagagattggcaggcacactgctcaccttgttgttctcattggagcccggtatgccgttgtagtgcatcagctcgaacgtatccggcgtggagcggctctccagcgggaagaactcgtccatgaacgcatttagcagtataatgcccaagttctccggatcaagacgcttctgcatgagggcgacactgcaaaggacattgattacaagccgactttagggaactacattaggtttagcttactaggccggctcgctgaccagattcaaggcgatgagaacttcgcgcagcattgtggtcgatatgaaattgttgccctccgggtcgtacgatttgaagatccgacgaccagtttccgagggcgtctctggtgagacaagcctcttttcgttgctgaacagaactgggcagagataagagctctccaattagtaagaacccaaggcgaaggcgcataaagcgctatcaatagggatagattattggatgactcaccggttaaatgcgtatcggaccccatcacccatacgggatagcgtgggttcttgaagaaggagcccaccgtgcagtaacgcatttcctccatcagtgttataaagccgatgtcgctctgctcacagatgccacgcagcttcagtccgccaacgtcctgctcattatcccagacatgggcaactgctcgcccagttagcatcaggttaataagcgactggccgccatagccgtatgtgctgtgtatcaggggctccgacgtgtccgatatatcggccgcaaccagctccaagcccttggtgaggaacaccgagtacatgaacagcagcacgccgtatgtgtgcgccagctggtcgtaattctccatatagtagcgggccacggctgcgatattcttaaagtggagcgtgtgcaggcgctcgtggaactcatccggcgacagttcctggtgcatatcgtgttcgagctgcagggcctgggacaacttgctgaccgaggcgggagtggcttctgccgcctcctccacctcttcggaagatcctgccgcttggccagctaaagcagattcttcctcgccagccggtgagcgctttttggttgatccagcctctgtagcgtttcctcgtcggcgcaagagatggacgatgcggtaccgcggcgcccgacaattcttcaggatgtcacacaatgcctggatcagcaggttctgcgatttgtcgagggaaatctgaataaatgtggagattagcgcggtacggtactcaagtggtagaagttgaccaacctccgagagcttgatgcctggcaagtccatgataataatcttaagcaagtacgcctgcaccggcgctatcacagcacaaggaccgccctgcttctgcaccaatgcagacggttccactttactaaactcgaatcctggtggagaaataagtgtaagtaaaattagaagatgggtactgcaatgtgaaaagtggagaaggagtacaagaggacagccttccttaccagccttcataaagctaccaaatcttatattcatatctaataactgggaatagcagcaaaaaaaaagctttgataacaaggaatggtacttgaatgataatactcaatactcacagagcattgaaatgggacttatttatctcaaaatttgatgacaggttaactaattaactttgtctataatctcagttagtcattaaatactacaactactcgtgccactaaaagaagtaatcaattaatgcccaattataagaattgagatatgaaaatggaaatacagacgcggagtatttacaatcttcatgtttgcttcttgacagcaatgctttaaacatgatctgggataagtttctattcttagcgaaaaggcaactgattgtagttggaaaaacaagagtaaatatgaatgaacatgacctgggccaagttgaagataaaagcgcccattccaactggacgcagccttgccgagcgcaaaaagggcgcgctttttgccccacaatgggtggtggtgcatactatgtgcatggggtatgggaagatgaggagatgggtggttaccttgagaccaacgcttgaatacatcttcgcgcacattgtcgccccacagcaactgcttgatttcgcgcagttcgcgcatatcggtggcattcagcatcggttgcttttcctgctggctggacgacgatgcaggtgcagatgcggatcgagaggatgacgaggcggatgcacttgctccactggtgcgagggctgctgctggcggtcgtgatggtggtcgtcttgtgcgattccaaggccgccgaggcaaacgtcatcgacgctgtcgacgctgacgccgctgccgttgcacttttcgccgagacggaggatggggaatcttcgccgccgcgctgctcccgcacgattttctcgttcatctccgatgaaatcaacggctgcactgcttttactgctctgctccgctccgtttgctcgctcgttcgcacggtcgctcctccactggtggtcagctcctactccttctgctgctcctagtcctcgatttcggattcactcttttagcccaccaacttggttggcatttttggctagaccagatgttattcgcttcgcgtcacccgatttcctatgtacaaatctatttaataaattttattttttcttgattgatatcgatagcaggaggcgttatttggcacagccaatcgattgactagtgcaacagtgtggggcaatgtggccagagtgtgcgcaaatacgtaaacaatcgattggcggtctgcaaatacgaaccctagcaagcaaagcttactaatttctaggtctagagattgtttaattttaagctttaccttttaaacttctctttttctaagtgttatttgacaaaacaagcgattacttatggaagttattacaaatattacaagtcaaactggttgtaacatttaaacaaagcaatccctttgcaaattcaaaaaatatactagattgtgtgcaaaaatcgataacatagttgtgccaatcagggaatagtcctgaacagagttgtcgccccatctaaaccgaatttaaattcgttacgagaaaaacaaaccttttttatgtttttttcctttttgtcctgtttttttcttttttatttgagtgttttttttgtaatttttttcgttttgttttcattgttttaaaatgtgttcattttatgtcctcccttgcggtgtatattttaattttcctcgttcatgtatctgtattattttggttttctttaaatatagtagatatattgcatattaaattagttaataataatgcgctgctctagccctctcttcactctatctctctccctcactaactcagcttcttgcttttcggaccatttgaaaacgaataaaattcgaaagagactggttcaaaatttttacattgttaaaaatcattcatatacactatatctcggttcgtttataatttagttcattaatggtcatttcggttttttttttattgttgtatgtttgaatatataaaataagctttttaatttccatttttgttattctttctgctcatcgagtcgttatttaatcatttatgtataattagttatttccgtgttatattcttgtttacaatttgttgctattttttagagaagatttcgggtttcatttagtttttacttttgttcgtctgtattagcttgattttggcagagttcttgtt

SEQ ID NO: 16373 - DNA, 2157 bp, DROSOPHILA
ccccacactgttgcactagtcaatcgattggctgtgccaaataacgcctcctgctatcgatatcaatcaagaaaaaataaaatttattaaatagatttgtacataggaaatcgggtgacgcgaagcgaataacatctggtctagccaaaaatgccaaccaagttggtgggctaaaagagtgaatccgaaatcgaggactaggagcagcagaaggagtaggagctgaccaccagtggaggagcgaccgtgcgaacgagcgagcaaacggagcggagcagagcagtaaaagcagtgcagccgttgatttcatcggagatgaacgagaaaatcgtgcgggagcagcgcggcggcgaagattccccatcctccgtctcggcgaaaagtgcaacggcagcggcgtcagcgtcgacagcgtcgatgacgtttgcctcggcggccttggaatcgcacaagacgaccaccatcacgaccgccagcagcagccctcgcaccagtggagcaagtgcatccgcctcgtcatcctctcgatccgcatctgcacctgcatcgtcgtccagccagcaggaaaagcaaccgatgctgaatgccaccgatatgcgcgaactgcgcgaaatcaagcagttgctgtggggcgacaatgtgcgcgaagatgtattcaagcgttggtctcaaggattcgagtttagtaaagtggaaccgtctgcattggtgcagaagcagggcggtccttgtgctgtgatagcgccggtgcaggcgtacttgcttaagattattatcatggacttgccaggcatcaagctctcggagatttccctcgacaaatcgcagaacctgctgatccaggcattgtgtgacatcctgaagaattgtcgggcgccgcggtaccgcatcgtccatctcttgcgccgacgaggaaacgctacagaggctggatcaaccaaaaagcgctcaccggctggcgaggaagaatctgctttagctggccaagcggcaggatcttccgaagaggtggaggaggcggcagaagccactcccgcctcggtcagcaagttgtcccaggccctgcagctcgaacacgatatgcaccaggaactgtcgccggatgagttccacgagcgcctgcacacgctccactttaagaatatcgcagccgtggcccgctactatatggagaattacgaccagctggcgcacacatacggcgtgctgctgttcatgtactcggtgttcctcaccaagggcttggagctggttgcggccgatatatcggacacgtcggagcccctgatacacagcacatacggctatggcggccagtcgcttattaacctgatgctaactgggcgagcagttgcccatgtctgggataatgagcaggacgttggcggactgaagctgcgtggcatctgtgagcagagcgacatcggctttataacactgatggaggaaatgcgttactgcacggtgggctccttcttcaagaacccacgctatcccgtatgggtgatggggtccgatacgcatttaaccgttctgttcagcaacgaaaagaggcttgtctcaccagagacgccctcggaaactggtcgtcggatcttcaaatcgtacgacccggagggcaacaatttcatatcgaccacaatgctgcgcgaagttctcatcgccttgaatctggtcagcgagccggcctatgtcgccctcatgcagaagcgtcttgatccggagaacttgggcattatactgctaaatgcgttcatggacgagttcttcccgctggagagccgctccacgccggatacgttcgagctgatgcactacaacggcataccgggctccaatgagaacaacaaggtgcgctactattgcggcacggccattttgctggaaggcgatctgaagtcggtctgcacctcgaacccgatggtcacctgcctgcagaccaagtggccaaatatcgaaataaactggcacgacggccatatgccctccttgaattgacgccgtcaagggatccacagaaaatcgctgcagaaggtgtgccagaatcgcatggaacggcatggacatactgtgatggaggaaacactgatgtaaacagaagaagacgcgtttgcacgtttctatttcacactaaattgtatttatttgaaaatattt

SEQ ID NO: 16374 - protein, 560 aa, DROSOPHILA
MNEKIVREQRGGEDSPSSVSAKSATAAASASTASMTFASAALESHKTTTITTASSSPRTSGASASASSSSRSASAPASSSSQQEKQPMLNATDMRELREIKQLLWGDNVREDVFKRWSQGFEFSKVEPSALVQKQGGPCAVIAPVQAYLLKIIIMDLPGIKLSEISLDKSQNLLIQALCDILKNCRAPRYRIVHLLRRRGNATEAGSTKKRSPAGEEESALAGQAAGSSEEVEEAAEATPASVSKLSQALQLEHDMHQELSPDEFHERLHTLHFKNIAAVARYYMENYDQLAHTYGVLLFMYSVFLTKGLELVAADISDTSEPLIHSTYGYGGQSLINLMLTGRAVAHVWDNEQDVGGLKLRGICEQSDIGFITLMEEMRYCTVGSFFKNPRYPVWVMGSDTHLTVLFSNEKRLVSPETPSETGRRIFKSYDPEGNNFISTTMLREVLIALNLVSEPAYVALMQKRLDPENLGIILLNAFMDEFFPLESRSTPDTFELMHYNGIPGSNENNKVRYYCGTAILLEGDLKSVCTSNPMVTCLQTKWPNIEINWHDGHMPSLN

SEQ ID NO: 16375 - DNA, 4943 bp, DROSOPHILA
aaagcattcataagactcgtttttgtattcttaaaagtgatttctctgaaacaattcatcatcatatagagctgccctctacaacctaagggctattcatttatgtatgtatatgcctatataaagtccacaataatcggatttggggggctgtgaaatatttggctgctatgggaattgattgattcattgattgctatggtgggtatctaccttttgctggtagttgtggcatgaagcttagctggatttgcacaatgttcacgatatgtatgatgtcacgatagatatatgcatatatagtttagaatgctgctcgcttaaggtctagaaaacaaaaagatggaaacaaaccaaaaagttgcatttacaaaaatgttatttgtatttctcgggtattatggatagttatacatagtaagcttatgcctcggtttaactaggttttaactgtagtgtttatctgtagttttatcgtagtttagcgcatatagtatgccaattgcgattgcctctcagaggggagaggtggaaaaaaacacacacatacaaattgtcttaatgtatagacggtccaaaccttgggaccgcatcgtttcgctttacagttttttattttaacttttatctgcatcgaatagctgagaattgcgcttacaattagtgccataaacttgataaggttttttgcttagtttcgcttgccttgattactttgttttttgctttttcgtatctgcgctacttgcatcatcatcgcgtcattttccgacgtattcgagtattcagaaatacagtattcatcattccacactcttaacactaaattgcgaaggttacaatcgtttcttgtcttataccgctagtaatgcttctcagagtcgacgtgatcgttaattgataattatcgcataattaatacaatacaatgcaatgcaggatgccattggcaattctaactgcaattttgtggtttgtcctggtcctaaactaacttggcctatggcaaattggctcgaatgccatccaaactggaacgcagaaccaagctgccctcaacccagaagttcggacgatccaacatgttctgccacagggagagctcctttccagtggcatccatccattccacctgccggccatagctgcgacctgtaaaaaattaagcatttaatagaatttcaatgggggattaatagctagaacttaccggttcccaacgagaatcgtatgccgccaacaaactcattgctggccaaacgatcgtgatcccagacggttagctccaaggcgcgttctgacaattcctccagggagacgtcctcgtaaacaaatgtgtagttccagctgggatgcagggtgcgcttcaccaccggcgtcttttgcttggagctcctcgtccgatcgggcaacaaataacttaggaatatatattacgattagttatgtattaatgtcaacaattattagttataatcacctcttgcagaaggcgtcgcaggtgccgttcgcctttataggactcagatgcttggcctccttgaccagcacatgcagctggccgccttttgaagtgcgttctgatttggaggccaccgacttaatgctgcctccaaatttgcgcaagttcgaggagctgcctgttattgaggagccgcgcgaaaagaacgaggatttgatgttctctgggggaatgtacttcagacccactacgatgtcacctcggtaggtagccacctcgtcgaagggttcgctctggaacgatttaagaaatgtaagtcaaagtacgtttatctttatgtctatttctattcggatttgtttttaatgcaataaatcagtaaaatcggctttggtacttacgcgttcttggagaaggtaccactgcgactggggattgtcgaagagccgcccctgtaaattgacactgacttcgcccaggaagtcgttacgcccaaacatatccgagtgccagacggtgagccacaatgttcgtgattccaagctggaaatgggtgtgtggaagcgcatcgtctcgtcgaagatgggattcagcgtgtgcttcttgactttggttttgcgcttgccagccttcgatttgtcgggcagtagatacacctaaataggattaaagccaagttatagtaaaatatttcgagtggggaattggtaatgtaacttaccttaacgtagggatcactgcgattgcgtttggcatcgacggcagccaagtccttgcagcgaaccacgtgcacttccaaagcactcagcttatagttgtactgcatggcgaactctacttgacccttgaccaccacggtgccatagcgaccttctccggcgcccgaataaacgctggccatagattcggatcgaacctaacatgggataacataatgggtttagtcacttacttttcactgggactatttttgtgatttacttacccccagcgagctgagactgctgcggttctgatgcatggccaccaggcgatcgatgtcctcatccgactgagtgggccacgtttcgctggaggcacgcgactgaatgggactgcccgatccatctgcctgccgttgtccaattaccggcgatcgtgacagttcctcagcggccactttggcttcctctgcaacaaaaaaagagagaattcatcaattagcactcgagttttccacaattatggctaatgatctatgtatgagagctgatgattaacgattagagtagatagatggaaaatatttcttggaatttttagctccattaataatccccctggcactttactttatactttaatgtcatagtcgtacatatgaaagttaattttgcagagcttgtagcacttttaggtgcaatgaagtgtgatcatgggttctgtttatctgttttttttttctatctatagataaatcccatacagattagtcccattacgctattccactggagcttagaacaaatagttgcgttagtgcattatgagaagatatctgtggggagaagcagcttgaggcgtcggtgcaaggagcatgcatttggtggcaggcagacgaagccgaaggagcacttgccgcctaccttgcaccgtcacccgttcctgcttttgacgatcttcccgctcagattgctcctcctcgttttccacgaaggtcacatgcagtggcgtgcgacggtgcagaattaatgaagtcctgcccccagaagcagctgcaaccacttcctctgacgataccggcaaatcatcttctagggtctccagaaaccggtccgagttagacctcaaactgtcgtcccaggtccaagctcgtcgcttaactatgggcggagatctcagctgcgtgggtagttgcttcacttgctcctggggcacaggattcggtgtctcttcaactaaaatctcactttggccgttggccgccgcctcgcgttgtttcatctccactatgtaggaagccaccttggcatcgatgtcgtcatcttcctcctctgaatcgtaaccatatccattggttcgccttcggcagcaataacagaaaaaatgacttttctttgacttttccctcgaactgctccaataatcctgatagctcctttggcgtcgtctcttcttccaccaacattggccaaaaagttgacgccacttggacttgcgcttcagtttcttgccttcatcctcagaccgcttttttctcattcgatttaaagctgcatattggattttcccagccgaactggagggcagcgatgagccggctggctgggactttactctgccatagttgtgcactcgagccagtggagcgggtgcagtcgaagctggctgggatttcttggaggaggtggaggcagaggcgaatgcattatagctgggggcttcttttggcttcgagcttgccattcgccgcgggccaattaaacgagtcacttgcttcattttctcgatttctcatttcacaattgcgcgttttggtggcaagattaattggtgaccgctttttttggtgccatccgcagccgactgcaaatgttttttatatcacttttggctttgccgattccgtcacttgacagttgtcatctaatgggtttcttaataccctatatagcgcaattcgaaaggtataagccgtggttttaattgtttaagcacccaaattatatttaattacgattaaatcattagttttgagtgaaaaagtggaactttattaattgaaaattgttaccctttctagcattatttgtcatagcaaacaatgattcttttatttgctatgacagggctaggtttttagtctagtaaaataatttgctatcttttaaattttgctgataagattttataaaaatctctagctctttactatgtttccgttttgcacagtgaaagttgatattagaaaccattgcaagacgtcacggatagtaaaatttataaaatcccatttaatggaaagttttttaaattgcattatatatctatcgtttgccagaaatatgtgacaattaaataaaactagatatcagtgtttggctttggtaaatatcaaagccgagtgataaagtagcttccacttaatatctgagatatattacaacggaaaagagctggtaaaatgaatatttttaagaaatatgacatagattgcaggccctttgataagatgcctgacgacaagcaatatttggtcattcggacacgtaattgaagcacttgatcgccgatcaagaggcgcttatcttagatagctggcacctgggtcataaaagcatttgcatggcccaccgtcagcggtcaatataatcaagtcgaaatgtatagcggccctgaacttgccacagccttcaggtgatggccaaaatgatggcgtgaaatcgaaggggagcagcagattgtcagacaatcgaggcagtaagcccataaaagtgggtca

SEQ ID NO: 16376 - DNA, 2127 bp, DROSOPHILA
atgaagcaagtgactcgtttaattggcccgcggcgaatggcaagctcgaagccaaaagaagcccccagctataatgcattcgcctctgcctccacctcctccaagaaatcccagccagcttcgactgcacccgctccactggctcgagtgcacaactatggcagagtaaagtcccagccagccggctcatcgctgccctccagttcggctgggaaaatccaatatgcagctttaaatcgaatgagaaaaaagcggtctgaggatgaaggcaagaaactgaagcgcaagtccaagtggcgtcaactttttggccaatgttggtggaagaagagacgacgccaaaggagctatcaggattattggagcagttcgagggaaaagtcaaagaaaagtcattttttctgttattgctgccgaaggcgaaccaatggatatggttacgattcagaggaggaagatgacgacatcgatgccaaggtggcttcctacatagtggagatgaaacaacgcgaggcggcggccaacggccaaagtgagattttagttgaagagacaccgaatcctgtgccccaggagcaagtgaagcaactacccacgcagctgagatctccgcccatagttaagcgacgagcttggacctgggacgacagtttgaggtctaactcggaccggtttctggagaccctagaagatgatttgccggtatcgtcagaggaagtggttgcagctgcttctgggggcaggacttcattaattctgcaccgtcgcacgccactgcatgtgaccttcgtggaaaacgaggaggagcaatctgagcgggaagatcgtcaaaagcaggaacgggtgacggtgcaagaggaagccaaagtggccgctgaggaactgtcacgatcgccggtaattggacaacggcaggcagatggatcgggcagtcccattcagtcgcgtgcctccagcgaaacgtggcccactcagtcggatgaggacatcgatcgcctggtggccatgcatcagaaccgcagcagtctcagctcgctgggggttcgatccgaatctatggccagcgtttattcgggcgccggagaaggtcgctatggcaccgtggtggtcaagggtcaagtagagttcgccatgcagtacaactataagctgagtgctttggaagtgcacgtggttcgctgcaaggacttggctgccgtcgatgccaaacgcaatcgcagtgatccctacgttaaggtgtatctactgcccgacaaatcgaaggctggcaagcgcaaaaccaaagtcaagaagcacacgctgaatcccatcttcgacgagacgatgcgcttccacacacccatttccagcttggaatcacgaacattgtggctcaccgtctggcactcggatatgtttgggcgtaacgacttcctgggcgaagtcagtgtcaatttacaggggcggctcttcgacaatccccagtcgcagtggtaccttctccaagaacgcagcgaacccttcgacgaggtggctacctaccgaggtgacatcgtagtgggtctgaagtacattcccccagagaacatcaaatcctcgttcttttcgcgcggctcctcaataacaggcagctcctcgaacttgcgcaaatttggaggcagcattaagtcggtggcctccaaatcagaacgcacttcaaaaggcggccagctgcatgtgctggtcaaggaggccaagcatctgagtcctataaaggcgaacggcacctgcgacgccttctgcaagagttatttgttgcccgatcggacgaggagctccaagcaaaagacgccggtggtgaagcgcaccctgcatcccagctggaactacacatttgtttacgaggacgtctccctggaggaattgtcagaacgcgccttggagctaaccgtctgggatcacgatcgtttggccagcaatgagtttgttggcggcatacgattctcgttgggaaccggtcgcagctatggccggcaggtggaatggatggatgccactggaaaggagctctccctgtggcagaacatgttggatcgtccgaacttctgggttgagggcagcttggttctgcgttccagtttggatggcattcgagccaatttgccatag

SEQ ID NO: 16377 - protein, 708 aa, DROSOPHILA
MKQVTRLIGPRRMASSKPKEAPSYNAFASASTSSKKSQPASTAPAPLARVHNYGRVKSQPAGSSLPSSSAGKIQYAALNRMRKKRSEDEGKKLKRKSKWRQLFGQCWWKKRRRQRSYQDYWSSSREKSKKSHFFCYCCRRRTNGYGYDSEEEDDDIDAKVASYIVEMKQREAAANGQSEILVEETPNPVPQEQVKQLPTQLRSPPIVKRRAWTWDDSLRSNSDRFLETLEDDLPVSSEEVVAAASGGRTSLILHRRTPLHVTFVENEEEQSEREDRQKQERVTVQEEAKVAAEELSRSPVIGQRQADGSGSPIQSRASSETWPTQSDEDIDRLVAMHQNRSSLSSLGVRSESMASVYSGAGEGRYGTVVVKGQVEFAMQYNYKLSALEVHVVRCKDLAAVDAKRNRSDPYVKVYLLPDKSKAGKRKTKVKKHTLNPIFDETMRFHTPISSLESRTLWLTVWHSDMFGRNDFLGEVSVNLQGRLFDNPQSQWYLLQERSEPFDEVATYRGDIVVGLKYIPPENIKSSFFSRGSSITGSSSNLRKFGGSIKSVASKSERTSKGGQLHVLVKEAKHLSPIKANGTCDAFCKSYLLPDRTRSSKQKTPVVKRTLHPSWNYTFVYEDVSLEELSERALELTVWDHDRLASNEFVGGIRFSLGTGRSYGRQVEWMDATGKELSLWQNMLDRPNFWVEGSLVLRSSLDGIRANLP

SEQ ID NO: 16378 - DNA, 3944 bp, DROSOPHILA
aaaaaatgttaagctccagcacggcgagcctatcatattttatttaaattttatttaagtcccttggacttagattgctagcagatgctcgttgagaaattcctaattaaatttaagataagaaacagacgtttggctgcatccaacacagcctgtcacaatagaactttatgtagtcactgaccgagaattgcgcgtctcaggcgaaattgcaatgtcaaccgcacggaacgaaagtaaagtttgatgtggggctttcgattgcctgcagtcgcattttcgtgaaacgaaattgccaaatacacgaaagaaagctatatgaaaatgtatagatcgctggttacctattacgatgtacttggaaatataatatacttgtactatctcaacggagatatcagtggcgacgttataagctgttcgaaatatccctttgatctgtttttattaatattattttgttaccatttgagtgtcctacgcatactaccggtaaaaagtatgtgtttattttaaatcttaggcctttgttgttgctgaatactatgatgaggagataagtatagatttttggggtcggtgattgcaaacatgcaatgctgtttatttacagatattatagctacgattaaattcgtgacgtcaaaaagtcagagctgtttaaattataagcagatatgcaatttgtatatcaaatctatacgaaatctaaacaaatcccctattttgggcaactaaatacttaaaaagaaatgacaaactctagtttgttgtgtgttttttaactcaggaattcgctgtcagtcattctttttatttgggttttatgacgtataatcatcgtgcatataattcatttgctttgatgaattacgacaaacttatgacctttaaatatactaatttaatcagtcttcgtggaggatactttaagtcggatgacaatgacaaactaagtctcagtgttctcagccagaggttcactttaatttgtcttcaattatacactttcagtcctaacatttttttcttttcttgaaaaacaaggaaagtagaggaagctctcgttcaaggcaaacttttctccatccgccaaggtttcgggcaacttcctaataggaatcgacacaataaataatttgttcagaataacagttatatatactaacttgtttaaggtctccggtaaagtgagacaaagtccagctccaaagaacatcaggcagctaatgaagatcgaggggagaggcttgtagtattgtgccaggtagatcacatagaaggccagtgagctggatgccaatccaatgacatggatgttggataccgcctgtcctctcacactggtcggaatgatttccgccgcatactgtatttccgcatcgtaggaaacggtggctccaaatcgtcccagacctaccatgatagccaacagcagggcgttctccgtgggatccaagtgggctatcatgaaacccgtcgccgtggtaataagtccacccacaaagagggcggtgcaggccatgcccttgcgtccgatcttgttctgcaacaagaggatagcaactcccgctgggaggtatacaatcgatgtgaaggagaagagcttaaagggcgaagtgcctaagccctccatattccggttaatcacatcgcatgagagggttataatgactctacaaccgaaagaaggcattaaataatgcactaagatccaaaagtaaagaacttacgacttcacgagcaatgtcaaagtgaatcgacgcaaccgaggggtcaaaaacatggctaagaaagtgtcctcgtgactattaagcttgtaatcctgaagttccctttcccgatagtatttgacaaactcatcgaaaacggactcctccacatgtcgcctattgaacttggccactttctttagacaaatcaccgcatcgtcgtacttccttttggtcaaaagccactgagcactttcgcagatcaggaatggatatataaggacacccagtgctggaagagatgccagccaaaggtagcgtcgccaattaccaatccaaatggcggcccagggcgaggtcatcagtccaaaacagtagaatacagccaagatgatgttgaggccaaaggtacggctcttggggcttaagtactcaaagactgacgatatggggaacgtagattaatttaaccttatattttgatttaaagttatattacccaatatgtacattaggtagtacatggtatcagtggatagccctgacataaatctggaaaaggcgaaccagggcagcgtgtgcacaaaggaggtgataaaatccccagttgcaccacacaaggtggccatcagcagggaaggcagacgacctacttgatccgacagatagccaaagattatggtgcccacgactgagcccatgaagaagaaggattggcccactgctggatgatgcgatttgtcacaaacccatttgagctgaagtgggttttctatattgtaaatcttttcaacaacgtttttcaatggcttcatacctcggtggtaatgctttcgtagccgctctccctgttaaaaatccaattcctgcactttcggttcgtagatacaacacctgtgccgttgactacgcccaaaaggggcgtgcaggatgaggcggatatgttttcatataccgagcgaatcccttcaacactgagaccattaaggtcagcatggaagcacctgcataagaaagattggatattacatggtcgggaccaatcacccattttgtgtccacactcaccaatgctctggtgtgaaggtgataagggtctgcgaaaagtagtgcagtgatccaagaatatttgtgtagccgtacagcaaaaggatcatcacctggaacctgccatagtttccacacttatccagaacctgactgaaatccatcagacgttgcttcgatgacataaaaaatttccaaagcgactgactacttccaactccctttgagaactgaccagaagctaaattaaactgcgctgggaatagccataaatttatctttagcggctttaggcaatatgtttcataaagctaaaacagctggatgggttttaaaattacagatataccgtcaaatgttttgccagctgtgagccctgtaattgggaaaatatctacaggagatgtcacatctatcgcgtaagtttttgtcgaaacaaaatttttgcaattaaaatacctacatacataccaatattgtgcttaactaatccattattgactagattttccattcagccatattggcaactttgtagcattagcctgccattcttgttgatcaattgctttgatcttctggctaaaaatagttaaaacagctgacatcgactggcccggcggttggcacgactttgattctttgttatagttagttgtcgcataaacaggcccgatggtaacagcaagggtaagacaatgcatgcagatgtcaatagttttccagatgccagatacaaatttgcagccataaattaagctcacaaaacggtaaacatgagaattgtcgcagacacttggtcgttagaggctggaaagggtatttttggctaatcaggcactcttaggaactagctgcaaacttttttggtccttccagaaattatctcaagtttatcattgattataaactatgtaactgatcagtattcctattacaatgtgtcctatcatagtcagcttttagcatctccgctacgtagcaaccatttaaggggaagatcaaacagaaaaccagtcttcagctgaaggatcagtcatgagtaaccttatatagtcgtcatgccactttttgaagggtattattaatgacattatttgcctagactgcaagtggttgtttggcctggtctgtgggccagactaatgtgccgacagcagcgcgttgaccttttgctttattagg

SEQ ID NO: 16379 - DNA, 1647 bp, DROSOPHILA
atgtcatcgaagcaacgtctgatggatttcagtcaggttctggataagtgtggaaactatggcaggttccaggtgatgatccttttgctgtacggctacacaaatattcttggatcactgcactacttttcgcagacccttatcaccttcacaccagagcattggtgcttccatgctgaccttaatggtctcagtgttgaagggattcgctcggtatatgaaaacatatccgcctcatcctgcacgccccttttgggcgtagtcaacggcacaggtgttgtatctacgaaccgaaagtgcaggaattggatttttaacagggagagcggctacgaaagcattaccaccgagctcaaatgggtttgtgacaaatcgcatcatccagcagtgggccaatccttcttcttcatgggctcagtcgtgggcaccataatctttggctatctgtcggatcaagtaggtcgtctgccttccctgctgatggccaccttgtgtggtgcaactggggattttatcacctcctttgtgcacacgctgccctggttcgccttttccagatttatgtcagggctatccactgataccatgtactacctaatgtacatattggtctttgagtacttaagccccaagagccgtacctttggcctcaacatcatcttggctgtattctactgttttggactgatgacctcgccctgggccgccatttggattggtaattggcgacgctacctttggctggcatctcttccagcactgggtgtccttatatatccattcctgatctgcgaaagtgctcagtggcttttgaccaaaaggaagtacgacgatgcggtgatttgtctaaagaaagtggccaagttcaataggcgacatgtggaggagtccgttttcgatgagtttgtcaaatactatcgggaaagggaacttcaggattacaagcttaatagtcacgaggacactttcttagccatgtttttgacccctcggttgcgtcgattcactttgacattgctcgtgaagtcagtcattataaccctctcatgcgatgtgattaaccggaatatggagggcttaggcacttcgccctttaagctcttctccttcacatcgattgtatacctcccagcgggagttgctatcctcttgttgcagaacaagatcggacgcaagggcatggcctgcaccgccctctttgtgggtggacttattaccacggcgacgggtttcatgatagcccacttggatcccacggagaacgccctgctgttggctatcatggtaggtctgggacgatttggagccaccgtttcctacgatgcggaaatacagtatgcggcggaaatcattccgaccagtgtgagaggacaggcggtatccaacatccatgtcattggattggcatccagctcactggccttctatgtgatctacctggcacaatactacaagcctctcccctcgatcttcattagctgcctgatgttctttggagctggactttgtctcactttaccggagaccttaaacaagaagttgcccgaaaccttggcggatggagaaaagtttgccttgaacgagagcttcctctactttccttgtttttcaagaaaagaaaaaaatgttaggactgaaagtgtataa

SEQ ID NO: 16380 - protein, 548 aa, DROSOPHILA
MSSKQRLMDFSQVLDKCGNYGRFQVMILLLYGYTNILGSLHYFSQTLITFTPEHWCFHADLNGLSVEGIRSVYENISASSCTPLLGVVNGTGVVSTNRKCRNWIFNRESGYESITTELKWVCDKSHHPAVGQSFFFMGSVVGTIIFGYLSDQVGRLPSLLMATLCGATGDFITSFVHTLPWFAFSRFMSGLSTDTMYYLMYILVFEYLSPKSRTFGLNIILAVFYCFGLMTSPWAAIWIGNWRRYLWLASLPALGVLIYPFLICESAQWLLTKRKYDDAVICLKKVAKFNRRHVEESVFDEFVKYYRERELQDYKLNSHEDTFLAMFLTPRLRRFTLTLLVKSVIITLSCDVINRNMEGLGTSPFKLFSFTSIVYLPAGVAILLLQNKIGRKGMACTALFVGGLITTATGFMIAHLDPTENALLLAIMVGLGRFGATVSYDAEIQYAAEIIPTSVRGQAVSNIHVIGLASSSLAFYVIYLAQYYKPLPSIFISCLMFFGAGLCLTLPETLNKKLPETLADGEKFALNESFLYFPCFSRKEKNVRTESV

SEQ ID NO: 16381 - DNA, 3455 bp, DROSOPHILA
gagcaggacaacatcatctatgtcaactggctgagtctcatctggaacggcatgggtgtggctctggaaatgttcaacccgaagtccaagctgtggctccaggcgcactctcgcgctcgtttcgtgatcatgaaggtgctgctggaggcaggcgaaggactcgttaaggtcgaggaaaccgaaaagggtaaaaaccttttgctgacggtggatcgcagcaagatcgataccgtgggcaggaaggcgctgggcgatttcctgaccaagctgcaggtgtacaaatccaccgccgacatcgaggcagcttccaagatgtacgaacactactcgaaggtcgacgagagcggatcgcatccgtgggccaagtggcgggatatctgcctggcgcacaagaagccgcgtatgattctcgtccaggccaacacggcgatcggccaggaccaaaaggtccagctgaagacctacgagcccacccacgaggggtacatccagtcatgggtggagcgctaccccaacactgacatcgacgatcttctggagagcatcgtggagaaggacaagaagtatttcccgactgccttcaacaactgagaacatttcgcatttaacattttcgccttcattatcaattcaatttgttaactatgattttgaaaaaaaatatataaaaatatatatagtcatctaatgaccaacaattttaaattttaaattgcttttatagtaaaactttcgtagtgaatggtgattttaagatcgtttttgccattcaccgaaaatattgacaaaggacctgaatttaattgcttgtatgtacatacatatattgcgaccaaatgtatattgctcataatagctccacaattaagaatgtaaatataaaatcaaatactacaatttgttcattgaatgttttcatagtagccagtcgataaatattggtttttttttttttattttgtttctcgtttccatttctgtttgcattgttttgaccaccatggcaaccggtagaaatcgtggtaaccacaaggaaggtggcactatcaacatcggacagccgctattccaggtgcctcattcattgcgcaaggagcacgactttttcagctcacagctgttccgaaaattgcagtacgacctggaggaggtgagccgcagccaggagctttccaaagtgagtcccataacccgcgacttcatcgaggaggcagcgatgacgcaggaaatgcaagatcttaagcgtgcggagtttgtggagaggaaacgtcgccagcaattgcggcgggattgcgaggaactgcgcgacttggcggagcagctgcgcctagccgccatttccagggatatagccgagaatttggaggagaaaaaacgtcgtcgacagctagacatcaaattggaagccgcggaagtgtcccaagagcgctgtctgctggaggtcaggcaacgtgagaaggaagtggctcttaaggaggaacaacgccgccttagggagtccttggctgaacaaatggaggagaaccgccgacggcgcctgcaagagcacgctcaggtgatgaatgaccgggagctgagccttctgatgcagaagcaaatccaggaagaggatcgagcccaggagctggaggcgcagagaaaaaaactacaaaagcgacaggacatgctgcggtccatcaaggagaaccaggaactcagagaatggcagcgagctcaatacaaccaggagttgagtgacttagtccagaagcaaagtgacatggagcgcaggaaactccagctggaggctgaacgccaggagattcaacgcaaaaaacaagaaatcagcattcgtttgggccagcaagtcctagaaatcgaagtaagtcttgaagcggtttttcgattcaatcaataaagctaactcttattgcagaacaaaaaacggcatcgcgacaatctgctgctggatctgttggaggcggagtacacggccaagagtgacgagcgctatcgccaacagatgcagcaggagcagatgtctcgccagcgcaccagacaggagttggatcgctatcgacaggaggtgaagcatcgtaagatggccgaaatgcagatgaagcgggcggagatggctacgcggcaggaggaggcgccggatacaatcaaccagaattccgaaaagcaactggatgaatatcgcagacgccgggcccatggagcctccttgcttgctatgattgaggataatcaccggaagcgggcggaggccaccgctgaaaatgttcagtactttgacatgaaggccaagatcgatgccgagcaagaggaacgcatcaaacaggagcgtttggccatgttgagccaggttccttcctccgtgcttcgatatctaccaaagcatgtccttaagtctacggatagggagcatttctgcctaattgacgctcaggcacggggcggtggcgattcctagtcagtggcatagttccaaattgtaattctaagacggtcaagtttatttttggcttccaaaaataaattatttaaaattaagcgccgttgtgtctacgtgacgtgtatcatttaggctagcgaagatgccagaccgtcgcctgtgctgccagttcgttgttttgctcgattggaaacctcgattgaaaggatattctcacagaatgcgcatctgctgtttcaatttggtttaatattattttgaaagctcggcctaataaccgcttcataattgccgcgaaagtgtttatgcagtccaatcaaaaatactataaatgttatctgtaattgaaattttatatcaaattgactactaactatttctttgcatcttactaattgcattcaaaaaacataactttcataaaatacatgtttagatatacgtttattttgactggtataccaatatatatctttttataaaagataaagccagtgctgcggaagcttgtcgctggtgcagaagctcgtgtgtgtgaatagcttcttttcgaaatcagtggtaccgagcaatatcgaaaccaagacatccctaacacgcccattatcggactatcgatactatcgcgagtgctagctgacgctggtctggttttattttatgttaacgggagtgatcttgcgtacaaacaataacacggaatcgcagtgaaagggcgttgcacaaatgacagtgttttggcaaaatgcccgggctagttttgaccacgtttagcagtgcctagaacgcagagtgcgcgacgctaaaacaagagaaccgcgacaaaacaaaacgcggaaacgcataaagtgaaaaaaaaaacacaaacgcagacagcgaactttggacacagacaatcgtaaacgcacggggaaaacaaagaaaaacgaagaaatgtcggcgcagcgtctaaatgcagcggaacgggatttggagaagttcatcaagttcctggtcttgaagtccacccaggtggtgg

SEQ ID NO: 16382 - DNA, 1401 bp, DROSOPHILA
atggcaaccggtagaaatcgtggtaaccacaaggaaggtggcactatcaacatcggacagccgctattccaggtgcctcattcattgcgcaaggagcacgactttttcagctcacagctgttccgaaaattgcagtacgacctggaggaggtgagccgcagccaggagctttccaaagtgagtcccataacccgcgacttcatcgaggaggcagcgatgacgcaggaaatgcaagatcttaagcgtgcggagtttgtggagaggaaacgtcgccagcaattgcggcgggattgcgaggaactgcgcgacttggcggagcagctgcgcctagccgccatttccagggatatagccgagaatttggaggagaaaaaacgtcgtcgacagctagacatcaaattggaagccgcggaagtgtcccaagagcgctgtctgctggaggtcaggcaacgtgagaaggaagtggctcttaaggaggaacaacgccgccttagggagtccttggctgaacaaatggaggagaaccgccgacggcgcctgcaagagcacgctcaggtgatgaatgaccgggagctgagccttctgatgcagaagcaaatccaggaagaggatcgagcccaggagctggaggcgcagagaaaaaaactacaaaagcgacaggacatgctgcggtccatcaaggagaaccaggaactcagagaatggcagcgagctcaatacaaccaggagttgagtgacttagtccagaagcaaagtgacatggagcgcaggaaactccagctggaggctgaacgccaggagattcaacgcaaaaaacaagaaatcagcattcgtttgggccagcaagtcctagaaatcgaaaacaaaaaacggcatcgcgacaatctgctgctggatctgttggaggcggagtacacggccaagagtgacgagcgctatcgccaacagatgcagcaggagcagatgtctcgccagcgcaccagacaggagttggatcgctatcgacaggaggtgaagcatcgtaagatggccgaaatgcagatgaagcgggcggagatggctacgcggcaggaggaggcgccggatacaatcaaccagaattccgaaaagcaactggatgaatatcgcagacgccgggcccatggagcctccttgcttgctatgattgaggataatcaccggaagcgggcggaggccaccgctgaaaatgttcagtactttgacatgaaggccaagatcgatgccgagcaagaggaacgcatcaaacaggagcgtttggccatgttgagccaggttccttcctccgtgcttcgatatctaccaaagcatgtccttaagtctacggatagggagcatttctgcctaattgacgctcaggcacggggcggtggcgattcctag

SEQ ID NO: 16383 - protein, 466 aa, DROSOPHILA
MATGRNRGNHKEGGTINIGQPLFQVPHSLRKEHDFFSSQLFRKLQYDLEEVSRSQELSKVSPITRDFIEEAAMTQEMQDLKRAEFVERKRRQQLRRDCEELRDLAEQLRLAAISRDIAENLEEKKRRRQLDIKLEAAEVSQERCLLEVRQREKEVALKEEQRRLRESLAEQMEENRRRRLQEHAQVMNDRELSLLMQKQIQEEDRAQELEAQRKKLQKRQDMLRSIKENQELREWQRAQYNQELSDLVQKQSDMERRKLQLEAERQEIQRKKQEISIRLGQQVLEIENKKRHRDNLLLDLLEAEYTAKSDERYRQQMQQEQMSRQRTRQELDRYRQEVKHRKMAEMQMKRAEMATRQEEAPDTINQNSEKQLDEYRRRRAHGASLLAMIEDNHRKRAEATAENVQYFDMKAKIDAEQEERIKQERLAMLSQVPSSVLRYLPKHVLKSTDREHFCLIDAQARGGGDS

SEQ ID NO: 16384 - DNA, 3840 bp, DROSOPHILA
agttcatctggttatgcccttctttacgtctgccagtatgaacgccgtgaaccttgggaactagaaagttgacatcattcatccagattatagtgacaccaagcttaatacaagttcagtcacaaaaaaaattttgtccacttgtccaatttgttcactagctgagtatctgttagtcgagaaaatcgaacttagcgttctctctttttactaatatgacgaccgcaagagcataacaaagcagtcttttatctctactggagctctacaattcaaataggtttaattcttgcaaatagaaacagttaagaccgattaaacaatgtcgcgtcggtattacacaaattcacagtttaaaaaacggcgcttgaattgtctataccgtttatttaataagtggcaaactgaattttgaaacaagttattaaactttagatattcaacttaaatataaaatataaatcgcatcttctttctcagtatttacaaatatattcatttattttttgatcactgaaaacgtttttagtgtacacatttggaaaacttattctacaaatacagtctaatttttgataccgctgcttgtactacaaaatattacactttaactgtttccacagacaactacaagtccagtataaccgagttccacaatccaaacatatttactcaaaagtagacggccgattccgttgactgcgagtacattttcgcgttttgggtgtccagtgtggcggctgattgagttcgtccctccagaaaactaaaggtgtaccaccgatcgttctttccgaaattttcaccatcttccaaagaagtgggcaatgtccggtgaagggtttccggcagcaggaggcagagacacgcacccagcaaggaaagcacgcccaagataatctccggtagcggcgagaatacgctcctcgtgaacaggatgtacgcactgaagaaggtgaaggcatagccggccacgtggactgctgcaactccttgtccgcgaacgcaggtggggatcagctcggtggcatattgcgcccctgaattgtaggccactgtcactccaaagcgacccactacggacaggcttaccagcaaagtggtggctaaaaggatgcaagtttgtgatgtgttatcattatatttaaatagggttttgagaataaaaatgcaatcttaaatattgatttaagctctacatttttaggtttcacagcactttttatgcctctttatgaaatacgtaaaaatttttctataagctactgaaatatccacacaattatctatttaatgttaatcttctgttaaaatcgtgtcaaaagtcaacttaaaatttatccccagttgattgtgttgaactcactcttatccgatgcagaggcggcaaagatgatgcctccggtgaccgagatgaaaatgccactcagcagcagagaggcggacgccatcgccttccgaccgatgcgatcttggagggcgatgatgagcagacacgccggcagaatggcggtggcgctcagcgagaacatcacaaatggcgaaatgccaaggccctgaacgttgcgagaaaccgcatcgtagcagagggtgatgaccatgctgcgcgtgggtgttgaaaattagtaaaaatcaaaaccatcagctcactcttttgggccactcacgacttgaagaagaggatgagggtatggcgacggagtcggggcgtttggaacagatcaagtagatggggtgatgccttctggttttgctgactgcacttacactcctcgatgaactccgcgtaggcactctcttccacgtgccgtccatttatcttggctacccttttgaggcagacaactgcgctgtcatacttctgcttggaaatcagccactgaatgctttcaggcacgatgaggtagaagaatggcaccaccagcaggggcaaggaggtggtcagtaggaatccccgccagctgcgcatgagcacggcgatccagggtgccgccatcgagcctagacagtagaaaaatccaatgcagatgctcaggccaagggtgcgcaccgatggccgcatgtactccataactaagttgggtagagaagtatataaaattatatttcaactgctgctgcaagcagaaattgaagatttagcatgtgagaagacggctgttttcaagggcagaaacactttctttaacatgttgcacacttctcagggataacgagtataaaaatgcgctcacccaaaatgtacatcatcacaaagttgctatccgtagcaatgccggaaatcatgcgaaacatacagaaaagcgtgacattggtgctccatatggtaagtagattgcctgtcatagcaatcaggttggccacgatcagaatgggcagacgtccaaccacatccgccaggtagcccagaaccatagagcccaccacagagcccacaaagaacatggactggccgagcgtgagtttccaggcatcggcgcacacccaatccatttcgctgggaaagctctggtagcccatgtatagctcgtagttatagctgtagcacgtattcggagtgctaatattccggttcaatggcaggcagctcgaatcaactggagactcaatgctggcgggcaaaccatctgcacacctgggcgtatgagcaatgcgttaagtatacgacgtggtgaacagcggccctatacccaccagtatttgggaacgaagctgatgatagtttgggagtagtagtgcagggctgaaagaacgttgatcacacagaagagcagaagcattatcatctgcagacggctgaagtcgccgcacttctctaggatcttgtccacctccaacattgtgttctcttacaatcgaaacacttgaatccagccactttttttttatccgggaattgagatgagcctgagaacaacgacacgactccgactcatctccacgactgcatatgcggctggcctaattggctgcgttgaatttcctcttaatttccaaaaccaattagtgcgctcagcgattcttcccagaacgagatcagaaataattcgtgtggattatgtttgacagctgcggtctttcgtcagatgttgtgtaattccactggagcactgacaactacaaggaacacaaatcgttatgtaggtcgtaagtcgcagttgtttccatatcccttgaaattaaattatagatagtttttcagacactttgtggcaacaaaaattgagttgatcaaatatggaagaaaaaacacaagctaagaacatattttaaaacattagaaatgcaatattgttgcaatttgctgttgaggtcacagttaattttggtttattcactggcacatcttatttaaaaaaatgttaagctccagcacggcgagcctatcatattttatttaaattttatttaagtcccttggacttagattgctagcagatgctcgttgagaaattcctaattaaatttaagataagaaacagacgtttggctgcatccaacacagcctgtcacaatagaactttatgtagtcactgaccgagaattgcgcgtctcaggcgaaattgcaatgtcaaccgcacggaacgaaagtaaagtttgatgtggggctttcgattgcctgcagtcgcattttcgtgaaacgaaattgccaaatacacgaaagaaagctatatgaaaatgtatagatcgctggttacctattacgatgtacttggaaatataatatacttgtactatctcaacggagatatcagtggcgacgttataagctgttcgaaatatccctttgatctgtttttattaatattattttgttaccatttgagtgtcctacgcata

SEQ ID NO: 16385 - DNA, 1623 bp, DROSOPHILA
atgttggaggtggacaagatcctagagaagtgcggcgacttcagccgtctgcagatgataatgcttctgctcttctgtgtgatcaacgttctttcagccctgcactactactcccaaactatcatcagcttcgttcccaaatactggtgtgcagatggtttgcccgccagcattgagtctccagttgattcgagctgcctgccattgaaccggaatattagcactccgaatacgtgctacagctataactacgagctatacatgggctaccagagctttcccagcgaaatggattgggtgtgcgccgatgcctggaaactcacgctcggccagtccatgttctttgtgggctctgtggtgggctctatggttctgggctacctggcggatgtggttggacgtctgcccattctgatcgtggccaacctgattgctatgacaggcaatctacttaccatatggagcaccaatgtcacgcttttctgtatgtttcgcatgatttccggcattgctacggatagcaactttgtgatgatgtacattttggttatggagtacatgcggccatcggtgcgcacccttggcctgagcatctgcattggatttttctactgtctaggctcgatggcggcaccctggatcgccgtgctcatgcgcagctggcggggattcctactgaccacctccttgcccctgctggtggtgccattcttctacctcatcgtgcctgaaagcattcagtggctgatttccaagcagaagtatgacagcgcagttgtctgcctcaaaagggtagccaagataaatggacggcacgtggaagagagtgcctacgcggagttcatcgaggagtgtaagtgcagtcagcaaaaccagaaggcatcaccccatctacttgatctgttccaaacgccccgactccgtcgccataccctcatcctcttcttcaagtccatggtcatcaccctctgctacgatgcggtttctcgcaacgttcagggccttggcatttcgccatttgtgatgttctcgctgagcgccaccgccattctgccggcgtgtctgctcatcatcgccctccaagatcgcatcggtcggaaggcgatggcgtccgcctctctgctgctgagtggcattttcatctcggtcaccggaggcatcatctttgccgcctctgcatcggataagaccaccactttgctggtaagcctgtccgtagtgggtcgctttggagtgacagtggcctacaattcaggggcgcaatatgccaccgagctgatccccacctgcgttcgcggacaaggagttgcagcagtccacgtggccggctatgccttcaccttcttcagtgcgtacatcctgttcacgaggagcgtattctcgccgctaccggagattatcttgggcgtgctttccttgctgggtgcgtgtctctgcctcctgctgccggaaacccttcaccggacattgcccacttctttggaagatggtgaaaatttcggaaagaacgatcggtggtacacctttagttttctggagggacgaactcaatcagccgccacactggacacccaaaacgcgaaaatgtactcgcagtcaacggaatcggccgtctacttttga

SEQ ID NO: 16386 - protein, 540 aa, DROSOPHILA
MLEVDKILEKCGDFSRLQMIMLLLFCVINVLSALHYYSQTIISFVPKYWCADGLPASIESPVDSSCLPLNRNISTPNTCYSYNYELYMGYQSFPSEMDWVCADAWKLTLGQSMFFVGSVVGSMVLGYLADVVGRLPILIVANLIAMTGNLLTIWSTNVTLFCMFRMISGIATDSNFVMMYILVMEYMRPSVRTLGLSICIGFFYCLGSMAAPWIAVLMRSWRGFLLTTSLPLLVVPFFYLIVPESIQWLISKQKYDSAVVCLKRVAKINGRHVEESAYAEFIEECKCSQQNQKASPHLLDLFQTPRLRRHTLILFFKSMVITLCYDAVSRNVQGLGISPFVMFSLSATAILPACLLIIALQDRIGRKAMASASLLLSGIFISVTGGIIFAASASDKTTTLLVSLSVVGRFGVTVAYNSGAQYATELIPTCVRGQGVAAVHVAGYAFTFFSAYILFTRSVFSPLPEIILGVLSLLGACLCLLLPETLHRTLPTSLEDGENFGKNDRWYTFSFLEGRTQSAATLDTQNAKMYSQSTESAVYF

SEQ ID NO: 16387 - DNA, 3638 bp, DROSOPHILA
agatgcccatcgagacgtttggaccgttttcacagttggcttcattcactgccctccaatgctcctgctcctgctcctgctccaggccaattggaaaacaaatctcctggcctgcacggcaataaatttgtttgctttaaataatgtactaagaaagtttcgtgctcaagcacaccgtgtaattttttcaagtgtgggaagtggctcatttcatccgattccattctttatgtgtgatttgtttggatgcgtctggtgcagacacgagcattaacatccacattgcaacagcattttcccacttaattgcaacgagcggcgcagaaatagcacacaaacacggaatcggaatcgggatcgggatcggggtagggattgggatctggatctacgaagaggggaatggagatgctaggcgctcttggtatcagttggattcatctgtccaactgcaatccatctgcccgatgatctctttattttgtacccatgatggcatttgtaaagattgtctttcaattgatcaattaatagaagacgatcttgtgcagcattctttagaaagtctacccagaatattcgattcaatcacatcgattttcttttattatcacctatctaacgtaaagtccatgaggtccttggttaaaatgtagttaataggatgtatcggtgtattgcccagtgtgtacagtatagcattcctaattcctactatatctataactatatctatatctatatctatatctatatctatatctatatctatatctatatctatatctatatctatatctatatctatatatgtatatgtatatgtatatgtatctgtatatgtgtatatgtatatgtatatgtatatctatatatgtatatctatatctataactatagctacatatgtatatctatatctataactatagctacatatgtatatctatatctatatctattaagtcccatggcgttatgtcgatatttcgttgtcctcctacgcctttcccgcgaaaagggcgtcggtcttgagttgtggttttcccttcttcttcagtcccacaagcagctgcttcagctgaatgatggctctagccggattgaggtgcttggggcacgtgttggtgcagttcatgatcgagtggcagcggtatagcttccaggggtccttgagaaagtccagtcgctgctcggtggcctcgtccctgcaaagcaaatcttagcacactggggaaactggcagcaacatggcctcactcacctggaatcaatgacccagcgataggcctgcatgaggacggcgggacccagatacttattgctgttccaccagtatgatggacaggaggtctggcagcaggcgcacaggatgcactcgtacagcccgtccagcaccagacgatcgtccacggactgcagatactgtgccgttccagcttcccgcttcagatccttgcgctgcagccacggctggatggagcggtactgatcgtagaactggctcatgtccggcaccaaatcccgcaccacatacaggtgcggcagtggatagatgcggcagcacttgctctcattctggtcgatggacgacacgcaggccaaggtgtttgttccattgatgttcatcgcgcaggagccgcagatgccctcgcgacaggagcgcctaaaggtcagcgtggggtccatctcgttcttgatcttgatcagggcatccagcaccatggcgccgcactgctccaggtccacctcgtaggtctgcgtctgcggctgatccccgggcttccagcggtagatctcgaaggtcttcaatcgcggcttcttcgctttcactgggggtgcagatttagcaggcggaggaggtggtggaggtggaggcgttgctggtgcgttgcccgaagctggctttccggtggacgctcctccgggcttggcggatccggcggcggcggcagctgctcctccaggcttggcggctccggcgggggctgctcctccgggcttggcggctccggcgggggctgctcctcccggcttggcggctccggcgggggctgctcctccggagtactgtcgttttgtggcgattcctccggcggctgatcctccggtggctgatcctctgagccctcttcctcctttaatgaatatagaaatttcagttaagcatatcaataagtgcaggtgtcatttatgaaatgtcattatgacaaagtcattgacaacccagaaaattgtggaatcagaaaacttttcacttagaactaacctgctccttgtccacctccttggaggctggagtgggtgcaccggggtaccagggatacggcggatactggggtggcggcagccagcgctggtccgggtatcgatagggtggacataggcgccgcaggacgggaaacgggttcggacacatccctgttggccaacacgtaatttctaaacagccacgtgctccgtttattcagcagccgaggctgccggcgcaacaaattcatcggttttcgagcgaatgaatgagactttaagttaaaatgtgtacttataaaaatatatgtgttttttttttttttttgttgagagagaatgtgtgccgaggcgatgaggtgttgaggtgttgaggtgttgaagtgtcgaactgtgtagcaaaactgaggagaagccggtgaagtgcccgtaatacgacttgacactagaggcatagccagctggatttgaaaatcttttcgaaatgaaaagttcagtttaactgagtagtagaacaggctgctttatacaatgttttggatgcgtggaatttaaatcaactaaagagagttcctcgactataagatacccgttactcagctagtggatgtgagaacgcgaaattttatcattttctgggcaaatcgatagaaatttacaagattaataaaaatgcgaaaaaagatcaacaaacttgcgctacgtctttgtctctagaatctgtatgctggatctcaaccttctaggtacggacatggcggacagacggacatgactagatcgactcctgatcaagaatatatatactgtacatggtcggaaacgccttcttctgactgctacatacttttcaacaaatttagggtacccttttactcttcgagtaacgggtataaaaatggataacaagtcagatttgaatccccgttgctgaaccggtaaattgatatagaaattgtaattcaatccaaaaccgaactcattttaagcagaaattgttacaaaaatacaatatattaatataaatacaagtattaattaatattattaattttaataatatttttaatgttaaattaatatttatttatagttaaaggcacttaattatttaattatattttattataataatgtgatacaataataaacaatattttcaaacttataccgatcgatatgtaccgccgtgctgactgtaatcgatggtcgcgatgccctgccaatcgactatcgataacaacaaacacgaagatatagaggaaaatagagaagaagaagagttaaagaaaacgccaacaaaatagacaacaaggcaagtccgcgcctccgaacaaggacattataccacaagacacgctgcaactagttataagccgcatagccgt

SEQ ID NO: 16388 - DNA, 1451 bp, DROSOPHILA
gacacttcaacacctcaacacctcaacacctcatcgcctcggcacacattctctctcaacaaaaaaaaaaaaaaaacacatatatttttataagtacacattttaacttaaagtctcattcattcgctcgaaaaccgatgaatttgttgcgccggcagcctcggctgctgaataaacggagcacgtggctgtttagaaattacgtgttggccaacagggatgtgtccgaacccgtttcccgtcctgcggcgcctatgtccaccctatcgatacccggaccagcgctggctgccgccaccccagtatccgccgtatccctggtaccccggtgcacccactccagcctccaaggaggtggacaaggagcaggaggaagagggctcagaggatcagccaccggaggatcagccgccggaggaatcgccacaaaacgacagtactccggaggagcagcccccgccggagccgccaagccgggaggagcagcccccgccggagccgccaagcccggaggagcagcccccgccggagccgccaagcctggaggagcagctgccgccgccgccggatccgccaagcccggaggagcgtccaccggaaagccagcttcgggcaacgcaccagcaacgcctccacctccaccacctcctccgcctgctaaatctgcacccccagtgaaagcgaagaagccgcgattgaagaccttcgagatctaccgctggaagcccggggatcagccgcagacgcagacctacgaggtggacctggagcagtgcggcgccatggtgctggatgccctgatcaagatcaagaacgagatggaccccacgctgacctttaggcgctcctgtcgcgagggcatctgcggctcctgcgcgatgaacatcaatggaacaaacaccttggcctgcgtgtcgtccatcgaccagaatgagagcaagtgctgccgcatctatccactgccgcacctgtatgtggtgcgggatttggtgccggacatgagccagttctacgatcagtaccgctccatccagccgtggctgcagcgcaaggatctgaagcgggaagctggaacggcacagtatctgcagtccgtggacgatcgtctggtgctggacgggctgtacgagtgcatcctgtgcgcctgctgccagacctcctgtccatcatactggtggaacagcaataagtatctgggtcccgccgtcctcatgcaggcctatcgctgggtcattgattccagggacgaggccaccgagcagcgactggactttctcaaggacccctggaagctataccgctgccactcgatcatgaactgcaccaacacgtgccccaagcacctcaatccggctagagccatcattcagctgaagcagctgcttgtgggactgaagaagaagggaaaaccacaactcaagaccgacgcccttttcgcgggaaaggcgtag

SEQ ID NO: 16389 - protein, 398 aa, DROSOPHILA
MSTLSIPGPALAAATPVSAVSLVPRCTHSSLQGGGQGAGGRGLRGSATGGSAAGGIATKRQYSGGAAPAGAAKPGGAAPAGAAKPGGAAPAGAAKPGGAAAAAAGSAKPGGASTGKPASGNAPATPPPPPPPPPAKSAPPVKAKKPRLKTFEIYRWKPGDQPQTQTYEVDLEQCGAMVLDALIKIKNEMDPTLTFRRSCREGICGSCAMNINGTNTLACVSSIDQNESKCCRIYPLPHLYVVRDLVPDMSQFYDQYRSIQPWLQRKDLKREAGTAQYLQSVDDRLVLDGLYECILCACCQTSCPSYWWNSNKYLGPAVLMQAYRWVIDSRDEATEQRLDFLKDPWKLYRCHSIMNCTNTCPKHLNPARAIIQLKQLLVGLKKKGKPQLKTDALFAGKA

SEQ ID NO: 16390 - DNA, 9894 bp, DROSOPHILA
ccggtgcggaggtaaacgaagctaaactcatctgcatctgggagggaataactgagctgatcctgtggcgcaactggataaagtcgatgcttgtattcgtaatgctacagaccataatttatgatctgctttctgaaccgcttgtgttcgtggtgagcgtatgggctttgattatcatggtcatatcaatggggtaccgttttttggtacagtacactaatacccatatccagaacaacagctatccgaaatatcttgacatagacctaagaatctcccaggagttatctaagcaactgggtgttctagtttcaaccaaagttgttgcgtttctaaataatctacgagagatattactagtaaagagcttttcgaaatcattcaagtggtttggccttctcctaataattagcaaacttggaaagcagattaactttctaattgttggccaattaggtaagtctatcattaataaataatgaaagaaaataacaaaattcattcaaatatcagggctgtttctactcttcacaattcccaaaatgtgtgagatgaatagacgttcatcaaatattgtacaacttcctaaatttaataaacaatatcaaattaccaaagtaaacgcttcgaccgaaacccagaatgcattggacatggaatccttaaaagagtgcaacgaggacaccataaagctaattgaaaagcaaccagaagggatggatctctcactcggctgtgatattaccaaggaatcccagaatgcggctgatgatcttaaagcctttaaagtaaaggaggaaatagacattgatgcttttgagcgacttgccgattcctggtccgacgaagatacacttactgatcaaaaaaattaattcaagacaattcaaataatttatttttatatattgtgaagcgtttggataaataaaactcctaggggcactgtgcggaacaacagctacacgacttgcttattctaatagggagatactttaacctaattcgaactactgctttcgtcgccatcgttcacaaattcaaaggcccttctggaccggaaagcgtgatagggtccttgcttcggctgtcctgcttgaaattcactcctaatccttgagaccactgcaccactctgcggtgaatagtttgccttgaagatctttaggaatgacggaatgggaggcacaatgccatccgtatgaaactgaacaatcccctggatgtgttgaggtcgcaagaggctgcatagctgccgaagatgcatcctggtcggagtcggtgtccactttagttcctttagatccaaggaaactaccttttgatagtgattaaagtccgtcgggcaaccgctgacgaaaacccttggtacataattttcctccagaaaacgctccagatcgatgctaaggcactcatagctttttgcaatgtggtcgcccaaatgaatatgcccgcgaagacttgtgtgtgccaatctccataacatttcctcgtagccaaattttggcactttcaggtgcaccatactctggtcatttcttgctccgagatcctcgatgaaatgtgccatctcatcaaaatcaatatgatcaaacggcaaatttacagaggacagattcagatacagctgctcggttccctgggcgatccaagagttgaagacagagttgcccagtagacgaccaagattatccagcctcatagccgagtagcagtacagcaatctgttaccctgctgccgccggataagcagaatgaggctgtgtcccagatgacttccagagcatagcatcccttccaaccgttttccgtctttcagaagcagtgcgaagggctggccctcctccaccacaaggaagtcctgttccgaaacgttcgctttgcgggattgcagatactgaaacagctgggtggccagtggccgagtggtgtacatccgacagaatcggcgtggcaatagtttcagctgctcatccacatcgcacaagctggttagaaacaccttggaatgggcatcgtagagcttgggaatcacgtcgaagtgcagatcagggtgatccttgggtcgcattttgctgaaggcaattcaaaaatacactgcaagtaaagtattttactaaattagaaacaatacttaatgaaactgataaaaaaattaattaatatttttccatttttctatattcaattaatacttatctgcaaaaataggttaggtgtaatacttgtttttataaatataagtaaatatctactaatgaaatatattcgggttgtaaacttgttgtttttcgcgttgtaacttccttgtaataaatttttaggaactttgcgagatccacactacttatattacccagacatgacgaagtgaattgaggttgagggaaaatgacaactgcactatgaataatttttgttacccattttgagagacgacgctgcacttttatgggccaacaaattttccgccttaactcgctcagaccgaaagtgtcataaaacctttctcggatggaaagagaccattttatcgattgccgtattcaaatcctatgcagaatgacattaaaaattatattgaaagtgccgaaaccacaccgaccataaaagttttctcagctcccctgtaaaaactccgttcgaggtaattagtttttggcccatgtctgtgttgaacccataaaagttagctgccatcgaccgcttaacagaaaatgccattagaattttatctaaaatagcgcaggatttctttatttatacaccaaaaacgtcgtaaagaagagttttgacaaatagctttttacagtcatatcatatcgtataatgaaacggaagacttttacgtgtcaaatacagtggcacctatttaacttaattgtaacatatttttatgaattagctaagcaattctggttatacggtttgccgaaaatggtttaaaattatacacatgcaaggccgacggaattttcaattccgagcagaaattccatttcaaaagtgttgcttcaaaatttcgaaaagcctcaggcaatcaaagtaatgatggccaataaataatttgccacacacaatggaccaaaaagactcaaagtacttagttgcaagactagaaacaggacctgtcacatcctgccacaaagaatttacatatgaatacttgggtatctgaaggatttaatcacacataatcccaccccttctggcatggaatgtgaaaaattgtggaggacacatgtgattacagggtttgtggggttggccaatgactaatgatgctttcatttatctttagacagttttgccgtgaaagtgttaatgcgtagagtctccacataaccttctctgcatgccatgtgggcacataattactcggatagctggaaaagcttttgtcatcactttgaaattatttaaatttggctccgaaatgactaactgactaatcgcaatctcgcagacatcgttggaagaaaagccccagctaaatgaaaaattatagcaatttaaatgtttgcttttaggttttttggtcgcaaatagggtatgtggtcttcaaaagattccagctgttaattataagggatttgcatatgtacaattctaggacttaaactaccaagtcatgtaatctcaatatgcaggtggagcactcttcgccatttgggagagcaagaaatgtatttatttaaattataaaaacatgtattgcacataagctacttttaaaaattcgattatacagattctcatttgtttaagttcaaacaaaatattttctgtgtcaataaaagcctaatccagcagatcctttaatgtgtctaattgatactgccaactgccgagtaaaacaaaaaaagtaatagttgagcgagcaacacgaattgtgaacggaaaggtccaacagagatttgccaaatagaagatttatggtgtgccaaggaaaacatttgtgtttatacttcagtgttggttttccactccccatgaaataagggatatgtggagtttgcggcggaggatgtgccaaagttcattaattatgattggagacagttgtacaattaataaacgaagcgaagcgactatttccccggattgcggtgaacttccttggattggaactttttggaaaaggcggggaaaattcgggcggaagcgagagcttcgtttttgggtttttctctctgtttgcttgggctgagattatgatcggactttgatttatggttgcctgtgcaaatttattgcttttaattgtttgccccacaggaatcggacttaaatcgtaatttcgcaaacatgagccttacgctgagtatttggcagctaattgataaaagtttcttgagttattcagataggaaatggtgcgggactacaataaaaggagatgtgtagagggtgtcaagggttcgaagattaaagaaccgtaaagttttgtttaagttagggtttctaaggctctagttattatacacaagattcgttcaaaaatcaataccgcactcacttcctcgaacttcctgtgttatttttgagcacccccatagaatcttaatttgcacatcgttttttctgtgcatttcggtttcgaatgcaacttctcgtctgcagacgtccgtggttgggtggattggcctcccagggcctcaaggcattaattgcattctgcagcatcgcattgcactttcaattagttgcaaatgccttgcccgaaagtcgcagactccgtatcaaaaccccttcccctgcacagggtaacaggaaacggaagttaagtgctgaggcgaggcgttaagtaaatgcaaccccagatgaaagcaaaggaagcttctttctacttctaccatgacactggagaaacacacattaattgataggtgacgaagggggctgggatttcgttcttgggggttgactctgctgtaacttttggccactgaccagctccagaaagttgaccccttcgagttgctgaaattctgcagtcacttgctcgaagccatttccttgactaaatcggggaatggggagatgcggcggcaagttacctgtctctaatgcatttcaaaattgatttatgagtttctttcgactggttggcagccttagacagatttctgtttgctattgggccttcgtgtttgttttccatgttaattaagctttacattttagccatggggactcgaaagtggtaaaaagtggggggaaatggtaattgaccgacagttgaaacgatttgtgtaattcaaaggataatgcattgcattataggtataaaaattgtgcttaacactttttaaaataaaactattatcaagcaattatatagaatttacaaaggtatgtgcttgtaatactttgctccgataaataaattcctccaaaggtttcccttttcaaagtctagcttataaaggctttagttgactgctttcgaacaatagcaataaattgctttttaaacacttgaaagaaggacatgtgtgttcgaagtaacattggcgtcaaatgcactttggccaccacgctccaccacgatattcctcctcgattttggtcctatatgctccccgatgcgcttcgcttggcttcagttggagccgagttggcttacacttggcagctgacaactttctaagaataactgcaagcgatttgcatatttagcttcaaggaggtggagaactttatcgctcttagtgcagccagccgaggcacatgcatcacacactcacactcgtaaatcttggccagaaactttggcagacaacaaatttatttataaagagcaatactcgagttgggtttcttccctttaacaaaaatttggttgtaaatggagtgggacggaggttaatgaatcaataatatagaagtgcaaatgaaggaaaaaataagttatattcaaaaatcttttacaaacaactgtacacttcttaactgaataaagtaagacatccatttttttagctattagtatttgtaagttaatattgatcactttcactgttgatattaaaaaatcggaggaacttgtacgtacaaccgacttccatagaaaatactgacaagacaaactaagcactttataaaacaacaaaaaggtccttctttagggcgtctctaatataccctcacgatcgaacataagcagagtggcctttatggtttgacgcactcgttcgctggcgaataattggtgtcgcttttttaacatagcatccgtatctacgaaggtgtgaaccccgaaatcaacacttgcctcaggggaagcacaacatatgggaagttcacagactacagtgtaatatccataaaacaaacaccgtttcatctcatcctttaactggccaaaagtgggcagtgtgtctttatagccgcaatgccgcagggtttccagaagattgtcgaaatagtaattcagaagctcatcttgattatttagcaataattcaggcttgaggctggtgtaaaatagaaagtagagatctatggccgggctaccccagtaacagttttggaaatccacctaaaaatgataacaacaatgttagaaacattttgtaagcctatttccgattatttgtactcacaagtgttgccttcttattaacgaaatcaaacataatgttatttaaccagggatcaccatgaataactgcattcaatgatgacttgtttggatcaacgacatctcgcattcttttcgtatatgctttcggtatttgagccttcattttctttgatatttccggaagttcttcggcaaacgcttctgcggcatattcggcgccctccaagacgagagcctgggcgaagcgatcgttcaatccattggcatagtgagaaggcgaaagcctttgaatcaattcgggtttcttctcgtacaaaaccttggatgcaccgtggaactgagccagtttccttacgcaaattttggcttcttccagatttaagccttgacgacgatcaaaggattcgtatcctagggcgcccagatcctccagaatgtagagctcttttccagcagatatctcgactagcaagcaacttaaataaaaagagtacatgtcaatcggattttccagagtttttgggaaagctgacaaactaactctgcgctcagcttgtgttcgccaatctcctttggagcttcttcaagaatggcttgcatggcaggcaggagtacctcgaacatatccttttcgttggtgcccagtgcagcggcggcgggcagcagatccttgagaatatattttcctgattcgagagcgccatcgggtgacctgcgaaagaccaacgccacccggtagatgacgctgcaaaagttctcgcccttctggctcaccgccttgatgtgaaagttctcaacgcgaagcatttcacaaccataagctctcgccaaagctctctcgaagtattccgcactgtaaatttcccgctccatagttatacgacttttcagatgagacctcgccaaccgactgagcccatgtatggtgcactagttacgaaattatctctgaattacaaaaagtatatctggaagctttgcggttatcactgcacgcatgatcagcacagaaaacaatttacttttcacttcagattcttcacatcttgtacatttcaacattggtgaaatggtttcattcacttatttaatagtcacatgtaatacataatttacgctgtaaatacgcttaggtttttcgatttaaaacgcaatttaacccctttgtgaagaaaacagataacgttttggatgttgtaaaatagtcttagaatttttaaattcgcaattttacaagaaaaaaattctaaaaatataattttataaaaataaaattaatctgatgaagaaacttttctacgtgtagatctagagaatatccgttttgcggaattaaataataaagtgttctggtaagcacaccccaaacaaagcggaattgtcggcggcttaactgaaccacttgataaaattataatttataaaaattagttaagtggagccattgagtggccatcggttaagtttgtcgaaattaaactttgcacacggggacattgttaagataattggaaaatcttcatagatatgctaagagcaacgtgatgatattcttgagttgaagatgataaagataagattgcctcacggaaaaattttgaggattacatttcaggctcagcaattttcggctcttctacaaatgaattccttaaaatatgcctcactatattaagcagtctttagatgatatagtaaagataatgaaaagaaaataacgataaggaaataaatatcatttaagataaataaacggctaaataaataaataagagtttagtttaataatcgtttaactggtaaaaagagatgtatttaatattctgtatatgcgagtacaggtataatcatatgaaggaatgatttctgattacattggggaaggatcataatacatacgtatatcatacatcatacatcttacatacatacatatatatatttatatacatatatacatatatacatatatatatatgtatacagaaatgcatgttaaaaatatatgcatgtgaaacgaaaaaaacaaaagttcttagatgttttgttctatgatcatattacaatgatactttcttattattgtgagaaggaagtatttgtttatttgaacccacctttgcgaatgtttattaaatcaacaaatataagcatttgcattgaatcacgcttattgcagtaagcaccataagtgcacgttgaacttttaatcagaatacattattttatacacaataagcacgggtttaaaatgtaaatgctgaaaaacatctaaatatttacaaaattaagaaaagcatcgcgcttacaaactagttccatgcaaactgaactggttaaattgagccatatcagctgttttatcaagttccttcgaaacgataagctgaaccaccaacaaatattttgtattatcgattcgtaaattgatatcgaaatgaaaaatcgattatttagcggtttctttaaacgctgcattacatatttgtattttggaatgcgttttttaagctctaaatttgtgcagcgagccttttcaattcttaacatagcatttgaaacttcacaataaattaacgccacacctatatgtatatattactaaaacgtttaagctaactataactactcaaaagtgttctcctcccgtttaagggcactaaagaagtcggtgttgagtaatttgctgggatcaactgtcacagccgacttcacagccctttggtcatccgcattcttgacaatgcgtttccattcggagaggtcgttgactggattattgggcttggcctccagatgaaggggtttcagcatgaaatgggctttaaccagttggtttaacaaacgcactaaatgacaggaaaatatttaaaaagttagcaacggaaaatatggaatgttgttaggtcatttacaatgtattgactgaaaaccaagcaggttcgcatgctcgctccaccagttgcatatgaggctaaggtaatgcttggtcgtctcctcggagtcgcgaaacagacaggtgaggtaatactcgtgaaagacaagggacagaaggtgcactgcgatgcgggagatctcgccaacttcttcggtgcctaaatagaaagcacaaatattgattcgtgtcattgatcatatgaaaatgatttttttttagctcaaacgcacctgctttcctgctgtgcaacatccattggtgcatcacctggaagacaattgttaccgcactgaggcacaactttacatagcactcgcagccttttcctcgctgcgttgtacttgaatttgaattttgattcggg

SEQ ID NO: 16391 - DNA, 1304 bp, DROSOPHILA
cgatgcttttcttaattttgtaaatatttagatgtttttcagcatttacattttaaacccgtgcttattgtgtataaaataatgtattctgattaaaagttcaacgtgcacttatggtgcttactgcaataagcgtgattcaatgcaaatgcttatatttgttgatttaataaacattcgcaaagtaaaatactttacttgcagtgtatttttgaattgccttcagcaaaatgcgacccaaggatcaccctgatctgcacttcgacgtgattcccaagctctacgatgcccattccaaggtgtttctaaccagcttgtgcgatgtggatgagcagctgaaactattgccacgccgattctgtcggatgtacaccactcggccactggccacccagctgtttcagtatctgcaatcccgcaaagcgaacgtttcggaacaggacttccttgtggtggaggagggccagcccttcgcactgcttctgaaagacggaaaacggttggaagggatgctatgctctggaagtcatctgggacacagcctcattctgcttatccggcggcagcagggtaacagattgctgtactgctactcggctatgaggctggataatcttggtcgtctactgggcaactctgtcttcaactcttggatcgcccagggaaccgagcagctgtatctgaatctgtcctctgtaaatttgccgtttgatcatattgattttgatgagatggcacatttcatcgaggatctcggagcaagaaatgaccagagtatggtgcacctgaaagtgccaaaatttggctacgaggaaatgttatggagattggcacacacaagtcttcgcgggcatattcatttgggcgaccacattgcaaaaagctatgagtgccttagcatcgatctggagcgttttctggaggaaaattatgtaccaagggttttcgtcagcggttgcccgacggactttaatcactatcaaaaggtagtttccttggatctaaaggaactaaagtggacaccgactccgaccaggatgcatcttcggcagctatgcagcctcttgcgacctcaacacatccaggggattgttcagtttcatacggatggcattgtgcctcccattccgtcattcctaaagatcttcaaggcaaactattcaccgcagagtggtgcagtggtctcaaggattaggagtgaatttcaagcaggacagccgaagcaaggaccctatcacgctttccggtccagaagggcctttgaatttgtgaacgatggcgacgaaagcagtagttcgaattag

SEQ ID NO: 16392 - protein, 357 aa, DROSOPHILA
MRPKDHPDLHFDVIPKLYDAHSKVFLTSLCDVDEQLKLLPRRFCRMYTTRPLATQLFQYLQSRKANVSEQDFLVVEEGQPFALLLKDGKRLEGMLCSGSHLGHSLILLIRRQQGNRLLYCYSAMRLDNLGRLLGNSVFNSWIAQGTEQLYLNLSSVNLPFDHIDFDEMAHFIEDLGARNDQSMVHLKVPKFGYEEMLWRLAHTSLRGHIHLGDHIAKSYECLSIDLERFLEENYVPRVFVSGCPTDFNHYQKVVSLDLKELKWTPTPTRMHLRQLCSLLRPQHIQGIVQFHTDGIVPPIPSFLKIFKANYSPQSGAVVSRIRSEFQAGQPKQGPYHAFRSRRAFEFVNDGDESSSSN

SEQ ID NO: 16393 - DNA, 3079 bp, DROSOPHILA
tgctaatttggtacacctaacctccagtcggcaagttcctcgcgtgctatgtgactttaactttccgtcaacactgtactctatcccttatagttttagacttattttgatttctgctgtgatttgatacggaacttagttaagttgatctgtttaagacgatgatgtaccacaaaagacccgaagatgatatttatttacatgcaatacaatatgtctaatatacatatacatgaatatatatttatatttataaatatacattatttatattattgtagtttttaacaaacgttttatttactactctcgctgtatttaaacatgcagactacgtgtaaaatactactgaaaaaaaaagaaaaccagaaaaaaaccaaactcaaaaaaatgaaaacaaaacattgcgcccaaaagacgaacaaacaacaaatagaaattacaaaacataccaagtgaatcaaaatatgcaattaattacattagttcaaagaagcaacacaacaacaaaggatgaatatttgaaaatatttacgagtttagcgaaaacgtgcaaaagttgccatcagctttagattgaaattgcaattgaaatttacaaaaatcctcgacttttgcataccctgaccagtgaaacctaacttcgattgtaccatatgactaatctgtaattaacttactgctactgaaagtattttaaggtgacataatgagcacgctaccaatgaggtcaatatttaacataatgtttagcaaattgttgtcaaattgcaaaatgcaattgcgaaccataaacaatcgacttctggccgtcaaaagatactctatatatctagcttacgttatagagccgctctcctcattaaactaaagccctcactaaaacttaatgtaaatgctttgtttttaactccagtgtgagagtttcatccagaacattaagcaaactgctattgatggaaactgcagtcttaaaccaagaagaacacaactctacaagtacatgataaaataaataaatggtaaaatgaatttaattgtgtttttatggtatggtatggtctgaaaatcataaacacgctgtgatctaatcagacttaaatcaaactttatggtcatgacttcatcttaaatcgaattcttaaccctaatgtaagtggcatctatacaaaggagtaggcgtcaggatcattcttcgcatgcgccttcgccatcttcgtcatcgtactcctcgtcctcctcgtcgtcctgctcatcgtcctttccctgctgatcccaccaggagagcacgcctaggccggattcgttaatggcaccctgaaggatagaagcactcgttaaatacagatttttatcaggggcggcaaaaaactaacaataatcctgtacggtgtcttcacttcttgggaggtagctgatgcgactgcagcggatgtgctagctccctgctgagtctgagcctcagttttcggtggtccaatgggcgatgtttcctcgaagatctcccgtgatacgcggaacttaatgggctcgccaacgtccatgaagagatcgtgtttggcgccatcctcgagcggatattcccaaacccaggcctgttcggcctcatcgaagcgcgaaggatgctgcagggcggcatgcggaatgaggatgtcgtcgaagaaaccaagtgtcacatggactccttcgcggctgcagtttcgaatctttccggtaatcacggtgcccaccatcggccggaagaccacgtaccggaacagaacctccgtgtgcgaggctccgtctcccggcaggatgatggaatccttcagtgaaacaatatccttcagcgcaatgcataatcccacgttaagaaggacctgtcacgtagaaaatcgagaatcaggacgtgcacatggaagtcacaacttacacaccttattggccagctttcggtcgatctcgtcgcgcacggcgtccaccaacttcagatggaactggtccggcgcaatcctcacattgtccttcagctccgccagcacgaacatgtcgccaaattgtttaaatatcttcttttaaactaatgctcgttcattgttttgaatgtgagctacagtaccatgtgtagccatagtgtgaccacatgctcatgcagtatataccaaaaataccaattatatgaatttatattgctaagttagggtactcccgaactaaccattcggtcagctgttaagctagctgattgccaaagccaacaattgaatttctttaaattttatttcagttgcaacaaattaagatacaaataatagttttcgcacgatattaagcccgtttggcaagacaaaatcgctttaatatttatccgcacatttgcttactgcatatagccatcttaggaaaataccaaaacaatgtcgacgcttctttgtgaatggcattcgcaacacgtgcgattggttgtacaaatttgtgaaattttgagctttaataggtttgtgtaaatctagcaccgatttaaaagcctttgccttataaatacaacgaggaatttaatacttattagtagttactgcgcatctcgcgatgaacaacgacagccacaaatatagcgacgccgaggaggacgaagaagacctgcgaagtgtaagcaaagtgcttatgaatttacaatgaaatctttcttacactttccaattttttagtccgagtggacaaacgacttcaagaacctcacattgaagcacgagatctttaaggatattaaactgacacccaaagaggactgtgatgacctggcacaagttatagcaaccgccaacgaagaggatgaaccggaggacgaagagccagaggaatacgatgaagacgattacgacgatatcggagatgactatgatacgtatgaggaggcctatacgggctttaacaagcttcacgttcagccgcagctaacaaatgccagtggaggtggctccggcggtggcgctggaggtgcatctggtggctcacaacgcgtcagcagctaccaaccaaacgaaaagctgttgcgccgctactccgcccgcattaatgtagaaaagtacgatcccaccac

SEQ ID NO: 16394 - DNA, 963 bp, DROSOPHILA
aaacaatgaacgagcattagtttaaaagaagatatttaaacaatttggcgacatgttcgtgctggcggagctgaaggacaatgtgaggattgcgccggaccagttccatctgaagttggtggacgccgtgcgcgacgagatcgaccgaaagctggccaataaggtccttcttaacgtgggattatgcattgcgctgaaggatattgtttcactgaaggattccatcatcctgccgggagacggagcctcgcacacggaggttctgttccggtacgtggtcttccggccgatggtgggcaccgtgattaccggaaagattcgaaactgcagccgcgaaggagtccatgtgacacttggtttcttcgacgacatcctcattccgcatgccgccctgcagcatccttcgcgcttcgatgaggccgaacaggcctgggtttgggaatatccgctcgaggatggcgccaaacacgatctcttcatggacgttggcgagcccattaagttccgcgtatcacgggagatcttcgaggaaacatcgcccattggaccaccgaaaactgaggctcagactcagcagggagctagcacatccgctgcagtcgcatcagctacctcccaagaagtgaagacaccgtacaggattattggtgccattaacgaatccggcctaggcgtgctctcctggtgggatcagcagggaaaggacgatgagcaggacgacgaggaggacgaggagtacgatgacgaagatggcgaaggcgcatgcgaagaatgatcctgacgcctactcctttgtatagatgccacttacattagggttaagaattcgatttaagatgaagtcatgaccataaagtttgatttaagtctgattagatcacagcgtgtttatgattttcagaccataccataccataaaaacacaattaaattcattttaccatttatttattttatcatgta

SEQ ID NO: 16395 - protein, 240 aa, DROSOPHILA
MFVLAELKDNVRIAPDQFHLKLVDAVRDEIDRKLANKVLLNVGLCIALKDIVSLKDSIILPGDGASHTEVLFRYVVFRPMVGTVITGKIRNCSREGVHVTLGFFDDILIPHAALQHPSRFDEAEQAWVWEYPLEDGAKHDLFMDVGEPIKFRVSREIFEETSPIGPPKTEAQTQQGASTSAAVASATSQEVKTPYRIIGAINESGLGVLSWWDQQGKDDEQDDEEDEEYDDEDGEGACEE

SEQ ID NO: 16396 - DNA, 3659 bp, DROSOPHILA
attaagggggtttccgaatcataaggattatgtggttcgtttctcctatcctcatgggcgagatttaaatcaatatcggattcctctgcttttttgtcaaatggatagttttctgaatcatatgattcctccgattccaagtcactggaatccccttctggctctatatcggatacagtgctttctagatcctcatcaagcccagattcccgcctcagcgttgcttcattgtgaactcgttgaatgcgcttctttaacttaatcgatgtgttcaagtcatttaaacaagatgggcaaatatgacgcggctggcgttcattctgttctaactgtaaatggagtaaatgggttatgccattcacgcacacaagaaaccatcaacatacccatattccagtgagatccttgatcttggccagaacttccaggcaaaaaattatcgtgggattcaggtgacagaaacacgaggcgcacaaatggcattgcgaaggctttttcatttcaaacatatgatcatttatcccgctgaattcccaaaacaatcagctgtagtttaattgattttatgttgtcaattatggaataaaaacggtaaaagagcgtacgcaatccgagaatttctgtttactctctctaagcagcaaaatttgtatgaattacctgtttcatggcgttaccagataggtgtggaaaaactaactgttcttatttcctagaaaccagggaacatcgagctagtttttataatttaaaatttatatattataaacgggaggttaaattttcccaaaaagagaggttcaagctaaaacacacgttcggctaattcctgacgtttttgaaattggttccatataatttttattaaaataagcgcgctgtgcaattagaataaaatatattttataacaaattgtaatctaagaccgacgttgaattccttccacactggtgctaatcgtacggctggctggtgattcaaaggatttctctgaaccaccgaaaaagtcagatagtttgcatccctggcattgtggcgtgtggagtgtggagtgtgtggcgccaacagtcgattttttttgtgtgcttaaagttaggtgtacagctcctctccatcgggaatggcttcctcgtactcgaagtcctcaaaatttgcgtcctcatcctgaagtacctcgtggtcctcatattgttcctcgtcaatgttatctaacattacgtccagttcagcctggttgtcctccatttctgcctgcccctcttccatatatcccggaaactccgccggatcgacttcagactggaattcctcttttggaccattaaccagcaagttgacccgcttgcggtgatactttgtggagtagtgccgatgcaaaaactgcgcctccttgaactccttgttgcatgtgaggcagctgtgaaagaatatgagtttgtacatctatggctacgtatatttcaatgattcttacatatggacatccggttggtcactcttgtgcccctcctcgtgcttcagccgtcccttctcgctgttgaatcgtttgccgcatattttgcacgggtgcaccagctcgttggcatgcatttgactgtcaaggtttttatggtttatatagataaggacttgtgatgattaggccagcactcaccgttcatgacgacagcggctgggactattggcgaatcccataccgcagaacttgcagacgtacggtttctcgcccttgtgatggactcgaatgtgcaatcggagcagtggcatggtgtagaacttgcgaccgcactcgtcgcatgaaaacttctcctcgaagtgccgcagcttgtgatccttcatgttgctgtgatcgttgaacgaccaaccgcactggtcgcacacgtatcgctttatcgagcgatcgaccttgggttttggtcgccgctttctgggctttcggacgtgctcccgcggaggtggcggtggactatctgccttctcgaccacaggcacacgaagccgcttgaccctgactcgtggggactgtctgttcgggaaattttggtcctcgatccggatttttttggccggaggatatcttaaaatcggcttttcgtcctccaagaaatccttatcatcatccattaaatccttatcatcgtccagtagctccttatcgtcctcggtgtctactgtatcatccagcacctcccgtttcagcagcggatcactaagcactggcgaaacctccggggagccttttgaggcgacacccgccttcgaggagatcctctggtggagatttgcgtgcgtctccaggcatcgctgcctgaaggctacggcttgggtcaggtccaggagacaacaagcgcatatgtgctggggcagcatattctctaaaacgatctggaaatgcatagattatgaataattccggacaacaaataaaagggacgccacctctaagcccgtgatttgctcgatggccatccgaatgcgatgattgcgcttctcgaagatgttctttgggtgcggcgtgaagatgcgctcgccgcagatccgacactcggtgctcattctttcgaaactaaataaaattgattaattttaattacaaattatagtaatttttgcgcagccggtttggttttgaagtgtgaccgttgtccgcaactagaggtgtcaaacattgatgtttttaaaattttccgatatatcgatgtttatttcagactatcgatattggtgttcaaataaaaaaaaatcggcactgcatcccgtgaattttcttttttaattgaaatacataatactcctaagaaaacacgctttacaagcgaataaatagttgtatatatctcctttttttagcaatttatttttatctttaggctacgattataaaaataaaataagcatcataagcaagtttgaagctcttttgtgtacagaatttgtagtaactagcctagaaaaagcgattagcaatcaaaggaagtctctcataacgtgtaattgtcaaatctttgtcaaaatgctctatagaaatgcctccagtacgggggccgcgatcaggcgccaactctcccgccatcgcagctcctggaactcctggattttgcgctgaaaaccagctcttgtctccaggatgctgggattctttggaaaattttcgaaccaaatcctcagctgctcggccagctgaacatggtcgccaaacacgaagccattctcgccgtgcttcaccagctcatccaggctaaagagccatttgtagaagttagtaagtaataatagtaaatggcaggattagttaccacttgaaatcgtaggcgcagacaggcagcccgctgccgaacatgtcgaccaccttcatgggcaggtcgagcccactggtgctccagtgcagacacacgcccaggtcggcgctggccagaacagtggggtagtcctcgatctctagccagggcgtgatcaccgacaccttctgccattgcagcttctcgatctccgccacatagtgctccttttgtggcccctttccggtgatgatacacagcagggaaggataaaccaacggctctgcttgcgcagtctcctcgtaagcttgcaaagccttaagcagtataccgaagtcctcgtccggcgtccaactggtgctggaaaccagcacggcttg

SEQ ID NO: 16397 - DNA, 1488 bp, DROSOPHILA
ctctagttgcggacaacggtcacacttcaaaaccaaaccggctgcgcaaaaattactataatttgtaattaaaattaatcaattttatttagtttcgaaagaatgagcaccgagtgtcggatctgcggcgagcgcatcttcacgccgcacccaaagaacatcttcgagaagcgcaatcatcgcattcggatggccatcgagcaaatcacgggcttagagatcgttttagagaatatgctgccccagcacatatgcgcttgttgtctcctggacctgacccaagccgtagccttcaggcagcgatgcctggagacgcacgcaaatctccaccagaggatctcctcgaaggcgggtgtcgcctcaaaaggctccccggaggtttcgccagtgcttagtgatccgctgctgaaacgggaggtgctggatgatacagtagacaccgaggacgataaggagctactggacgatgataaggatttaatggatgatgataaggatttcttggaggacgaaaagccgattttaagatatcctccggccaaaaaaatccggatcgaggaccaaaatttcccgaacagacagtccccacgagtcagggtcaagcggcttcgtgtgcctgtggtcgagaaggcagatagtccaccgccacctccgcgggagcacgtccgaaagcccagaaagcggcgaccaaaacccaaggtcgatcgctcgataaagcgatacgtgtgcgaccagtgcggttggtcgttcaacgatcacagcaacatgaaggatcacaagctgcggcacttcgaggagaagttttcatgcgacgagtgcggtcgcaagttctacaccatgccactgctccgattgcacattcgagtccatcacaagggcgagaaaccgtacgtctgcaagttctgcggtatgggattcgccaatagtcccagccgctgtcgtcatgaacgtcaaatgcatgccaacgagctggtgcacccgtgcaaaatatgcggcaaacgattcaacagcgagaagggacggctgaagcacgaggaggggcacaagagtgaccaaccggatgtccatatctgcctcacatgcaacaaggagttcaaggaggcgcagtttttgcatcggcactactccacaaagtatcaccgcaagcgggtcaacttgctggttaatggtccaaaagaggaattccagtctgaagtcgatccggcggagtttccgggatatatggaagaggggcaggcagaaatggaggacaaccaggctgaactggacgtaatgttagataacattgacgaggaacaatatgaggaccacgaggtacttcaggatgaggacgcaaattttgaggacttcgagtacgaggaagccattcccgatggagaggagctgtacacctaactttaagcacacaaaaaaaatcgactgttggcgccacacactccacactccacacgccacaatgccagggatgcaaactatctgactttttcg

SEQ ID NO: 16398 - protein, 430 aa, DROSOPHILA
MSTECRICGERIFTPHPKNIFEKRNHRIRMAIEQITGLEIVLENMLPQHICACCLLDLTQAVAFRQRCLETHANLHQRISSKAGVASKGSPEVSPVLSDPLLKREVLDDTVDTEDDKELLDDDKDLMDDDKDFLEDEKPILRYPPAKKIRIEDQNFPNRQSPRVRVKRLRVPVVEKADSPPPPPREHVRKPRKRRPKPKVDRSIKRYVCDQCGWSFNDHSNMKDHKLRHFEEKFSCDECGRKFYTMPLLRLHIRVHHKGEKPYVCKFCGMGFANSPSRCRHERQMHANELVHPCKICGKRFNSEKGRLKHEEGHKSDQPDVHICLTCNKEFKEAQFLHRHYSTKYHRKRVNLLVNGPKEEFQSEVDPAEFPGYMEEGQAEMEDNQAELDVMLDNIDEEQYEDHEVLQDEDANFEDFEYEEAIPDGEELYT

SEQ ID NO: 16399 - DNA, 4748 bp, DROSOPHILA
tagatacgtatccttatatgtacatatctttatgtgggctgggatccccagtcggacattttatctcaccgagcgggtcaagcatcagttcattttattgacataaacgtttatgtttatttgtctgcgtttaagcattactgtttattgtattgttgatcctgccgtctatgttgttgcttttcgtgcccactattgcagtaacaacaatgggcaaatatacaaaagtcgaatgtgttttacaagtgtacctcagcacataaaaaattatttgattgtcggcaatgataatgcgactttaaaattgaatttaattaatcctttttctttaacaccccaaaagcgtataattatattaattcatgcatgttttgttgacatagtctaacaggacttttaacattcatatttaaataaacctataattttcatattattggttatcactaaagtgataacgtagagttaattatatttattttgtgggaatcaaatttgtacagccttttaacttttaaagttcccactaaagtttccctgtttcccggctatttttactaagctttagtttcttgaatggagtacatgctttatgttaaaaaagcttttaaagcttatagatttacgtcaattataagataagtagactatatttattaaaactttatttaggaaaatatagtatacagtatttaattttctttaaatttgtattctgttaacactctccagagtccaagccctcatatgaaatatagacttcgagaagaattaatttgcttcaaggtgtttaatttatataaaatgcaattttatttcatttcttaagtaaaataatatcgtatttaaatttattattgtcttgttttcggtacttaaatattcgcggtttctctcaaaacaatcggtattgcctcttatcgatagtcgataattggtatgaccatacctaaggccacgacttacccagcaccgaaactcggaagatttgaagaagaagaattgccagcagggagacgcagaaactacattatatatacaaaatatatagtttctagcggaatttctgccaacaaaaggggtccagtggttacttcactagcactcccacacaccaccaacaatgcaggtgagtgggccaagcctctgggcacctgcgatgcccaggggacacacaggatgactagaccaggatgtaatcaccaccactcttctacagtccggggctctggctaggccatgtctggcgatagtcctgctggcgggcgtcgtcctggtggccgactccttctacgtgcccggcgtggcgccggtggagttcgtacaagaccaaaagatcgacgtgaaagccgtgaagatgactagcagccgcacccagctgccatatcagtactactctcttaggttctgctatcccaagaatggcacgctcatctttaagtcagagaatttgggtgaagttctgcgcggcgaccgaatcgtcaatacgccttacgaggtgcggatgaaccagcaggtcaactgccggctgttgtgcaaccagaaggacagaccgctcacttggagtaaagaggactccgcactggttgcggagcgcatccagcacgagtactttgtgcatctgctcgtggacaatctgccggtggccacgcgcatcgtcagcgttaacaatcccgcggaggtgacctacgagcacgggtatcgtctaggccaagtggacggggacaacatctacatcaataaccacctgaagtttatcctatcctaccacatgcactccaaggataagtatcgtgtggttggctttgaggtggaaaccgtttcggtcagtcacaaagagctgaaattccatggggacacctgcaacttcccagacagcgcccgaccgcagctggtcaatccgaacggagagacgcagctatatttcacgtactctgtggagtggaaggagtccaaggtgagctgggcctcacgatgggacatctaccttggcatgcgcgatgtccagatccattggttcagcatcatcaactcgctagtggtggtcttcttcctgtctggcattctcactatgattatgattcgcaccctgcgtcgagacattgcccgctacaatacggatgacaatattgaagatacattggaggagaccggttggaagcttgtgcatggagacgtattccgtccgcccaagaatactaggctgttttccgcgattatcggcagtggcattcagatcttctttatggccctcatcaccatcttctttgccatgttgggcatgctgtcgccatcgtcgcgtggcgcgctcatgacctcgggcatttttatgtacgttttcatgggcactattgcaggatactatgctgcccgtctctacaaaacaatgaagggtcgcgagtggaagcgggccgcctttctcaccgctactctgtatccaggcattgtctttgggtaagctccttgctcagatataatataatataatattttaatatctaatctgttttgtttttgccgcagcactggattcttcttgaacttttttatttgggacaagtcgtctagcggtgccgttccctttaccaccatgatctcactgctgctgctatggtttggcatctctgtgcccctggtctacctgggcttttatttgggataccgcaagcaaccctaccagcatccagtgcgaaccaatatgattccgcgacaagtgcccacacagcactggtacatgaatgcggttttaaggtgagcagacctttttaaacgagtctcactttgctaatcaaaccttccatgcgcatttttccagcactctgatggcgggcatcttgccctttggcgccgtcttcattgaactcttctttgtgttcacggccatctggcagaatcagttctactacctgtttggctttctattcttggtgttttgcatcttagtcgtaagctgtgcccagatctctatagtaatgacttatttccagctctgcggtgaggtaagctgatatagtgagcacttaaaaaaggtgatggttaatcacttatttatttcttttcatgcaggactaccgctggtggtggcgcagttttgttgtgtctggcggctcggctgtttatgtacttttttatagcatcttctactttttcacaaagctggagatcacagagttcataccgacgctgctctacctgggctatacgggtatgcttgtgcaaaacctcgcatattccaatagatttaaccatccaatttaacacccaggtcttatggtgctcacattttggctgctaactggctcgattggcttcttcgccgcctacgttttcattctaagaatctacggagctgtgaagatcgactaagctgtgtcacccactcgtcacgctgtacaccaaactatccttgcaatatcattcgatcataaatatatttatagagcaactgaacccagtctcgtccagctgcagaaatcaatataaacaaaacggaaactaagcgaaaactcgacgactcagccatgtgagctaacttccccttcttgtccccagctgcagaaagtcacccactaagtaaccatttactaagtcaaaacgctaaattcagcaagtacgttttggaaccccggaagtgactcgatttgcaggagcgtgagcgttgcgttttagaatcaatctagaaatgcctaatttatatatgtatgtaaagaatctaatctaagcaactgatataaaacaaacaaaaatcaaataaactaagcttaatgtacgacacaccgccggtgagtgtaagtttcttagcaggaatccaacttgtcgcttctgttcgtgttttatgaactcggaaacttgaagtttttagctcagttgcatttctacttcgctgcaagctagttcaacaaaccatatctaaaaatgtttcgcttgcttttggcattaatttgtgcattttctttgccatatttcctaagtacgggaagtcgagaagtaagactgacctttttaaaaagtctgaggctaacgatatatgtataatcccccaggcttggagaaagacagtgaagggtcgagtgatgtccaacgtcagcatgacactctactggtggatccagcaacacttcccgtatgaattggtaaagaacgaggacgaatgggatgcaattggcggcgatgtgtacgagaggccagaatagtttgaatatcataaaaaggccgaatatatactgtgaaatatttgtaatctgcaaagtttcaagtacatccttttgattttaaagttacaattacattgattatttaattaattggtacatataattgcttttagtatattacacatattagctttaaaacattatgtaagttatctatattcaatcgtatacaacttcttgattgggtgctgaccagagctagtagtgcccattgctcataacattatttcgcgtatttttgctgagtgtaggtaagattccgaagcaaaaagtgaggtcatcacaatggacgcagatatcttgtatggtaaccaagatttaatgctactttttaggggatcgttccattattttaagatccagctctttcacttcctaatccgtaaaacttaatgtaactactatcaatgcacaatttcctttaagtaggcacaaactaaggatgataaacaaagttaagtgtactattcattatcattttctgcacaacacattgctagattacttaagagatagattagagtctagagaccg

SEQ ID NO: 16400 - DNA, 2398 bp, DROSOPHILA
aattgccagcagggagacgcagaaactacattatatatacaaaatatatagtttctagcggaatttctgccaacaaaaggggtccagtggttacttcactagcactcccacacaccaccaacaatgcagtccggggctctggctaggccatgtctggcgatagtcctgctggcgggcgtcgtcctggtggccgactccttctacgtgcccggcgtggcgccggtggagttcgtacaagaccaaaagatcgacgtgaaagccgtgaagatgactagcagccgcacccagctgccatatcagtactactctcttaggttctgctatcccaagaatggcacgctcatctttaagtcagagaatttgggtgaagttctgcgcggcgaccgaatcgtcaatacgccttacgaggtgcggatgaaccagcaggtcaactgccggctgttgtgcaaccagaaggacagaccgctcacttggagtaaagaggactccgcactggttgcggagcgcatccagcacgagtactttgtgcatctgctcgtggacaatctgccggtggccacgcgcatcgtcagcgttaacaatcccgcggaggtgacctacgagcacgggtatcgtctaggccaagtggacggggacaacatctacatcaataaccacctgaagtttatcctatcctaccacatgcactccaaggataagtatcgtgtggttggctttgaggtggaaaccgtttcggtcagtcacaaagagctgaaattccatggggacacctgcaacttcccagacagcgcccgaccgcagctggtcaatccgaacggagagacgcagctatatttcacgtactctgtggagtggaaggagtccaaggtgagctgggcctcacgatgggacatctaccttggcatgcgcgatgtccagatccattggttcagcatcatcaactcgctagtggtggtcttcttcctgtctggcattctcactatgattatgattcgcaccctgcgtcgagacattgcccgctacaatacggatgacaatattgaagatacattggaggagaccggttggaagcttgtgcatggagacgtattccgtccgcccaagaatactaggctgttttccgcgattatcggcagtggcattcagatcttctttatggccctcatcaccatcttctttgccatgttgggcatgctgtcgccatcgtcgcgtggcgcgctcatgacctcgggcatttttatgtacgttttcatgggcactattgcaggatactatgctgcccgtctctacaaaacaatgaagggtcgcgagtggaagcgggccgcctttctcaccgctactctgtatccaggcattgtctttggcactggattcttcttgaacttttttatttgggacaagtcgtctagcggtgccgttccctttaccaccatgatctcactgctgctgctatggtttggcatctctgtgcccctggtctacctgggcttttatttgggataccgcaagcaaccctaccagcatccagtgcgaaccaatatgattccgcgacaagtgcccacacagcactggtacatgaatgcggttttaagcactctgatggcgggcatcttgccctttggcgccgtcttcattgaactcttctttgtgttcacggccatctggcagaatcagttctactacctgtttggctttctattcttggtgttttgcatcttagtcgtaagctgtgcccagatctctatagtaatgacttatttccagctctgcggtgaggactaccgctggtggtggcgcagttttgttgtgtctggcggctcggctgtttatgtacttttttatagcatcttctactttttcacaaagctggagatcacagagttcataccgacgctgctctacctgggctatacgggtcttatggtgctcacattttggctgctaactggctcgattggcttcttcgccgcctacgttttcattctaagaatctacggagctgtgaagatcgactaagctgtgtcacccactcgtcacgctgtacaccaaactatccttgcaatatcattcgatcataaatatatttatagagcaactgaacccagtctcgtccagctgcagaaatcaatataaacaaaacggaaactaagcgaaaactcgacgactcagccatgtgagctaacttccccttcttgtccccagctgcagaaagtcacccactaagtaaccatttactaagtcaaaacgctaaattcagcaagtacgttttggaaccccggaagtgactcgatttgcaggagcgtgagcgttgcgttttagaatcaatctagaaatgcctaatttatatatgtatgtaaagaatctaatctaagcaactgatataaaacaaacaaaaatc

SEQ ID NO: 16401 - protein, 630 aa, DROSOPHILA
MQSGALARPCLAIVLLAGVVLVADSFYVPGVAPVEFVQDQKIDVKAVKMTSSRTQLPYQYYSLRFCYPKNGTLIFKSENLGEVLRGDRIVNTPYEVRMNQQVNCRLLCNQKDRPLTWSKEDSALVAERIQHEYFVHLLVDNLPVATRIVSVNNPAEVTYEHGYRLGQVDGDNIYINNHLKFILSYHMHSKDKYRVVGFEVETVSVSHKELKFHGDTCNFPDSARPQLVNPNGETQLYFTYSVEWKESKVSWASRWDIYLGMRDVQIHWFSIINSLVVVFFLSGILTMIMIRTLRRDIARYNTDDNIEDTLEETGWKLVHGDVFRPPKNTRLFSAIIGSGIQIFFMALITIFFAMLGMLSPSSRGALMTSGIFMYVFMGTIAGYYAARLYKTMKGREWKRAAFLTATLYPGIVFGTGFFLNFFIWDKSSSGAVPFTTMISLLLLWFGISVPLVYLGFYLGYRKQPYQHPVRTNMIPRQVPTQHWYMNAVLSTLMAGILPFGAVFIELFFVFTAIWQNQFYYLFGFLFLVFCILVVSCAQISIVMTYFQLCGEDYRWWWRSFVVSGGSAVYVLFYSIFYFFTKLEITEFIPTLLYLGYTGLMVLTFWLLTGSIGFFAAYVFILRIYGAVKID

SEQ ID NO: 16402 - DNA, 3190 bp, DROSOPHILA
agcgaatgctgtcgccatattttctatggcatcacgcagagtagcacggtgaaaaaatcagtgtactctaagtatttcccttttcttgtaatgcaatttattagagcctaaaaaccgagttcatttcttaaaaatgtaaatcagataaatatttttttacttcttttttgtcaaataaaaaactaacaagaatcgaaaaaatttgatccgatttttgtcaatgtaaaactcacatcacccacagagcttattaaaaatgctttgtgtttgccacaggaggtaagtaaatgccagagaaatggcacaaatgtgtaccttaaattgacattttgccaggcgatgactgcaaagagaattgcgatttaagcaggggtgagattagaatgattctgcagttaaatcaattattttatcgaacttttgctcattccgtcttgatttactcccccttcattttaccccttttgctcagtgaagctcaaaacggcaatcctagcttgcattaattaattgaaattgcaagtgagtctgaaaaagttttgctcagggaaagctggggaaaaaagcgggaaaattaaggagaaaaaagaaaactcggttagcagtttgccatttcctttttttttagcaaggacacatctacttgaataaatcacgaccaacaacgaaaacgaagcttttaagtctgtgggtggaaattaatcaagatttcaaaggaaatgctggataagagagatggataaacataaagcgggcaagcattcttttaattaaaattatgaatgatatcgcagattaaaaaatatctttttttacgatttttcaatccaaaatgtgtgatgaacttataaataaacagttaaccttttttatgtaaatgtgagttttatctttttcttttgatttacttttatcacataattttttttaaatcgtatttattaagatataaaggcatctcataaagtattaacttcgactgcatatggtaacctaaagtttataggcgtgaccaatatttcagccaaccactgttagccagtacacaaacctcattctcatcgcgtaagattccgacaacctggaggaacatgcgctcggcatcgttttgcggatcgtagttggagtaggtatcgtccaccagcgtaatgtcgcccaggcggcagtggagctgctcctccgacgaggacgagtacagcgacaggatgttgcgtcgccgctcattggcaacgtgttgcacgcaggcagagactgttgcctccacagctgcttgtcgatcatcaggaacatcttctggtggagcttcggcttcctcgcagccactgctgctcaactgcgagtaactcaggctcagttcgtccatctcctcgccctcctcctcatcctcctcgtcgtcatcctgttccatttcatgctccaattcggtgccaccggttccactgtcaccgctttgggagctggccttcgccttggccttggccacacctccatttgcagcggccgcccctacattgaccaccaccaggttgttgagatggttgccaaagtggtgcgactcattgctgctgctgctgctccgactgcgacgcttcagcgatcgaaagggggcgaggagtcggcgacgggtgctgcacgtgggcgtggcatagggcggcagcatctccaacgtctgctggtgtatcttgggtgctcccgagtaacgctccagcgaccttgactttccaccactgctctgcagcacggagcatcctgctctcttggtatgggaattctcaatgacctcgccagcctcatcgctggaactgtgggccagtgctggcgatgttgcagcctggccactgctggcaaagagtcgcatcctagacaagctgttccagcaaggggttccctttacttaagctattgttttagttggtgttgctggtgctgcgtatgttgcaactagtgttgctgattcttctttcttctgtttctgttgctgctacagatgctgcatatgttgcttaggctcgagatatggttgctgccctttttccagcaattgaagttgctgcagttgcagtggatgttgctgctgccaccgatgttgctgcagattgttactcctgctgcagtggctcctgatgttgccgttgatatcgctgctgctgctcctcgctgtccgacgttgctgatcgtctggcggggcgagttaattaatcttgctctatgcagatttcaggttttcgctgatgatgctgctcctcccgaacaaaaacttaggcacttggttgcatcgttttagggcacattcttgcgtaatgaacgttgtttttatgcgcttatctatttataaaaccggttcgacaggattctacgtttataattccgttttctctcttctgctcgggtcaaatatgacaagggcggccgaaacacacagcacgcacatacaaatatatgtgtgtaattcgtactacaaatatgccccaagtcaataagccactcaattacgccgaaatttcccagctcacgcccctcgctcgccccccaaagccgaccaacttttgactagcgttaattatccagacatcttggctctgtttgccaagcaaaaaggttgactgcattctgtttacacaattgttgttgcccgcctctgcctacatgtatctattcccatctcgctcactccccctgacgtttggtgtgtgtaaattatgttgggcaatatttactcgccgataagccaactccaatgtttcagttaagacatttattgtcttgtcttcgcattctgtgtttggttctgctcttggttctctggcattgccaaggtgcaatgagtggaatggtaaaaaaaaaaaaaacagtaacagggggtctttgggaaaaaccaataaaaaggtgggataggttagtggaacgatcatatatgcattttggggcagaccagaggaagttgttaagacaacgttgcaacgaggatgtgataaaatagggttaaagatgggaaattttttctaggagctacgagacaaagaacaaccaagtccaataaggaatcagtaaatctagaagagatttacaacaaaatttgacattttctgatagttattctatctagtggagcttcctatttgctcatatacatattttatagcagataatattgaaataaatctaattaaattatctttttttataattt

SEQ ID NO: 16403 - DNA, 1190 bp, DROSOPHILA
tcgccccgccagacgatcagcaacgtcggacagcgaggagcagcagcagcgatatcaacggcaacatcaggagccactgcagcaggagtaacaatctgcagcaacatcggtggcagcagcaacatccactgcaactgcagcaacttcaattgctggaaaaagggcagcaaccatatctcgagcctaagcaacatatgcagcatctgtagcagcaacagaaacagaagaaagaagaatcagcaacactagttgcaacatacgcagcaccagcaacaccaactaaaacaatagcttaagtaaagggaaccccttgctggaacagcttgtctaggatgcgactctttgccagcagtggccaggctgcaacatcgccagcactggcccacagttccagcgatgaggctggcgaggtcattgagaattcccataccaagagagcaggatgctccgtgctgcagagcagtggtggaaagtcaaggtcgctggagcgttactcgggagcacccaagatacaccagcagacgttggagatgctgccgccctatgccacgcccacgtgcagcacccgtcgccgactcctcgccccctttcgatcgctgaagcgtcgcagtcggagcagcagcagcagcaatgagtcgcaccactttggcaaccatctcaacaacctggtggtggtcaatgtaggggcggccgctgcaaatggaggtgtggccaaggccaaggcgaaggccagctcccaaagcggtgacagtggaaccggtggcaccgaattggagcatgaaatggaacaggatgacgacgaggaggatgaggaggagggcgaggagatggacgaactgagcctgagttactcgcagttgagcagcagtggctgcgaggaagccgaagctccaccagaagatgttcctgatgatcgacaagcagctgtggaggcaacagtctctgcctgcgtgcaacacgttgccaatgagcggcgacgcaacatcctgtcgctgtactcgtcctcgtcggaggagcagctccactgccgcctgggcgacattacgctggtggacgatacctactccaactacgatccgcaaaacgatgccgagcgcatgttcctccaggttgtcggaatcttacgcgatgagaatgaggtttgtgtactggctaacagtggttggctgaaatattggtcacgcctataa

SEQ ID NO: 16404 - protein, 285 aa, DROSOPHILA
MRLFASSGQAATSPALAHSSSDEAGEVIENSHTKRAGCSVLQSSGGKSRSLERYSGAPKIHQQTLEMLPPYATPTCSTRRRLLAPFRSLKRRSRSSSSSNESHHFGNHLNNLVVVNVGAAAANGGVAKAKAKASSQSGDSGTGGTELEHEMEQDDDEEDEEEGEEMDELSLSYSQLSSSGCEEAEAPPEDVPDDRQAAVEATVSACVQHVANERRRNILSLYSSSSEEQLHCRLGDITLVDDTYSNYDPQNDAERMFLQVVGILRDENEVCVLANSGWLKYWSRL

SEQ ID NO: 16405 - DNA, 5685 bp, DROSOPHILA
gtgcgggatatgttctttgagtccgagaatgataaggagaggagtatccttctaaattctctcagctgcaccacggagtattgggcgatgcagaagttgctcagctgggcgcttgactcaaaaaaggttccaagaacgatgacagccagtcttctgagcgccgttttgagatccccattgggctactatgtgggcaaacagtttctcattgaccattctaaggaaattctgcgaaggtaagtatttaaaatcttttaagataactttaaaaaactgaaaatgaatattcaaactactccagcaaggacgttaaattgattttgaccccgtttatcaatgcgatgtctacaaaagctgaattttcggcgctgaacgatcatttgcataggaaccttccatcctcaatggtttctggcttatcatccacgttggagtctggtttagatagagtgaattggcgaaataacttgtactttgatctgcttaaagccattcgagattttactctggatgatggtcccaaaaacagttctgattcggactccaattaactaattgttaaatcaataaaaatagtagttacacaaggttgaatcgtcaaaacatgggttttattcttgtacaattcgaattgatattactttaaccacaaaaaatgtaaaaaatgtgcagccgtctccttgcaaacaacttggggattgtcgtatcatttagattttaaccgaaatgttatcaatatacatttcgctaatctcaagatttcttcgcaacgtttgcattatatccgtgcaaataatttggcttttaaaaggcatttgtgtatgtgaactatatcctaacttaagctatcttatgtttatgttaacctttgttctttttcatgggaatggtgcataagtatgtacaggaagtatctatctgtctgtttaaaatcgaacatcacagcattgacattgcctaaagctagggataagattcatctggaatattggtttcaaaatcaggcatagcatcgctttcgcaggctgatgtacatcatcactcggaagaacagcatcagcatggccagcaatccgaactgatggagcatcgacaccttttccacatccaaaaatttgagcagcacgcgaggatcgctaaaatgacagtatatcgcatcgcagtcgagttcttcccgctgaaatccgaagacggctaaaaccaacgaaaccacgcccacacgcacatagctgaatttcatcagcagttgcattccgccggatacctgcggcgcaaagtcaaatccgtagacggccaaacccatcagaggagctattagcatcggacccaccacactgccattctgcaatgagaatgaagagttttagcccaaaagtatacctcgtatgcggataggaaactcaccgtaatgctgaaggtggctccaattgccaggcccattccctcggccaccaatgagatcatcaaacccacagccacaaaaatgcagaagcgccagaactgctgcggcaatccggacatccagtacgtgacagccatgaaggtgatgttgagtagcacttgaactggcagtcgcgaaactgtgagggccatgtagtacggggtgagggtataccaacgattaaaggtctccttcttgaccagtttcacctcagcgggatctgcaggataatcttcagattcagtattcgagtaggaaataaaaaaccaaaacacttacagctcaaaatgggcaccatcacctgggtgtacacgatcatgaggacggcgccgatgcagaatttcagatgatcgaacatccgggcaccttggttgcccagttggaagaatatcaggccaaagaacagaccgcacagcaggtgatggaacaattggatggtcagtgccaaacgagcacgcgttattctcagtagcattattcgcataagaacgataaactgacgaaacccacatacatcccgccgatccgtatggagtctcttcgagaaggccttcacttgctccaacagagcactggtgcctccaattagcgttccatccgtggaggcggcgctgccagcgaaaaaggcgggcaagaatggacgcttctgttgctccagaaacattgtggtgaccgcctgctgaggtgccaattgctcagactgactgaccacatagatcagcttcccgttttcggttaggtcgctgagtgctggcaccaggtgtccatcctcggcatccaccagctcaataactgtaacaaaaaaagtaatcccaataattaaacccttaactataaaattaactggcaaaactcactataatccgaaggactgtaatgcctggggcaatccagctgggccaatcgcagaaagggaatggtggctctgggactgccttggtagacacattggcccttggccaggacgtagatgctatcgaagtagttgtatatcgtggccgaaggttgatggatggtgcaaacgatggtgcgaccctcgtatgccatcgcctgcagcaaacggatgcactgggccgctgtcacttcgtccaggccactggttggttcgtccaagaagaatatgtttggattgtccaccagctccagggcgatggacaatcgcttacgctccccgccactcaacttctctgccgtcacattgcgccggtgattcaagtgcagattctccaatatatcggtcatgatttcagcctttttgtgacgattctttaacttgagatcgcaggcgagattcataagctcctcgacagtcagcagggtctggtggtggtcgtcctgagtgatatagcaggcattgtcccgcttcatcttgatgttcccagtgactccgtcgcgtctgaaagtcattaaaagttagatcaagctattattatataatatattagatcagatcgaacaaagaaatgtatttcccatcattgtttttttccttatcatttccctttttccgcatgtaaacaaatcttacgacaatttccgctatattctgaggaagcattagattcattaaaaactacgacatttattttgaaggaagagtttgttttgatccagtatggcatcatattactggagatgtttgtttgtttatctaaatcacccaccctcccagaatctacagaaccctgtagttatttcgcatttaaatcggcataaagtcagcgtttaaatcaccagtctgtggatcatagaaccggttagctttcggctctatcaaattatatgggctttgttttgttacacttaaaccataacgtcgaatgcagtcgagtctggtttggcatattgttctcacctgaaacccgaaatcgcattaagcaaactgctttttccggctcctgagggtcccatgattgccgaaagttgaccattccggaaactgccgctgactccattcagaattcgacgctcaccggttacgcgccctgaaaaaaattatgttaaatattctgcgatttcttatctcatcttagaaaatattcaatggcttaatgagtcacagaaatataaagctaatatattctagctactacgtatgaaagcttgcgattctggtttatgggatttgctaataagacggatgaaataattggatatgacataaaactgaataaatcaagtttcatttttttaatgggaaaatcactttcattgaatgggctcagaatggctcagaacagctgagaatccagttaaatatttttaataattttcgtgacatggactggcagcggaaagataccgtggatgacaaatgacgggcttgaaaagatttcatgactggcataaaacgaaaccagcttccgccctgtctgtctaccaaattccatagctccgcatgaaccccacaattataggtgttcgcacgggcataatttattcgaatcaaaactcgtcttgggtgtggaaaaatccgtaacagtgctaccattttagggccaggatggtcacgatggtcacaaggaaccgaaaaattatttatataccctccagccaattatcgcaatgcgaacctgacctgcattcttcgacagatctgtcagtgtcgaatgctcgaatgagttaatatgtgccaatgccaacggcgttcttatcagcagcagtgcagctggactataatactaggtattaccgaaggtcttaatcaagcatcttaatctttaatcggttcttcggattcgccttggtttccctttctccctgaacgtatggtgcaacagggcggatggttaatgaagaagattgattctgtgctcgactcacgtggatcaatgaggttgtagattaatctttgaaatgcattttattctacaaattagccttgcaataaacatttaagcttatcataaagttcagttacatattgttcaatgtcaatgtctgtctggaaacatggctagcattaatttatgttgataacaagagcccagccatttaatctaccaaatgatcgaatttctatttgaattatagaattctgagctttggctttcatttcattactgacatacatatgtaaatgagaaatctagtcaatatctgacccagtttttacacagcagccagtggtcaattaaaatgcattacacaaccaaagtgaatagcggattgcgaagcatttcaagaaggtcactgacaagtcggagtctgtcgataatcctattatcataccaattagccccatatcaattagccgttgcctttccagcacgcctccatagcattctggtcaccacgttctgagcacgcgcagcgtctaaaaatcgtaaatcataaaaaaaaccgaaaaaaatcgaaaaactgaaaatccgaaaaaatgctgtcagcaaaacttggcgaactcggcgaccaacaaatcaacagtacgttggcttggctgatttatcgtaccgcttccccacctcaaacacctcaaacattgtaaaccgctgctcccacgattctacgtgagtcacataatgaggcgtgacaatttgctgtggaaattatctcaacgaatatgatacggaaagccaatatatttagatcacaaaagtcaggtcattgttacgagctaaatttcattattaaaggttggatattcatagtataatactataatccataaagagtaattgaaataaatctgaaatttcctttcaaattataaacaaattattatcgagctaggcaaaaattgtttactgaaaaacaccgatttcgagtgtaagcgaaatatattcaaaaattcgtaatacaaattccatgccataaatgaaactgcgcctcaaacaaacacgtttcttaattggccgaacgaatctctggtttttacccagatcgattgtggactcaccttttggggcactgggtggacagaggaggtggcactgttccctgcaacgacgagttcgctaattgatgcaattgaatcgcctttacctaattaccacaattccattagcatgcccgtcgcgtttggtctggtaaatgctacttataatgcagcactcagcatcaaacattggaataggatctgttccattccctggaaactgtgatctttgatctcttatgcaacatcacccactccactccaagcccttctgaatcattaaacttatatcatactagttgcaacaaattgcatgtttgaattattcatctagcttgcagtgccctttttagcaatgggttctaaacta

SEQ ID NO: 16406 - DNA, 1794 bp, DROSOPHILA
atggggctaattgggcgcgtaaccggtgagcgtcgaattctgaatggagtcagcggcagtttccggaatggtcaactttcggcaatcatgggaccctcaggagccggaaaaagcagtttgcttaatgcgatttcgggtttcagacgcgacggagtcactgggaacatcaagatgaagcgggacaatgcctgctatatcactcaggacgaccaccaccagaccctgctgactgtcgaggagcttatgaatctcgcctgcgatctcaagttaaagaatcgtcacaaaaaggctgaaatcatgaccgatatattggagaatctgcacttgaatcaccggcgcaatgtgacggcagagaagttgagtggcggggagcgtaagcgattgtccatcgccctggagctggtggacaatccaaacatattcttcttggacgaaccaaccagtggcctggacgaagtgacagcggcccagtgcatccgtttgctgcaggcgatggcatacgagggtcgcaccatcgtttgcaccatccatcaaccttcggccacgatatacaactacttcgatagcatctacgtcctggccaagggccaatgtgtctaccaaggcagtcccagagccaccattccctttctgcgattggcccagctggattgccccaggcattacagtccttcggattatattattgagctggtggatgccgaggatggacacctggtgccagcactcagcgacctaaccgaaaacgggaagctgatctatgtggtcagtcagtctgagcaattggcacctcagcaggcggtcaccacaatgtttctggagcaacagaagcgtccattcttgcccgcctttttcgctggcagcgccgcctccacggatggaacgctaattggaggcaccagtgctctgttggagcaagtgaaggccttctcgaagagactccatacggatcggcgggatgtatgtgggtttcgtcagtttatcgttcttatgcgaataatgctactgagaataacgcgtgctcgtttggcactgaccatccaattgttccatcacctgctgtgcggtctgttctttggcctgatattcttccaactgggcaaccaaggtgcccggatgttcgatcatctgaaattctgcatcggcgccgtcctcatgatcgtgtacacccaggtgatggtgcccattttgagctatcccgctgaggtgaaactggtcaagaaggagacctttaatcgttggtataccctcaccccgtactacatggccctcacagtttcgcgactgccagttcaagtgctactcaacatcaccttcatggctgtcacgtactggatgtccggattgccgcagcagttctggcgcttctgcatttttgtggctgtgggtttgatgatctcattggtggccgagggaatgggcctggcaattggagccaccttcagcattacgaatggcagtgtggtgggtccgatgctaatagctcctctgatgggtttggccgtctacggatttgactttgcgccgcaggtatccggcggaatgcaactgctgatgaaattcagctatgtgcgtgtgggcgtggtttcgttggttttagccgtcttcggatttcagcgggaagaactcgactgcgatgcgatatactgtcattttagcgatcctcgcgtgctgctcaaatttttggatgtggaaaaggtgtcgatgctccatcagttcggattgctggccatgctgatgctgttcttccgagtgatgatgtacatcagcctgcgaaagcgatgctatgcctga

SEQ ID NO: 16407 - protein, 597 aa, DROSOPHILA
MGLIGRVTGERRILNGVSGSFRNGQLSAIMGPSGAGKSSLLNAISGFRRDGVTGNIKMKRDNACYITQDDHHQTLLTVEELMNLACDLKLKNRHKKAEIMTDILENLHLNHRRNVTAEKLSGGERKRLSIALELVDNPNIFFLDEPTSGLDEVTAAQCIRLLQAMAYEGRTIVCTIHQPSATIYNYFDSIYVLAKGQCVYQGSPRATIPFLRLAQLDCPRHYSPSDYIIELVDAEDGHLVPALSDLTENGKLIYVVSQSEQLAPQQAVTTMFLEQQKRPFLPAFFAGSAASTDGTLIGGTSALLEQVKAFSKRLHTDRRDVCGFRQFIVLMRIMLLRITRARLALTIQLFHHLLCGLFFGLIFFQLGNQGARMFDHLKFCIGAVLMIVYTQVMVPILSYPAEVKLVKKETFNRWYTLTPYYMALTVSRLPVQVLLNITFMAVTYWMSGLPQQFWRFCIFVAVGLMISLVAEGMGLAIGATFSITNGSVVGPMLIAPLMGLAVYGFDFAPQVSGGMQLLMKFSYVRVGVVSLVLAVFGFQREELDCDAIYCHFSDPRVLLKFLDVEKVSMLHQFGLLAMLMLFFRVMMYISLRKRCYA

SEQ ID NO: 16408 - DNA, 5019 bp, DROSOPHILA
gccatcggttaagtttgtcgaaattaaactttgcacacggggacattgttaagataattggaaaatcttcatagatatgctaagagcaacgtgatgatattcttgagttgaagatgataaagataagattgcctcacggaaaaattttgaggattacatttcaggctcagcaattttcggctcttctacaaatgaattccttaaaatatgcctcactatattaagcagtctttagatgatatagtaaagataatgaaaagaaaataacgataaggaaataaatatcatttaagataaataaacggctaaataaataaataagagtttagtttaataatcgtttaactggtaaaaagagatgtatttaatattctgtatatgcgagtacaggtataatcatatgaaggaatgatttctgattacattggggaaggatcataatacatacgtatatcatacatcatacatcttacatacatacatatatatatttatatacatatatacatatatacatatatatatatgtatacagaaatgcatgttaaaaatatatgcatgtgaaacgaaaaaaacaaaagttcttagatgttttgttctatgatcatattacaatgatactttcttattattgtgagaaggaagtatttgtttatttgaacccacctttgcgaatgtttattaaatcaacaaatataagcatttgcattgaatcacgcttattgcagtaagcaccataagtgcacgttgaacttttaatcagaatacattattttatacacaataagcacgggtttaaaatgtaaatgctgaaaaacatctaaatatttacaaaattaagaaaagcatcgcgcttacaaactagttccatgcaaactgaactggttaaattgagccatatcagctgttttatcaagttccttcgaaacgataagctgaaccaccaacaaatattttgtattatcgattcgtaaattgatatcgaaatgaaaaatcgattatttagcggtttctttaaacgctgcattacatatttgtattttggaatgcgttttttaagctctaaatttgtgcagcgagccttttcaattcttaacatagcatttgaaacttcacaataaattaacgccacacctatatgtatatattactaaaacgtttaagctaactataactactcaaaagtgttctcctcccgtttaagggcactaaagaagtcggtgttgagtaatttgctgggatcaactgtcacagccgacttcacagccctttggtcatccgcattcttgacaatgcgtttccattcggagaggtcgttgactggattattgggcttggcctccagatgaaggggtttcagcatgaaatgggctttaaccagttggtttaacaaacgcactaaatgacaggaaaatatttaaaaagttagcaacggaaaatatggaatgttgttaggtcatttacaatgtattgactgaaaaccaagcaggttcgcatgctcgctccaccagttgcatatgaggctaaggtaatgcttggtcgtctcctcggagtcgcgaaacagacaggtgaggtaatactcgtgaaagacaagggacagaaggtgcactgcgatgcgggagatctcgccaacttcttcggtgcctaaatagaaagcacaaatattgattcgtgtcattgatcatatgaaaatgatttttttttagctcaaacgcacctgctttcctgctgtgcaacatccattggtgcatcacctggaagacaattgttaccgcactgaggcacaactttacatagcactcgcagccttttcctcgctgcgttgtacttgaatttgaattttgattcgggttcgaaacagacgctgatgtcgatccattggagaccgatccctgcacagctcctgtggagttgaagctcagactggtgcctgttttcatcagagtaccatcgctggagtcctcgtcgccatcgtcggcaaagtaaggcagcatttcaagtatgaaatccggtgggtttttgaagcactcgaacgcgaatcgcacatgatttcctccgatcttgagcagcaactgaaagtagtcctgccgcagaggagtttcactaaagaagcatagctcgagtaggcccgcgtagacctgaagtaaacaggagtcgggaccaaatcgataaacggagcgaacgcgatccgatacaaagcagtccttgggactattcacacacattttatccataagttggggatgtctaaggcagcttaaaaagcaggagctaagctcagcaaaaacccaaggactgggacgagtaaaaactaactgcttaagcagatcgaagagtagctcctcgttatgttgaagaagggcattttcttgtaggaggctatttaggagtgaagtcaaggcttccagcaatccaaagtgttggccgacctcgtaggaaaatcctagttttgtgatagcttcaatagccatatctagcagtcccagatcattttctttccactccgtgagacctctagaaatcctttcctctcgccggcaaatcaaagccaaggtagctatgaagcgacgcagcggaacagccttttcgttatcatacaaacagctctgatgggtcagggaaatgcgatgaacttcctcctctaggttgtggggattgtagggatacagcatgcagttgtgtggaaagtccaaactttgagcatacgaagcaaactccgtgaataccttgccgaccgacgagagtattcttggcaggaggttatccacagattccggctttgcctgcagccgagcgtaatgaagtagcagttgctttaattccagttcaaaatgatttcttcgtttcttagtctgatcctcattttcgctgtattcgaacacactgccattatcggttttcagcccgggcacagatctgtgtatgttaagcctattcaagcgaagtgataagcgtttctccaaaggatctggagcagcctgtaaaatgctcatgctggaattcatgcttctttcatgggctttttgctgtgtcttcaactttgagaactcggcgttcttaatcttcaactcgatgtccttggccgcaatttgtttggccgcttctgccacttttttgttgcaatcccgattcgtttcgtcggccaaagccagcttttccattttgctagcctgcagctgctggcgcaagtgcttcagctcatcacgaagtaaggaaacctagagaaataaatataaatggattagtttctgtaaggtctagaatcggtgttatagttccaccccgatgtccacctacctcaccagacttgatctcattgcgttccttactgtcgcccaaattcttttccagctgcgcgttttcccgcttaagggcttcaatcctatccatgagaaactttagctgatgctcctgctggcgggattgcgtggcattgatggtcgtcgtggtcgtggttttctgctgaacacttatgctgctggtagttatcctacttgtgctggtcttcggctccggcatcttttgtggctcactgtccatgagggtaacggccagaaaatcgaaatcatcatcatccgcgaaaatcgcatccatatccagggaagtaggcttcttttgtggcggcggtggcggcggaaacatttgctgtgtgctggttgagccctgaaaagtgggtgcaaattcgctgaaggtgacctcgctgttgccgatgtccacctctgttccgcccttctttttccgctcctccgcctcgatttccgcctccgccagctgggtggccatcaggatgacatcgtcatcgtcgtcccagagaatcccatcgaaattgttcctcggtggactgggtcgcgctgatccgcgggtaacgctaacatccaggcgcggtttcttgcaccgcgcgaagtctttcatggcagaaaagcgcttggccatggttcctccagtttccgctatatttcgttactttttggccatggaaagtcgtagattattttgccggtttgctttgtttataaaatgtagagctcaactagcgttgccagatggatttgatcgcaacgatggatttgcccaaccaaaatagagattatgtttcgaatccatgttgcatagaaaaatactacattaggatttactgcaacaaaaagccagttttgtaatatcgctctttgttattatgctggttttttttaagcgccgatagaaacccgctacaatcacagtttcaaaatccgattaatattgagcaaaaccaaagtcatctggctacactcaagtctatcgactgcggtgtatcggcatgtggtgtatcgactcagctttcccattaacctcaaaggaaaatcaaagaattctgcggaaattctagcccaaaactaaaggacttacggggaaaccagaacccagcgacttcggtcgaattttcgaggtgacgggcggcgcgaatggaacgccatgccagcgaagaggatgacggtcaccacagcagcagcttcgaccatcagtggagccagtgggtccaccacgaataatggtcagtctggtggcggtgcacgcccactggagacgctaaacggaatgaccaggctgacccccgcccgcgacttgacccttggtgggcgcggcgctgggacagccagcaaaaaggtctttgctcccaatttgaatgctgtgcgcaataaaaatgcgtgagttgtggaatggcccagggggagtcattcttttcatcatctcatttgattcacagcaatgtcaagacatccaaggacaccacgcagccaaggagcggccgcagaggtggacgtggcaacggcactggagcaacacgtggtcgaggtggaaattccgctggcgggggcaactccacgctcatccaaacccagggactcttctccgaaggagcaggcgatgttcatgtgcgaaggtccacaggaaatggaacggcatatgcacggggcggtgaggaggtgtccgtgaccaggaaacgggtggatcgcaaggacgacaagagccaggccg

SEQ ID NO: 16409 - DNA, 2801 bp, DROSOPHILA
attttataaacaaagcaaaccggcaaaataatctacgactttccatggccaaaaagtaacgaaatatagcggaaactggaggaaccatggccaagcgcttttctgccatgaaagacttcgcgcggtgcaagaaaccgcgcctggatgttagcgttacccgcggatcagcgcgacccagtccaccgaggaacaatttcgatgggattctctgggacgacgatgacgatgtcatcctgatggccacccagctggcggaggcggaaatcgaggcggaggagcggaaaaagaagggcggaacagaggtggacatcggcaacagcgaggtcaccttcagcgaatttgcacccacttttcagggctcaaccagcacacagcaaatgtttccgccgccaccgccgccacaaaagaagcctacttccctggatatggatgcgattttcgcggatgatgatgatttcgattttctggccgttaccctcatggacagtgagccacaaaagatgccggagccgaagaccagcacaagtaggataactaccagcagcataagtgttcagcagaaaaccacgaccacgacgaccatcaatgccacgcaatcccgccagcaggagcatcagctaaagtttctcatggataggattgaagcccttaagcgggaaaacgcgcagctggaaaagaatttgggcgacagtaaggaacgcaatgagatcaagtctggtgaggtttccttacttcgtgatgagctgaagcacttgcgccagcagctgcaggctagcaaaatggaaaagctggctttggccgacgaaacgaatcgggattgcaacaaaaaagtggcagaagcggccaaacaaattgcggccaaggacatcgagttgaagattaagaacgccgagttctcaaagttgaagacacagcaaaaagcccatgaaagaagcatgaattccagcatgagcattttacaggctgctccagatcctttggagaaacgcttatcacttcgcttgaataggcttaacatacacagatctgtgcccgggctgaaaaccgataatggcagtgtgttcgaatacagcgaaaatgaggatcagactaagaaacgaagaaatcattttgaactggaattaaagcaactgctacttcattacgctcggctgcaggcaaagccggaatctgtggataacctcctgccaagaatactctcgtcggtcggcaaggtattcacggagtttgcttcgtatgctcaaagtttggactttccacacaactgcatgctgtatccctacaatccccacaacctagaggaggaagttcatcgcatttccctgacccatcagagctgtttgtatgataacgaaaaggctgttccgctgcgtcgcttcatagctaccttggctttgatttgccggcgagaggaaaggatttctagaggtctcacggagtggaaagaaaatgatctgggactgctagatatggctattgaagctatcacaaaactaggattttcctacgaggtcggccaacactttggattgctggaagccttgacttcactcctaaatagcctcctacaagaaaatgcccttcttcaacataacgaggagctactcttcgatctgcttaagcagttagtttttactcgtcccagtccttgggtttttgctgagcttagctcctgctttttaagctgccttagacatccccaacttatggataaaatgtgtgtgaatagtcccaaggactgctttgtatcggatcgcgttcgctccgtttatcgatttggtcccgactcctgtttacttcaggtctacgcgggcctactcgagctatgcttctttagtgaaactcctctgcggcaggactactttcagttgctgctcaagatcggaggaaatcatgtgcgattcgcgttcgagtgcttcaaaaacccaccggatttcatacttgaaatgctgccttactttgccgacgatggcgacgaggactccagcgatggtactctgatgaaaacaggcaccagtctgagcttcaactccacaggagctgtgcagggatcggtctccaatggatcgacatcagcgtctgtttcgaacccgaatcaaaattcaaattcaagtacaacgcagcgaggaaaaggctgcgagtgctatgtaaagttgtgcctcagtgcggtaacaattgtcttccaggtgatgcaccaatggatgttgcacagcaggaaagcaggcaccgaagaagttggcgagatctcccgcatcgcagtgcaccttctgtcccttgtctttcacgagtattacctcacctgtctgtttcgcgactccgaggagacgaccaagcattaccttagcctcatatgcaactggtggagcgagcatgcgaacctgcttggttttcagtcaatacatttgcgtttgttaaaccaactggttaaagcccatttcatgctgaaaccccttcatctggaggccaagcccaataatccagtcaacgacctctccgaatggaaacgcattgtcaagaatgcggatgaccaaagggctgtgaagtcggctgtgacagttgatcccagcaaattactcaacaccgacttctttagtgcccttaaacgggaggagaacacttttgagtagttatagttagcttaaacgttttagtaatatatacatataggtgtggcgttaatttattgtgaagtttcaaatgctatgttaagaattgaaaaggctcgctgcacaaatttagagcttaaaaaacgcattccaaaatacaaatatgtaatgcagcgtttaaagaaaccgctaaat

SEQ ID NO: 16410 - protein, 839 aa, DROSOPHILA
MKDFARCKKPRLDVSVTRGSARPSPPRNNFDGILWDDDDDVILMATQLAEAEIEAEERKKKGGTEVDIGNSEVTFSEFAPTFQGSTSTQQMFPPPPPPQKKPTSLDMDAIFADDDDFDFLAVTLMDSEPQKMPEPKTSTSRITTSSISVQQKTTTTTTINATQSRQQEHQLKFLMDRIEALKRENAQLEKNLGDSKERNEIKSGEVSLLRDELKHLRQQLQASKMEKLALADETNRDCNKKVAEAAKQIAAKDIELKIKNAEFSKLKTQQKAHERSMNSSMSILQAAPDPLEKRLSLRLNRLNIHRSVPGLKTDNGSVFEYSENEDQTKKRRNHFELELKQLLLHYARLQAKPESVDNLLPRILSSVGKVFTEFASYAQSLDFPHNCMLYPYNPHNLEEEVHRISLTHQSCLYDNEKAVPLRRFIATLALICRREERISRGLTEWKENDLGLLDMAIEAITKLGFSYEVGQHFGLLEALTSLLNSLLQENALLQHNEELLFDLLKQLVFTRPSPWVFAELSSCFLSCLRHPQLMDKMCVNSPKDCFVSDRVRSVYRFGPDSCLLQVYAGLLELCFFSETPLRQDYFQLLLKIGGNHVRFAFECFKNPPDFILEMLPYFADDGDEDSSDGTLMKTGTSLSFNSTGAVQGSVSNGSTSASVSNPNQNSNSSTTQRGKGCECYVKLCLSAVTIVFQVMHQWMLHSRKAGTEEVGEISRIAVHLLSLVFHEYYLTCLFRDSEETTKHYLSLICNWWSEHANLLGFQSIHLRLLNQLVKAHFMLKPLHLEAKPNNPVNDLSEWKRIVKNADDQRAVKSAVTVDPSKLLNTDFFSALKREENTFE

SEQ ID NO: 16411 - DNA, 4796 bp, DROSOPHILA
agcattttaaataatgtcataagctttcccgctttgatcacaaacttgtgtatatcttagcattcttcggtatgagcagaaatgggaatggttattcgcattcgcttgcagggcttcaattcataatatacatagatgaataagtcgcattcgatatgaattattttcccagtgcaaagatttttccggtggtcgcttgaaacgcacattcgcacgcagctccatcgccaagtaccacaggtagtccatatagttgggtccctgcctcaagtccaagtccggtttcgcgggcgaaccacttttccttctggggatggatgtggatgtccatgcagaggatggtcttcgcgggcgaaccggttgggcttggtcatcgacttttggggggtccaacccacttccggcatctgcgccagcggatttgagtctgcgaaagcggcgcgacgtgccagggatttcgatttatgttggttaataatttaaataaatatttatttatatttaaatatttgaaataatatattcgcaactcgattgccaatataaaaaataaaaataccaaagaccaattggtcggattgggactcaaaacagctatagaacaatgcatctgggcgccaggttcatgggtgaatcgaagtattgtacttctattgaacttctggggatccttaatccgcatcctgtgtacaacacacgcatacaaaaagcaaactccacattacagcagagcgcaagctgtcaaagctgtagacctgggaaaatagctttgcgggaaagcccggaaactcgaaagcgccattttcaggggcatgctggcttgaaaacgagttgaaagcgtatttccatatcgtgcatttaaagaaacgaagaaacgaatggtataatggacttccgttaatgtgaccgttggcggtcggtactctgagatactctgcggtattcggtatgcctcgcaccattcggtatatttacacggacataccggtgacgtggttacattgcaacaaacatccacagaaacctccaatccactccaatcccagacacccgcccgccgcgacgttgcaacacagttttcatggtagcagcgaacgttcccgattcgaggcagagtccatttggaagtcccgggcatcgcaggagcactgcggcaagcaccgaccgatcggctgagttgtgaaatccaagaagtggaagaggacgaccggacacaaacttcacacactggtgactggactgcagcggatccacatcggaataagtagcagccagtggaaggaggcgacggcagagtgcagccgtggccaagaagacttgagacgcagccccgtagttccgcgagcaatcgtaaccaggaacagcagaagccatggcgctgctgaccatgatagccagggtcatcgatggccttcctctggtggggaccatgcaggatgacgagcaggtacccgtgtgcatcactttctaatacgttgcattccgttccgctcccgcaactaagtcgctttcactttcagagcggacgcagcatactggactaccaaaaccaggctaagatgctcttccgcaagctgggtacccactccccggctcgatgcagtatcgagaccggaccctacctattccagtgagtagccccaattcgtggcacctttgccagggcatagaccattaaaatcacaccatgtacaaaggtttctcggctccgcgggtagtcagtgacagttgatttagtttcggaacaaagagtatagatgtaatttgatacgaagttaaattaaacgctcactgcttgcgaaagccagaagatgcaatgggcgccccaattaaaatattccacattttccctgcagctacctaatcgagaacgacgtctgctacctggtgatggtggacaagatgtactcaaagcgactggccttcaattacctggaggacctggcccaggagttccatgctaactacggccggcgagtaaactcagtgactcgcccatacgcattcatcgagtttgacgtgtacatacagaaggcgaaaaaacagttgacggaccgcagacgcaacatcagcaacatcaacacacagctgcaggatgtgcagcgcatcatggtgcaaaacattgacgacgtgctccaacgtggcacagtgctggcgggtaactactactactactatctacgcgactatctacgcgtgattgtgggattcaactgacgttcaccccgtttttccttccagaactcgacaccaagacccagaacctatcgatgatgtcacagaagtacaagaaggacgccaagctgctcaaccgaaagtccatgtacgtgaaggcgatggccttgggcatgatacttctagtgttcatcatgtatttctgggttctgtaatatcaagcagttccatggccactcggagcggcgcgttctttgttggagtcaagcgtcaaggacgcaagaccaaaagacatttagattacgcgtgcacctgtactccacgccaccaaccacaccatattcattcatatctatgaatcataggcaagcgaaaagtgaatagcgaaaccccctaccagcatacgcatcgctcccgaggattgttttacttctaatattaacttacctttgcgttatttacggtctgggattccattaattattaactcccatttcatttcgcctcgcgcttccgttgcgcaggttttctaaatatttgattacgaatcgggtttagtttagacgacctttgagccaagtcggttgactacgacccaaatctgtaaattatgagcgtcgatccgtgtgtgtgtgtataaatgtctagattgtagatggatcgctgcatagcgaatccgaatccggcggagtgcttgatacaagctgcaaaaacaccgcaaaaaacaaaagaaaaagaaaagataacaagcgaaccgaaagaaaagaaaagaagagaaagggaaataaacaataacagttttaggcaatttatatgtgtaaaattaaggcaaataaataaatttatattgtttaataaagagaaggcaaaactgtgttcgatgcactacccaagcccgaaagatagaaactgcatctgatttttggtttagttttaatcgataatttccctttatatatttttcgattcactgagtgtgatgtgatacattcgcctttatagtttatatccacttgcaagccttcgaattacgattcttctcaatgaatttctcgatctgatccgatcccgatcccattcggtctcatatcgtcccgctaaatgtccgttttcgttgcgtctcagcgcatataaatttgtaatatcaaatctttacaattaggaaaaaaatgcgctgttgccatatacactgctatatcgtaatttggtgtgtatagttttgtgaaatatcgaatccgaatacatatatacgctctctacataactacatatgaatgcatatgctttgtggggggggatgtgtgaaatggtctgcaataattaattaactggggagaagagcaatcatctaccgaattttgcaacctcctctggcttccgtgtactaggctgtggttctgctgaagctctggtggtgagtgggatcgaaaataaattacgcggtctataaaatcgaagttttagtttatgcgaaaaccatacgagtcgggcgtggcggggcgggtcggggcgtaactggaactatttagatatacaatagatgggtatgcttggttgatagcccgcactaggctcaaaattctttaaaaaatatttgcttttctcaattggattctgctaatgctactatagttcgcttgttttgttttttttggcttcgttttgtataactatatttttctcgttcttggctccgacatctatacaaattcagaaggcagttttgcgcgtggagggacaattacaaattgagattcattaaaaagcatcgaagagcaataacactcaaacatatcatttttataggtgtgttttgcattgcctttacttgtatgttggtttgaactatgaaaaatcaaaaataaataaataagtcaggaacaatctgaactttgagattcttgttctgttttcgtttctacgcataccctcatgcactttcgggtacgctgggcttatgactatcaaaaaaaaataatatatagtatatatttatatatatatgcctgctgctgcggtttacaaagtaggtttagagtacgggtaccgtcgttagcttagaaaataactttagtgagtggtgcgcaaggagaagaaggtccatcccaggcctattaggctaagtcgtatttttaccgctatcgctatccatccgtctatctttatatctttctatcattctatctttagtttcatatttgtagccactaggccggtgcatatgtatctgttagttgtatatgtctgtttagctgtgattttccacctttatgtacaatgtgtgatcctttagctctactttaatccttcttcgctactctctaatttcctctttttgattatcttttccgtaatcctcaacgtgcagggaaccatcgttcttcttgagatcctccaatcccactcttctctatttaatcctctggtgatccggtgtgctcttcaggatatcaggctggtggtgctgctggatatggtggtgctgatgatgacccgagctcagagtgcccggttgacttcccccgccggcgtgatgggagctgctcagcgtgtgcgaatggttggagttaagcgtgtgtgtcgcatgcgaattgagcgtattgtgggccgttgtggtggca

SEQ ID NO: 16412 - DNA, 2414 bp, DROSOPHILA
attgcaacaaacatccacagaaacctccaatccactccaatcccagacacccgcccgccgcgacgttgcaacacagttttcatggtagcagcgaacgttcccgattcgaggcagagtccatttggaagtcccgggcatcgcaggagcactgcggcaagcaccgaccgatcggctgagttgtgaaatccaagaagtggaagaggacgaccggacacaaacttcacacactggtgactggactgcagcggatccacatcggaataagtagcagccagtggaaggaggcgacggcagagtgcagccgtggccaagaagacttgagacgcagccccgtagttccgcgagcaatcgtaaccaggaacagcagaagccatggcgctgctgaccatgatagccagggtcatcgatggccttcctctggtggggaccatgcaggatgacgagcagagcggacgcagcatactggactaccaaaaccaggctaagatgctcttccgcaagctgggtacccactccccggctcgatgcagtatcgagaccggaccctacctattccactacctaatcgagaacgacgtctgctacctggtgatggtggacaagatgtactcaaagcgactggccttcaattacctggaggacctggcccaggagttccatgctaactacggccggcgagtaaactcagtgactcgcccatacgcattcatcgagtttgacgtgtacatacagaaggcgaaaaaacagttgacggaccgcagacgcaacatcagcaacatcaacacacagctgcaggatgtgcagcgcatcatggtgcaaaacattgacgacgtgctccaacgtggcacagtgctggcggaactcgacaccaagacccagaacctatcgatgatgtcacagaagtacaagaaggacgccaagctgctcaaccgaaagtccatgtacgtgaaggcgatggccttgggcatgatacttctagtgttcatcatgtatttctgggttctgtaatatcaagcagttccatggccactcggagcggcgcgttctttgttggagtcaagcgtcaaggacgcaagaccaaaagacatttagattacgcgtgcacctgtactccacgccaccaaccacaccatattcattcatatctatgaatcataggcaagcgaaaagtgaatagcgaaaccccctaccagcatacgcatcgctcccgaggattgttttacttctaatattaacttacctttgcgttatttacggtctgggattccattaattattaactcccatttcatttcgcctcgcgcttccgttgcgcaggttttctaaatatttgattacgaatcgggtttagtttagacgacctttgagccaagtcggttgactacgacccaaatctgtaaattatgagcgtcgatccgtgtgtgtgtgtataaatgtctagattgtagatggatcgctgcatagcgaatccgaatccggcggagtgcttgatacaagctgcaaaaacaccgcaaaaaacaaaagaaaaagaaaagataacaagcgaaccgaaagaaaagaaaagaagagaaagggaaataaacaataacagttttaggcaatttatatgtgtaaaattaaggcaaataaataaatttatattgtttaataaagagaaggcaaaactgtgttcgatgcactacccaagcccgaaagatagaaactgcatctgatttttggtttagttttaatcgataatttccctttatatatttttcgattcactgagtgtgatgtgatacattcgcctttatagtttatatccacttgcaagccttcgaattacgattcttctcaatgaatttctcgatctgatccgatcccgatcccattcggtctcatatcgtcccgctaaatgtccgttttcgttgcgtctcagcgcatataaatttgtaatatcaaatctttacaattaggaaaaaaatgcgctgttgccatatacactgctatatcgtaatttggtgtgtatagttttgtgaaatatcgaatccgaatacatatatacgctctctacataactacatatgaatgcatatgctttgtggggggggatgtgtgaaatggtctgcaataattaattaactggggagaagagcaatcatctaccgaattttgcaacctcctctggcttccgtgtactaggctgtggttctgctgaagctctggtggtgagtgggatcgaaaataaattacgcggtctataaaatcgaagttttagtttatgcgaaaaccatacgagtcgggcgtggcggggcgggtcggggcgtaactggaactatttagatatacaatagatgggtatgcttggttgatagcccgcactaggctcaaaattctttaaaaaatatttgcttttctcaattggattctgctaa

SEQ ID NO: 16413 - protein, 211 aa, DROSOPHILA
MALLTMIARVIDGLPLVGTMQDDEQSGRSILDYQNQAKMLFRKLGTHSPARCSIETGPYLFHYLIENDVCYLVMVDKMYSKRLAFNYLEDLAQEFHANYGRRVNSVTRPYAFIEFDVYIQKAKKQLTDRRRNISNINTQLQDVQRIMVQNIDDVLQRGTVLAELDTKTQNLSMMSQKYKKDAKLLNRKSMYVKAMALGMILLVFIMYFWVL

SEQ ID NO: 16414 - DNA, 4500 bp, DROSOPHILA
tgaatactaatcccagcaagatcatggtggtcacacacaacgtcaagggatacgatgagttcaccaaaaagatggaggaactggagaacggcgacgagccggtccacgtcctcttcagtggcggcaaggacgagaaaggagagagctggtgcccctactgcgtcaagggtgagcatgccgtgatcccaatgcggctaaccgcaacctatccgattcccaaactcatttctcacgtttgcagcggagccggtgatacacgatgcgctgaagaaggccccgggcaactcgcacttcgtgcatgtggatgtgggcgagcgggcatagtaagttaataccgccaaactgaagaaaacagctgcgattagttagataagcaggaattaatatttcatgcactgcgagactgcgaacatctgctggtttctttggttcgaaatagccaaatagtttcaaaacacaggcttagtcatttagaatgacgtacatatatgcatatatcccacgtcattcagttgccaaaaccctttgtcattcgattatcaagttcaaaacattttggcaatgtgaaactagtcactcaaccccaactgtacgatgatgaaataagcactcgagtactttttcacacgccgagaacattcatgataaaaaaaaccattaaacaacgatagctttacaatgctcttgagttgtattcatgccgcctgttatcactgaaccgtggtaagcaataaattaacacttgtttttcactgcagctggaaggatttgaactgccccttccgcaaggatcccaacacgcatctgatcttcttgcccactctgttgcgctggaagcggccacagcgtctggatggcgagcgctgctccaatcaggatctcgtcgagatgatgttcgaggatgaggattaagtcgtataccttacatacatttattttggaactttactcaatttggaatacacagaagacacacacacagattcaattaaagcgtccctcagtaattgctcttgtacttcttgatctccaccatcacgacgtggatattggtcagctgggcgcgggcattgggcgtgaggagcttgtggaatcggtgatagtattgcaccaaactggccaacgcaagctgcagaagctgtgagcccgtcagcaatgagggaaatgagagaagcacctccctgtttagctcctccagagatttcttccaattggccgagaagctggcgaccaaggccagacttcttcgctcctgtttgcgcagctcatccatttgttccttctcgaagaagtgctcgcactccttgacgaactgaataatgcctccgaaatgaggggccaggatctcctcgacatattccgcactgcgggagttgagctgctctctgaatgcctccgcttctttggagttatctcgcgtgtgctccatcaacacgcccaaaaccaaatcgtagttgtttatcaggtagattagctgatcctttcgcgttggaaatattgcggccatgcgaaggataaagcactccacttcattttgcagttccagaagcagtcggctaaccaattcattaggaaaatgctccgagattcccacaatggccgcactgaactctgcgtagcgtcgtgttatctgtaaagtatacgtattatattatgacaaggcgttttgttcaaaagaaatggttaaaagttatctctattggccctctcttgacttttagaatgctatcaacatcgatttaagataatttgtaacccgtactaactttaaatcgtatacttacgtagtgcggtcccaattccttgttgaacttggttggatcacagtcatgtatgctctggatattcaagcggaatactagttcgaaacgtggccatattaccgcctgcagggagtcccagtatctgaaatcaaaacatataaatatccaattgtgaaccaaaatcatcaacgcccatgaatagactcacttatccaatgcgggaacacagcgcttgtggcacattagctgatagcggaaaatgagatggatgcacaggaacatggcaatggtatcaaaacagtcgtgtatggaggtctccagatttttctaggttcaaaaaacagatatgattaatatttcgcaagtaaaaaccattgacttacaatcattagagttagggttttgcccatgatttggttgaacaaatcttgcgcttgagtgccgcgaaccataaagaactccgtgacaaataggtattcccgacaggcattgtccactagggcgtattgctccgaccgaaagagagcttccgctgtgtactgtttaaaatttgagatgtatctcctttgcaagtgtatgtatcacatctcttactcgattctttagctgcgcatgtggcactataattggtgcctccagctgctggttaagtatatcgcctcgctttcctattgtgaaaatggtgctcttgtgctttagactcgtcgtcttggagaataaacctttggatgcattatcttcgatgcccatcagatcgtcctttgtgcaggactcctcgaatttgaggctcgtcaagcgtgtggaataactctgcaagaaagttatgaatttaagaaaattcatgcttccacaactttgaaaaaaaaaccaaccttaaaatagctatagtaaattttgcccatcgtatcgatgtattcactgcatatttcctgcgccacatgccgctcgttggacaggatgaactcgaagaagaatttgtgcttcagcatggcgttctgtggaatctggtagtttgtcatgggcttccggaacttgtaaatctgctccagcagataggagcgaatcttggccatggctttcagtcgaagcttctgcagcacatcgctcacatcgctggtggactttgactctttgaagctgagctccttgaccagcgaaagtttgtgattcagtacattcaactgggtgctgaaatcccgctccgtaaccggggtttccattattatgttgatcatctcctcggacacggccatgtcctcgataaactgggacaattgagccttgaccgactgacgattggtcagttggagggacatggatacggattttctttgcagctgcgtgatctcagtgcttatgttgttcaaaacgctctggaagctcatcagcatattttccatgcgctccaggacatcgtcgcaatcgtttatctgattgtgcaggttggctatattctgcgactccgctatatagtctggtattcaaagggatatcattagagctaagtttgcatatggaacatggtgcttaccctctatggacttattctccacctccttaaactccttttcaatctgtcgtgaatattgccgcagatccgtggtgttctttaggatctcccgcacctcctcgttgtccagttgttccgtcatttgcggggacggcacctcggccatttttgttttccaatttaaaggtatttttcccaattgtttttctcaactaccaacaaaaataaagtatgtcatcaaaacagctgtttttgttatcggagtaagatgtgcttttggaaagaccctaatattggtgatgagaactaaactatgttttcaaaaaaaaaaaagatttcttggttcatataaaaaattacttaactaatacaattttaattaaaattaatttttgggtgaaaattgaaattgaatttaagaccaatttttttcaattattcatttatttgtacacaagcaatcaatgagtttcttttctagtacaacacttgacttgtgcctcttatattctaccaattatacaacatgaacacaaatttatttttaagcaataaaagctaaactatcgccctacccagaacttgcgaattaacagctgttttgactatcgatacacaattggagagtgtgcccccattggcagccatcgagaatagataatatcgaaagtatcgaaatagaagtttacgcgaagagaaggaaacacatagcaaaaaagaacgcaaaaaataaaggttagcgaaatctgtgcgacgaagatgaccagtttccgcaagcgcaccgtgcagaagccaatccgcggcacccgcacctcaccgcacacggcgcaggtgatcacctccagcggaaatccgtacttggacgtggtcattggcggcggtctgcccatgggttcgatctgcctgatcgaggaggatcgcttcatgacgcacgccaaggtgctggccaagtactttctggccgagggtgtgatttccaagcaggagatatttctgggcagcctggacgacattccagccgagatgctgcgccgtctgcccagaccgctgaccgaccaggaatcgatggagcaaagcgaggtgcaagcgctgggagatgctggcgccgaaaatggcctaaggatcgcctggcgatacaatgatctgccgctggtgaattcggaacatgccacagcaaaaatcggacaccatttcaatctgatggaacagatggactccatgatgctc

SEQ ID NO: 16415 - DNA, 2050 bp, DROSOPHILA
tatttttgttggtagttgagaaaaacaattgggaaaaatacctttaaattggaaaacaaaaatggccgaggtgccgtccccgcaaatgacggaacaactggacaacgaggaggtgcgggagatcctaaagaacaccacggatctgcggcaatattcacgacagattgaaaaggagtttaaggaggtggagaataagtccatagaggactatatagcggagtcgcagaatatagccaacctgcacaatcagataaacgattgcgacgatgtcctggagcgcatggaaaatatgctgatgagcttccagagcgttttgaacaacataagcactgagatcacgcagctgcaaagaaaatccgtatccatgtccctccaactgaccaatcgtcagtcggtcaaggctcaattgtcccagtttatcgaggacatggccgtgtccgaggagatgatcaacataataatggaaaccccggttacggagcgggatttcagcacccagttgaatgtactgaatcacaaactttcgctggtcaaggagctcagcttcaaagagtcaaagtccaccagcgatgtgagcgatgtgctgcagaagcttcgactgaaagccatggccaagattcgctcctatctgctggagcagatttacaagttccggaagcccatgacaaactaccagattccacagaacgccatgctgaagcacaaattcttcttcgagttcatcctgtccaacgagcggcatgtggcgcaggaaatatgcagtgaatacatcgatacgatgggcaaaatttactatagctattttaagagttattccacacgcttgacgagcctcaaattcgaggagtcctgcacaaaggacgatctgatgggcatcgaagataatgcatccaaaggtttattctccaagacgacgagtctaaagcacaagagcaccattttcacaataggaaagcgaggcgatatacttaaccagcagctggaggcaccaattatagtgccacatgcgcagctaaagaatcgatacacagcggaagctctctttcggtcggagcaatacgccctagtggacaatgcctgtcgggaatacctatttgtcacggagttctttatggttcgcggcactcaagcgcaagatttgttcaaccaaatcatgggcaaaaccctaactctaatgattaaaaatctggagacctccatacacgactgttttgataccattgccatgttcctgtgcatccatctcattttccgctatcagctaatgtgccacaagcgctgtgttcccgcattggataaatactgggactccctgcaggcggtaatatggccacgtttcgaactagtattccgcttgaatatccagagcatacatgactgtgatccaaccaagttcaacaaggaattgggaccgcactacataacacgacgctacgcagagttcagtgcggccattgtgggaatctcggagcattttcctaatgaattggttagccgactgcttctggaactgcaaaatgaagtggagtgctttatccttcgcatggccgcaatatttccaacgcgaaaggatcagctaatctacctgataaacaactacgatttggttttgggcgtgttgatggagcacacgcgagataactccaaagaagcggaggcattcagagagcagctcaactcccgcagtgcggaatatgtcgaggagatcctggcccctcatttcggaggcattattcagttcgtcaaggagtgcgagcacttcttcgagaaggaacaaatggatgagctgcgcaaacaggagcgaagaagtctggccttggtcgccagcttctcggccaattggaagaaatctctggaggagctaaacagggaggtgcttctctcatttccctcattgctgacgggctcacagcttctgcagcttgcgttggccagtttggtgcaatactatcaccgattccacaagctcctcacgcccaatgcccgcgcccagctgaccaatatccacgtcgtgatggtggagatcaagaagtacaagagcaattactga

SEQ ID NO: 16416 - protein, 662 aa, DROSOPHILA
MAEVPSPQMTEQLDNEEVREILKNTTDLRQYSRQIEKEFKEVENKSIEDYIAESQNIANLHNQINDCDDVLERMENMLMSFQSVLNNISTEITQLQRKSVSMSLQLTNRQSVKAQLSQFIEDMAVSEEMINIIMETPVTERDFSTQLNVLNHKLSLVKELSFKESKSTSDVSDVLQKLRLKAMAKIRSYLLEQIYKFRKPMTNYQIPQNAMLKHKFFFEFILSNERHVAQEICSEYIDTMGKIYYSYFKSYSTRLTSLKFEESCTKDDLMGIEDNASKGLFSKTTSLKHKSTIFTIGKRGDILNQQLEAPIIVPHAQLKNRYTAEALFRSEQYALVDNACREYLFVTEFFMVRGTQAQDLFNQIMGKTLTLMIKNLETSIHDCFDTIAMFLCIHLIFRYQLMCHKRCVPALDKYWDSLQAVIWPRFELVFRLNIQSIHDCDPTKFNKELGPHYITRRYAEFSAAIVGISEHFPNELVSRLLLELQNEVECFILRMAAIFPTRKDQLIYLINNYDLVLGVLMEHTRDNSKEAEAFREQLNSRSAEYVEEILAPHFGGIIQFVKECEHFFEKEQMDELRKQERRSLALVASFSANWKKSLEELNREVLLSFPSLLTGSQLLQLALASLVQYYHRFHKLLTPNARAQLTNIHVVMVEIKKYKSNY

SEQ ID NO: 16417 - DNA, 3644 bp, DROSOPHILA
agcctgaaatgtatgtatgaaatatttatgctctaagacaatcaactctgctatcaaatatttcaattagaaaaaaaaaacttataaaaattcaaataaaaataaaggaagtttgattaaagaaatattattgttttaaatcaatatttattttatttaaatttttattgttaaatccattcccacatttttataagaaatcttaaccccactttctttccaattccagttaccaatcctggctgcagcggcttattagccatgcagaccatgttccttcgggccattctaagccacataaggccctcgaatttgccagctgactgtattccaaatctcagaccacacaaaatcgctccagacggatacgtggggcgaaaatgccgcatcaccagaggagctgcaggagtagtagtatttgaaacccctccaatttccctgcccttcagttgtctagacgcaaaacccatttctatcccaccaaaaaaaaaaaaaaaaaaaattgttctcgttgcgcaaatgttgcattatagactacgagtagagttccatggtggaagcaagtgtggcagatgagaatgggggcttcgagtttagatataagaacagccgttaccaaagtaggaaaacttattaaaaatttacagccccaattttagctgtcagcaatgtaaatttctcagcttgaatttaaatggcattctaatttttgctctcttcttgaaattttgttttaattattttaaagaaaacatgtgttttgtgcatttttttttagaagcattcattacaatttactgtaaattcttaaacatatttgtggcattgcatgccacgacctcgtgttgcgtggcaatttgatgaatgtgctccttgattaaccctgatcccgggtcaaacctcctcgaggtgggcctgaaaatcagtggtaagacctttgcatgcagctggaaaattttagaggcaagcaaagtttgcataataaataaaggcgataagaatgctgtccggctttgtttatgtttatgtttctttgccttttatttttatggaatacctaggggcgttcgaagggaaacttttgtgggtggcaaatactttttgcgcctcgaatcagatcccaaatgcctcgagctgtggccagagttgtcgtggctttgaagatttccgcacagaatgccttttgtttcggtgctatcggaaaaagtcaagggtcaaattggcctttgaacttttgttaaacctgccgtacggagttttagccagtcagtcaaatgatgtgaaacaagtcgggtcaattttctgtacacaaaaccaaacaaaacaccgtaaactcaaattttcgacctgcaaaatggaagagaccgaaattctgaaaaatcaaaatgtgccacaaacagacaagatgaaagcagcaagtgcacatagtgaacacaacgagctgcattttatgaatcactcatattcagaagattctaaagaatcacttggccaaatgagtcttgagcaaaataagttcagcgcggtcaagaatcttacgaaacagcaatcacatctgcacaattcggaagaaagtcgagcacaggaaaatacaaacgaaataactaggaaacccgcagaaactgaaaaaaagcgggacatttccagtaacgagaaagaaacgaaatattttgttttaaacaattctaatgaatcaaaggaacaataccaggcagaagcaaagatagaaaggaacaaatgcaaagagttaattattgacaagatctctgatgaaactatctccccgaaaactaaggcacaaagtcaaatgaagttaaatgatgccgtttctgataaaacgcttaccattgagaatgcccgaaaatcaaagcaattaattgcagaagaaacgttaaatagtcccaaagaagaaagctcaaatgtcgtggaaaatttaccaagctcaccagaaaaaccagtaaaggaagaagttcaagaagccaaggaacaggataccatcataccgcaatccgaggaagtgaaaatcgaaaaactggatcaaatggaggcaagtacttcatcggcagctcaggaggcggaaatgaaaaagccaaacgaagtgatgcctggcaaagaggaatacattgacccaagggaaaaaatcaggaaggacatggaagaatattttagtggcattcaggctctggaggtcaagaagacaattcgcgacgagctgagtgcaaaggaaggtgaagtcattttaagagaggatcagcgaaagaaaacctggaagggaatgcttctatcagtgacccacacaaccttatctacatctacgtaagcatatatggtttataccatatggcatataatacttcaacttatatttctttacagtagtcacagcacatcttcgggtaagccgccaaaatccgccgtacaagccataccacagcgcaccgccaaggcggacttcaaaaggaaaatgtatgtccttaaggagaactacaattatcgattggagctgctaaagcagctgaaaaatgacatgaaaaacaactacaaaagcgaggcccagcaactgtatatccactatcactccattaagaaccagacgttaaatagcccccctttaaaagagatgctagacgcaaaagaggaataagtggatccaccaccaaagataggataatatcacaccatcagtttctagatcgttgctccatctagcacagactcacacaaaagtaatgatcaaaattaactaaacacactacatttatctacaatgaaaggattgttattcctgctactgctgctacttactgctcactacactacacactcagtacaagcacaatttttacaacatacaccctacttcattttctaaaaaatatccacaaaagtgttgccgggctttccaaatctagaagaatataatataacctagaacccgagccccgaaatcatagctacgaagtgggacgacctgccgaaagggggattcaatgggactgtacctcttgcattcattgtgtgcacttgcttctttgcatcttgaagaagtgcatctgtatctcatttactgagcttccatggtacagtcaccactctgaacgccccgcggtatgcaacagtatttctgtgctttgtatatgccacaaaccttaaattttcgccacttctgttttgcatgtcgaaataaaagcaaagacaatgagaattgacccaaatacctggctctattgtaattttgctcctttggtattgtaatttatggactgcgaaagtgatggtggtggggcttttttggggtcgcagcagccaagagaaaagtggagcagcgaagtgaacaaaaggtgtccgttggtattcacttcatattgttccactggctttaaaatttaattcagcaggaaagttgtacagtaatactgaaacttgagggatacttgaactgggagtttcacatgatttttccgcttaaggaaaactttaaactttccaaataccaaagaattgatcgccatggtggtgagtgggaatcgctccacgggcggctaatccgttcaaagctgccaaaaatctgcgtcgtttttcttcgatgtgacgcacaaaacgtagatggtccggatgaggaggaagaggagaagctgggctca

SEQ ID NO: 16418 - DNA, 1584 bp, DROSOPHILA
atgctgtccggctttgtttatgtttatgtttctttgccttttatttttatggaatacctaggggcgttcgaagggaaacttttgtgggtggcaaatactttttgcgcctcgaatcagatcccaaatgcctcgagctgtggccagagttgtcgtggctttgaagatttccgcacagaatgccttttgtttcggtgctatcggaaaaagtcaagggtcaaattggcctttgaacttttgttaaacctgccgtacggagttttagccagtcagtcaaatgatgtgaaacaagtcgggtcaattttctgtacacaaaaccaaacaaaacaccgtaaactcaaattttcgacctgcaaaatggaagagaccgaaattctgaaaaatcaaaatgtgccacaaacagacaagatgaaagcagcaagtgcacatagtgaacacaacgagctgcattttatgaatcactcatattcagaagattctaaagaatcacttggccaaatgagtcttgagcaaaataagttcagcgcggtcaagaatcttacgaaacagcaatcacatctgcacaattcggaagaaagtcgagcacaggaaaatacaaacgaaataactaggaaacccgcagaaactgaaaaaaagcgggacatttccagtaacgagaaagaaacgaaatattttgttttaaacaattctaatgaatcaaaggaacaataccaggcagaagcaaagatagaaaggaacaaatgcaaagagttaattattgacaagatctctgatgaaactatctccccgaaaactaaggcacaaagtcaaatgaagttaaatgatgccgtttctgataaaacgcttaccattgagaatgcccgaaaatcaaagcaattaattgcagaagaaacgttaaatagtcccaaagaagaaagctcaaatgtcgtggaaaatttaccaagctcaccagaaaaaccagtaaaggaagaagttcaagaagccaaggaacaggataccatcataccgcaatccgaggaagtgaaaatcgaaaaactggatcaaatggaggcaagtacttcatcggcagctcaggaggcggaaatgaaaaagccaaacgaagtgatgcctggcaaagaggaatacattgacccaagggaaaaaatcaggaaggacatggaagaatattttagtggcattcaggctctggaggtcaagaagacaattcgcgacgagctgagtgcaaaggaaggtgaagtcattttaagagaggatcagcgaaagaaaacctggaagggaatgcttctatcagtgacccacacaaccttatctacatctactagtcacagcacatcttcgggtaagccgccaaaatccgccgtacaagccataccacagcgcaccgccaaggcggacttcaaaaggaaaatgtatgtccttaaggagaactacaattatcgattggagctgctaaagcagctgaaaaatgacatgaaaaacaactacaaaagcgaggcccagcaactgtatatccactatcactccattaagaaccagacgttaaatagcccccctttaaaagagatgctagacgcaaaagaggaataa

SEQ ID NO: 16419 - protein, 409 aa, DROSOPHILA
MEETEILKNQNVPQTDKMKAASAHSEHNELHFMNHSYSEDSKESLGQMSLEQNKFSAVKNLTKQQSHLHNSEESRAQENTNEITRKPAETEKKRDISSNEKETKYFVLNNSNESKEQYQAEAKIERNKCKELIIDKISDETISPKTKAQSQMKLNDAVSDKTLTIENARKSKQLIAEETLNSPKEESSNVVENLPSSPEKPVKEEVQEAKEQDTIIPQSEEVKIEKLDQMEASTSSAAQEAEMKKPNEVMPGKEEYIDPREKIRKDMEEYFSGIQALEVKKTIRDELSAKEGEVILREDQRKKTWKGMLLSVTHTTLSTSTSHSTSSGKPPKSAVQAIPQRTAKADFKRKMYVLKENYNYRLELLKQLKNDMKNNYKSEAQQLYIHYHSIKNQTLNSPPLKEMLDAKEE

SEQ ID NO: 16420 - DNA, 2561 bp, DROSOPHILA
taatatttgaaaattgaacatttggcgctgcacttgagaaatgcttagaccaggccatgatgatgaagtttataaaactcttgaccacatttgccgcacccgtcgcctcgccactcccctcccgttttgaaaagtctttccttttcgttgccttccactttggacatgtctggccagctgacgtcggaaaatgtggttagagaagaggtccgaatggatcggggttggggatttggagatggtgatggggatggggatggggtatatggaatgcattgcacttgactttagcgccacttgtaagtgtaaattttatttgagccagcgaagtaggtacacatgtagacactcacattcaacagccatgccctttgtcaagagagctccacatccaaagtgcctggccagcgatattggcgttcgcactcgtacttggtctgggacttggaaacattttcgacttggtcttggattcggctggggagcagtggtttcggttccgtagccggttttttggaccggagtttggcgtcgtgtcgttgacagctaagtggtgataatcgctttggaattgaatctgagcaagtacattcacaggcagacgaagttaaaattcaaaaatgcaacagactaaagatgcaagagttttggtcaatggccatcggacaaaaggcgtcactcgctttgccttggtctgtctcaatttttgggtgggcgtttgggcctttgtgttttggttgcggctttactagctactacggtttctttggctggttactgtggctttaatttggtgaactgaatttgcagcatcacgaagcgaatgggcttgatttaaataaatgcttaaagtcataaaattatgacttgagatggtaaatggaattaagttcgtgaaaagcacttgcttgtgatgaagaagtaagtgtaagtgtccatttcaaatcctagcaaacaaattgagtttcttctcgtctaaattcttgataatatattcaagttggttttcaatgctctctggtgtttttattttcaatcaataaacaagcatttttatcattattaattaatacgatccatgccagcgagttcagcaatatcattacagttcatgcgtcgattagaacctgatggcaaatgagatggtaggtaaataattataagtatatagtaatgcattcttctacaatatatacaacttacccaagcagttcagcctggtcagctcacaacgtcctacattcctccaacgccaattgttccgagtcttagttctgcactcttgattgaggacgggcaggttacgatcagctgcattattcaatgtttccacacagcgttcacatctccgggtcaactcgtcgcagttccgattttgtccagccaccaagaccacaagcaggactttaagccagaattgaagctaattattgtggatcattgctacacacagttaaaagtcctagtacttaccagaaaatagggtcacaactgctgtagtatgcataatttaagtattaaactttttggctgttgactggaacttatcagttaggtaactaccgaagactttgacagaacctgactttatataaacactataaccaatgcgtaagcagatgtttcacaacaaaaggtaaaagttaaaaatatgaaacaaaagcttaacaaaattgttataaaccctattcaaacccttaataaaaactggaccatcttttgagcgcattgaagggcattatgacaataacttccttgtttaaataaagggcttaatggataaaagcaacgtggttcttattccgaaggctgtcaagcactttataaaagcccaagaccgaagcacacttatcactgaagtcaaacaagttgtcagtagcagtaccaacatgtcgaaaattactctcatttttggtaaggatatagaccgctataccataaaagattattaacccttatgataactattttagctattctctgcctttgcgtggctgttcaggctcaaactcgtgaacaagaaatttgccgtcaagaaaacgaaacttgccgtcgaaatgaacggagattgggagttcaaaatgatgtttcgaccacatttaataatcactgccgccgccagtcaggcattcgaaactggcgaaatgtctctcgttgcgaattgtctctggctacttgtcgatgtaagtatctgatttgaaataactatatttcatataaaaatataatattttattatcaaactactatcgatttaacagtgacactcgagcgttgtgctgttataaactgcaaaaatgtgagaaacagcattgatggtggggtcaccgctcgccctccaacttcaaggaggacaacccggcgaattcctgacacccgacgacctcgaactactcgtaggaccccaactacccgtcgtgctccaactactagatcttctcgtagaactacacgtcgtcgtgctccaacaactagaactactcgaagaactacacgtcgtcgtgcgccaactactagaactacgactcgtcgacctactgaagaataactcctagaaccat

SEQ ID NO: 16421 - DNA, 416 bp, DROSOPHILA
agttacctaactgataagttccagtcaacagccaaaaagtttaatacttaaattatgcatactacagcagttgtgaccctattttctgtcctgcttgtggtcttggtggctggacaaaatcggaactgcgacgagttgacccggagatgtgaacgctgtgtggaaacattgaataatgcagctgatcgtaacctgcccgtcctcaatcaagagtgcagaactaagactcggaacaattggcgttggaggaatgtaggacgttgtgagctgaccaggctgaactgcttgggttctaatcgacgcatgaactgtaatgatattgctgaactcgctggcatggatcgtattaattaataatgataaaaatgcttgtttattgattgaaaataaaaacaccagagagcattgaaaaccaa

SEQ ID NO: 16422 - protein, 99 aa, DROSOPHILA
MHTTAVVTLFSVLLVVLVAGQNRNCDELTRRCERCVETLNNAADRNLPVLNQECRTKTRNNWRWRNVGRCELTRLNCLGSNRRMNCNDIAELAGMDRIN

SEQ ID NO: 16423 - DNA, 3228 bp, DROSOPHILA
gtttcgcatacttcaatattttgtgaatgaagtctttgggagcattattttgaatgaggatgaccccacttaccccgtatcacccaggccgtgcatgaagatcagctgcaatacacaagtgattagtcgagggcttccggaatttggactacggcggactactcaccgtggcggtttgcttgaccgtggcctcgacaatgaccggcgcagccatgtctgctgttcagtttagcctctactggggacgcactattcctattccaggtactctgcgattcggcgacttggcgctgctttcgtcgcttttttcggtgtcagcggatttctgcaatgcagtgaaaaagaaacactttgtagtttgcgttttagttatgtcacgttgtaaacgcaaagcaaaattagtaatattgattttacgattgcgaaaatgacaacacgtcgccggctgagaaatggttactagctaactagatctaatcttcgccacttgtcttatgtacactttgcgcgaatgaggctctaatcatttaccaggtaataccacaagtattgtgttaatttgtttaaattcgctcaactacgacaattcatgcagctgcgttccaaaaagttcagagatgagtgatagtcggtggacctagagatgtgaccgaaaccgattccgctgtcgatacatcggttcgagcacaaaaatcgatatatatcaattccaaagttcgattaagtttaaaaagtggtattagtttaaaaccgttgaaaaataaacatatttataaccaaaaattatattattagttcataagttgatttgaaacatataggtttcgaaaaaccaaacaaaattataaccaaatagaattgaaggtactttaaattcaaagtcttcaggtcttatactcatcgttggtgccctccattcacatgccccatccagtaaactaatacactgattaaattggattcttttactcttaaaaattcacaataattacaaaatgcactaaagggacactgaggggaatggattttgcttcgacacgaccagtttgttgtgagcatgtgagatgtaccccttaatctttccatcgtaaatgagattggccacgatgcagtgcgtctcgtccagagaaacatcggttaagccaacgaaatgcaaggcggagaggaagtcacccatgtccaactgatgcgatttccggatgacgaacaccttcttgaacaggttgcgatacacgaggaacttgagcttctccaccagcagatagataccactcctgatcagcaccagctcctggtccctgacaatctcatcaaagcgattcacattgccagccttcatggccatagccagatcgagaaacagcaggagatcgtagcgctgcagtaaggatttgctgggcagatatcccagcagcatcttcactggcaccaaatagatgaggatgagcctcttgttgctggcaaaccgatccgggcagttgctaaaggcatacgacagatactgtacggctgcctggtagttggagtcgaacatagcccgtctacctacaaaatacttgtaggtaatttgctccggcagcggaaaagaatccttgaagatgcaattatcgatggcacggataaggggcttgcacagatgcaacttgttgattcgaaaataaatcttgaatagctggtttacgaggttcatcatgcccagacgcttggtgtcctcctctgaagctcgtccatcagcggcacaaacgcggaaacaggccattatgcagtcggcagccttctccaatacgtggccaggtgtgaatccttgacaatgcttctcgcaggcctgcgccaagtaccttagatccaggcacacgcggtacattagtggcaggcaccaattctcgtccttcagctgctgcaaaagcctcacaacggctccgcaggctgccgactgttgggtgtaggcttccatgtaaccaggaggctcctgtgccaggtgatacagcaccttcaggtgggcggacacaacttcgtccagtggcggtttcaggaatcgatccaccaacttttccggctgggcaatgtacaaattgtggttctgaacgtgcacgtctcgtaaggagagatacgtggccaaggactcgccatctaaatcctgggcggcgtgcaaaacgccggataaatagttatttacggtgccgaacattgtttgtgtttttcgcaggcggcaaaattagagatggtaggtcaggcactatctgcgaatgcgatgttttcatcggaaacttctatcgattgtctttgttttttataacgcgataatacaaagaatattttttcaaaagttttttttttaacattttattttattttattaaaaaaaggtatttatttacattatactcggtttataaaataaaactctgaacgcagaaaaagagttttttgttttaaattttaaaatttccctctgcagcgaatcgattatattccgcgaaggtcttttgcttgcccaaaagattctaaatttaaacaattttcgtacatatagttgtgatagcagagctgtcacaagacatgctgtttctagccagtttaataggcctttgagtatagttcacttagtaaattacaaattaaagctttccaaaaacgaagccagtgcaacaacatatttcacaaggagcaaaaggattcaaacatgtcgacaccgaattttctcttgagcaatggtaaaaatatgcctatgttgggtctcggaacttggcgggtaagtacttttacatagatatatattgttattaaataatagccagctgaaatgtgcatttccactgcatatttcacggtcaatgtcaaagctcttcggggtcaagcaaaagcttttgatgcacctcagctttttacgttttattcgccattttagagcccgccggaagtggtgacccaagcagtaaaggatgctattgatataggctatcgccattttgactgcgctcatatctatggcaatgaggcgcaagtgggagctgctctccgggagaaaatggacgagggagtggtcacacggtaagtgctgctttcaggcctaatcaatcgtttatctaagccataaatacatattgcactgcagagatgaactcttcatcacgagcaaactttggaacacacaccacaagccggatttggtgcgcccggcatgtgagacaagcataaggaacttgggagtcaagtacctaaacctct

SEQ ID NO: 16424 - DNA, 1228 bp, DROSOPHILA
ctaccatctctaattttgccgcctgcgaaaaacacaaacaatgttcggcaccgtaaataactatttatccggcgttttgcacgccgcccaggatttagatggcgagtccttggccacgtatctctccttacgagacgtgcacgttcagaaccacaatttgtacattgcccagccggaaaagttggtggatcgattcctgaaaccgccactggacgaagttgtgtccgcccacctgaaggtgctgtatcacctggcacaggagcctcctggttacatggaagcctacacccaacagtcggcagcctgcggagccgttgtgaggcttttgcagcagctgaaggacgagaattggtgcctgccactaatgtaccgcgtgtgcctggatctaaggtacttggcgcaggcctgcgagaagcattgtcaaggattcacacctggccacgtattggagaaggctgccgactgcataatggcctgtttccgcgtttgtgccgctgatggacgagcttcagaggaggacaccaagcgtctgggcatgatgaacctcgtaaaccagctattcaagatttattttcgaatcaacaagttgcatctgtgcaagccccttatccgtgccatcgataattgcatcttcaaggattcttttccgctgccggagcaaattacctacaagtattttgtaggtagacgggctatgttcgactccaactaccaggcagccgtacagtatctgtcgtatgcctttagcaactgcccggatcggtttgccagcaacaagaggctcatcctcatctatttggtgccagtgaagatgctgctgggatatctgcccagcaaatccttactgcagcgctacgatctcctgctgtttctcgatctggctatggccatgaaggctggcaatgtgaatcgctttgatgagattgtcagggaccaggagctggtgctgatcaggagtggtatctatctgctggtggagaagctcaagttcctcgtgtatcgcaacctgttcaagaaggtgttcgtcatccggaaatcgcatcagttggacatgggtgacttcctctccgccttgcatttcgttggcttaaccgatgtttctctggacgagacgcactgcatcgtggccaatctcatttacgatggaaagattaaggggtacatctcacatgctcacaacaaactggtcgtgtcgaagcaaaatccattcccctcagtgtccctttag

SEQ ID NO: 16425 - protein, 395 aa, DROSOPHILA
MFGTVNNYLSGVLHAAQDLDGESLATYLSLRDVHVQNHNLYIAQPEKLVDRFLKPPLDEVVSAHLKVLYHLAQEPPGYMEAYTQQSAACGAVVRLLQQLKDENWCLPLMYRVCLDLRYLAQACEKHCQGFTPGHVLEKAADCIMACFRVCAADGRASEEDTKRLGMMNLVNQLFKIYFRINKLHLCKPLIRAIDNCIFKDSFPLPEQITYKYFVGRRAMFDSNYQAAVQYLSYAFSNCPDRFASNKRLILIYLVPVKMLLGYLPSKSLLQRYDLLLFLDLAMAMKAGNVNRFDEIVRDQELVLIRSGIYLLVEKLKFLVYRNLFKKVFVIRKSHQLDMGDFLSALHFVGLTDVSLDETHCIVANLIYDGKIKGYISHAHNKLVVSKQNPFPSVSL

SEQ ID NO: 16426 - DNA, 2837 bp, DROSOPHILA
ccacgcaccattggtaactttctggactccagcgaagcgcagatctttctcatgcaactgccagatgtgttgccatgtgtgggcgacgattccgaagatccggaaccgtctaaaggagatcatcaggccaccagtgaatcggaaccagcaagtcctgcagacaaatgctcaaacggacccaagggcagtgtactacggcagctggaagaagggcagatcggcaagattctgaggtacaaatccggtcgcgttaaactccaattgggggacacacgctttgacttggatatgggtctcgatccgggttttctgcaggaactcatgtctgtaaccgccaatcgcgagcaacgtagtggaaacatgatcaacttgggacccattcaagccaaactaaaggccactccagattgggtgcaccttttccagcagcaggatgcggcatccaagcgaacgaatccagtaccgggcacgtagcacccacttccccatggtagatatgtaatatagtaaataggctgcgcctaagcttaagttattcctattctaaatgccgtatataaaagttaaatatagaaatttttataatacaaatgcttttcaaaaggttattaacaattgtactcgaatatggaacataaaagagactccaagaaagatgggcttggaacttggggatatgtaacgtaaattaagccatcaatacttaatgcaatgacccaagattaatttttaggttaatggattgttgatatattatatgttcaaattaagtgattattataatttcaaatacggtcttaaaatttgaaaagtattctagttctagcaaatcgctttacaatagctaggttatccaattcctattcttttgcgcaaatcaaatatacttaagtgtgttgtttattgtgcagaaaaataaaaaaaaacacggactttcaactttggttagaaacctataaaaagcattttaatgtaacaacaaactaagacactgcattaattaattactcaaaacttgctggttgggttcgggagtggcgtccgggagctgagaggtgcttcgtccgtggtaaagattaccggccatatcgatggcgaaattgtggtccacgggattggccaacgctgtctcaatggctgcatccaagttttccctagtgatatagttcttggaacgctcaatctcgagcagcacccgctggttggcctgctccttgcgctcctcctcgcgcagctgttgtgcctccaatcgctcctgaatataggccaccttttcctcacgcttcttggccaatcgctgatcacgctccttggctatggcagcgttccaggcagcattggcatccaggcatttctggaactcggcctcctcctgctcgggagtgagcacgatgtgatctgctgtggatgtttcctcgtggcggacgacttcctcccttagaaactgacgcactgagcgaagctgcgttctgaaatcaaggcgtagattgttttgtataacgtcttttgaaaccgattacaaattatctttgaccagagacagaatctggcgctggtgcacgcacttgtactggttgtgtagcctcatgagctccgtgcgctcctcctccgactgcttcttgcgttcaggcacgcggaacatcttgctcttggccaccggcagccatcgcggtttcctgcgccagcggacgaactcgagggcgaaactatttccgaccgtcttcccggtgggcagggtggactgcgtcagcagctggcatcccgctcgcagcattataaaagcagtttaattaacaaaatgtaatttttactttgccgctgctgaactgttgtgcaactctgttgtcggtgaactggttccgcgcagttcgattgctggttccgtcagtgatgaccaatatggaaaatcgaagaatcaaggaataaatcaatcttaacaaatcaaattcagatagaaaggcaatagtaatttggttgtcaacttactaaatttattgtcgtacatattcatattaaaatataattatatactcagctacatagatatatttttaggtacagcttaattttgcgttgctaacaagtttttgcaattaaattgcgcaggttatgaatgttttttatttgtccaaagatacaagctttgaagtccagacagatctgttgtgaaaatagccaaacttccaacgcactagtgcgtttctcacaattgcgctgcgctcagctcgggcttaaaagcttttggccaggtgaacttgacgggaaggtacgaaaagtaactgctcactcagtcgacgatatatcgccgcgctggccgcattaaaatccgagctacggaacttcgctgtttcgcctcttgtacgtgggctaacttaaaacaaaagtggcttgcgcagccggcgcgccttgaaagtgtgtgtgtgttcgtgtttaaaaaaatagtgtgcgttattgaaaagctaagtcagttagaagcagtgtggaaagtgcatattgtatatatctcttgccaaggctaaaagtgttaaaagttaactcccagaaatgcacacacgcataccgatgcaagcgaaaagttaaagcgacgatcattcattactgcgtcttcttcttattcatctgctctttgcgacgtgtttcgcttacctgtccaaaaagcccgagtattggtgggctccacagctccatagctccctctctctctcgctctctttcgatttgcacatgcaaaaaggcagcagcagcaagaacaacaacaaaaactccatctgagagctttaaagccgaagttctcgacgcagacgtcggcgggagcagagcttcagcagcgcagcggc

SEQ ID NO: 16427 - DNA, 741 bp, DROSOPHILA
ttgcacaacagttcagcagcggcaaagtaaaaattacattttgttaattaaactgcttttataatgctgcgagcgggatgccagctgctgacgcagtccaccctgcccaccgggaagacggtcggaaatagtttcgccctcgagttcgtccgctggcgcaggaaaccgcgatggctgccggtggccaagagcaagatgttccgcgtgcctgaacgcaagaagcagtcggaggaggagcgcacggagctcatgaggctacacaaccagtacaaaacgcagcttcgctcagtgcgtcagtttctaagggaggaagtcgtccgccacgaggaaacatccacagcagatcacatcgtgctcactcccgagcaggaggaggccgagttccagaaatgcctggatgccaatgctgcctggaacgctgccatagccaaggagcgtgatcagcgattggccaagaagcgtgaggaaaaggtggcctatattcaggagcgattggaggcacaacagctgcgcgaggaggagcgcaaggagcaggccaaccagcgggtgctgctcgagattgagcgttccaagaactatatcactagggaaaacttggatgcagccattgagacagcgttggccaatcccgtggaccacaatttcgccatcgatatggccggtaatctttaccacggacgaagcacctctcagctcccggacgccactcccgaacccaaccagcaagttttgagtaattaa

SEQ ID NO: 16428 - protein, 225 aa, DROSOPHILA
MLRAGCQLLTQSTLPTGKTVGNSFALEFVRWRRKPRWLPVAKSKMFRVPERKKQSEEERTELMRLHNQYKTQLRSVRQFLREEVVRHEETSTADHIVLTPEQEEAEFQKCLDANAAWNAAIAKERDQRLAKKREEKVAYIQERLEAQQLREEERKEQANQRVLLEIERSKNYITRENLDAAIETALANPVDHNFAIDMAGNLYHGRSTSQLPDATPEPNQQVLSN

SEQ ID NO: 16429 - DNA, 15676 bp, DROSOPHILA
cggtgttcgtagttagtggggtatactataatcgtgcagatatataatttataattataatttaagcagataaatctacaataaaatattcgaaagatgttatgtagatttacttttcttagaagtatgattttaatagctagaaagaacgtaactttttatagattgagattgagatttgaatactactccggcgaaaacaaaaacaaagtacttactacttactccgatgtatgatatttttatggataggtaacttattgtcgcaacgttcggcatcggttctaacttgttgttgctgctgtccgatgttgctgatgtctgctatgtgtctttggcccagtgcattaccctttgccacactttacacgcttgcattcttttgagttctttatttcttttgtgctcctcgtggagttctgtcttaattatctgtaattgattacatctaagcgggcgccctaagtgccgattgtttacctagaaattaaacgcgccgaacaacaaatacagtgcgtaaacaaataaaaacaaagcgtgtgtctgaaagaaaaataacctttgcgatgataggatcctcaaaaataaaagccgaagatgatgcagcagatgcaggttttgtattgatacataacaatgctcttaagtgctcgaaaacactttctctttgagtttggctcactctgaatttcgcgttgctctttattcagccagctgaatgaaaaatactcactcaatattttaattaacaggaaaaggtttcggttttgcaagatatactataataagtcaataattctattgaaatataaagatttagtaatataaaataagttcaacttataatgttgatattaaaacgtatctgaaaatccatagaataccaagtttctttgctgacttttactcagcgctcacatgactcatgtcaatcgagcgctagcagctgcgagggctagcagttagccgctagccagtttcactcgatttccgctctcgctcagcgattcgctctccgtaaatgtatcttttctctctcgctaaatctatcgcattcagcgaaactcgacaatctgctcgcagctgttggactctcgctggctttattttcctttagttgtttaacaattgcagagccgcgtacaacgcgataacgctttggtggaattatttttttcctcgtatctctagtactgaaagtgtatctgcaagatacacgtatattcttcagcctagcgcacgtgtctcaatattttgtaagcaaatatatacataacaaaatacaacaagaaaccgagtgttcaagggcctcaaacaaagagcagattctgcgtcatctgatcccgggcagctgaatcacttcacaacctttattctccatccgagtgctttagtgtctgtgaattgcaattgtgtgctgcggagacgcgcttcgatcgcgttctacattttcggttcgctataaattaagctgctcgcactacgaaaaaaaaaaaaataaacccaagagatcgcatatctctctttttgcatactaaataaatcaataaaaagatatctagtttctgacgcccaggtattacgaaaccccggcactaaaagtgaaattttaaacgcaacaacccgaaagtcccccatagcaaaatcgaaaaatatttatctccgtgtgttggcaaaaaaaaagaaaagaaaagaaaatgaaaagtgacttgtgaccgtatcagagaaatcaaatgattccaccttcggaaatatcagtaaattaaaccaaaataaacccacttagacatcgcagctcattcatttggattaatcaattttaattttcggccaaccaaccaacaggcatgctatatagcgatttcaacattctagccgagacccgttttaaatgagatttaactagataaatggtgcgtatcttcatattccatatagttcgtataacccaaatgcgctttgataaatggaacttcttccacatgagttttctcaaacggaagtcgaaatcactgtaaaccgatttcataaccgattgatttaaaagttggtgcatttccttcacaaaacggcttacactgtaataaatcaagttaccattttactaaaatactgtgataatgtatatctttgaataatattaggttattatatatatatatatttatgtacacctacattattatattagttactatactcatttcttataaagtataccataaaaactaaaattcctatcgatatttcagtatagatatcaaaacatacatatatattaattaagatagtatattactgcattcgtaacttataaatgcttgttatttaattgtgtttaataacattaaataatgtttctgtgttgaaggcttgagttcaagcacctctgttgcacccgcattcccgtcataaccttgcccaacacgaattatttactgatcccataccaccaccctactttgttaatgtacattttttttgcaatgcactttcctttccctacccccttgtaaccttgtgcatttacttaactaattacatagacaagcttcaatatgaccaagacagcgcttttttcgcccctcctagcatctcccactatgtttatcttgttaattaagaatataactaactagtggttaatttttaattgttactagacggtaatttgtatgcaagcccaatgctgggacttcgtttagagatcttaagagactgttattattattatagccgggttctattcgttcgactcacttgtgtcattcatttcgaattgattatgcacggtcttgactcggttgaaagcacacccctctagttgttttatataccatattattcaacttgtggcatttccatgcgggctctcttgttttttttttttgtttaacttccccggctaagtcggtttcgctatatagcaattattattgtataccactcacttcatatctgtgaaactttgtatgggtactatgtgtgtgtgcttttggcttctttgtttaacttttgcactgctctgttggcatttttaattgttttgagtgcgttttgtaccctttttatgttattgtttgattcaggcattttacgttttttttttgttcagtgaaatttgtcgccaaagctttgtttaattcatatttccagctaaattaaaaaacttaacgtgtcacaaccaaacgttggctaattaagttctcaaaccaattgcctttctttttcaatgttttattttttatttttcaagctctgctttgacttttgtttttttttttcgttgataattgcttcatctggaaatataaaaaaaaaagggaagcacaaaatggagagaaaagctaattggaaacatttttttaattgatatagcattccaaaaaatgtctaaaatttcaaaacacgcctttattaatttgcgatatgtcaaaagagaacgtttcttacgccattattacacccttgacacaataacaattgtatcttcgcacttgaatcatacaccttcttcacgcctttttagtaagattagttctttgcctaactcttcgcggctgcttacaattttcgagcttgatcgttttgcacttcttaagttttgttattttgcagttttcaagttttactgtcttacatttttctaattttacagtcttgcagtttttgcgttttacggtcttgcagttttcgagtacaatatcgcaggactttgccaactctttactgtgtttgaccacagtttttggctgagccttttctatattgaagatcctaggatattctttcttcggaatataattatccttttcggatgtcctcgaaattttgactactctgcacttattcttctttgggccttgttttttaagtttgttgcagtttggtgctttatcgtcttctttcttatggcttaaactattatttttttttagttctgccttctttttcatctcagcttccgctcgagcttgtctttgttttttcagctgtaagcacttcaaggcctcgtcgtccttattgggacattcttttgatttttttgaacagagatattcattttcttctgccattaccaaatcttgactccgctgtaaacatttccagacttccttgtggttaggacgatctttctttgagctggaaccatcctttttatcggacttcgaggttttatcgtcttttttcttacggttaaaactatccttaagggtcccattgttttttctaggatcttccgcttttttaagtttttccgtctgtttcatcatagcttccgattgagcttgtctttcattcttcaaatgtaagcacttcaatgccacgttgtggcagagattttcattttctttgttcattacagaatcttcaccccgtttctgctgaatttcattttctagttgtaaacatttcgaaacttcttcgtccttaggaaattctttctttgaactggtaccatctttttcatcggactttatagatatttcagacttactgctctttggatttggacaggatttatttacagacatttccttgcatcgctgcttcctggccaactttcggcagcgttcttcttctcgctctgcctcagttggctgtgcaaaagtgaacagcctgaaggtgagcttgtctgccgacatggcattgaccagcaccaaagttcccctttggcctgccttcaggatgtccaacttggccaatatctttaagcccgattgcatgatgcgacagtagtttacgctgccataaaccatttccttgacaaggagtggataaacgccacgaaaaagcaaggattgagcggcctcatgtgggcagcctgtgagcaacacgataggacacggcggcctcatttgactgaccatctgggacacaatggagcacggactggccaccactattgcctgagcctgactcaccgttgccgcttctgcaattgccgtgcttaccgccgagatgtgatcggcggcgttgatccggacttcgctcttgaggttgttctgaatgctctcgtaccataaaaccgactcgactttggcgcatattctggccatgcactgcacacattgcaccgggtacttacccttggccgtttcatctgacaacacaagggcatcacaaccatccaagattgcgtttgccacatcagaggattcggcgcgagtgggacgtggcttggttatcatcgaattcatcatttgattggcacagatcacaggctttccaaccttgttgcacttggccacaatcgatttctgggccagcggtacagcctccagtgctatttcgttgcccatattcccaagggccaccattatgccatcggattcgcggattatctcatctatgttcgccagagcctgttgactttcgatcttggaaatgatctttatgtgctcacttgatggacaggcacccagtgcctggcgaatttctttcaaagctttggcatcgcggatgaacgatgcgaagatcatgtcaaccttttgatccgctccaaacttgagatccagtttgtcttgttcggttatggcgtttaaatcagcagctacaccctgtggattgattaccggacccttggtgtccagggcaatggccaagctcctgggaagacccgtttcctccgcatacatggcgatggctttacgagccgcctggatagcctggcaatggcaatcgtgggtgccgtcggagaagtccaatcggaccaccttcatcccagcgtgaatgagattaagaagaacctcgggctggctggatgagggtccaatggtgcatataatgctggtaaggggtaacctcagagctggtgcttggaactgcagacgagattggtagtccagctgggaaaggtagggtccacggtctagccgaaacttcttgggttcctagtgtggattgttgagagatgagagaaatgattctatattcgatccttagtactcaccatttttcttttgcatttgtcggcatagcagcgaaatctaaggctcaatggaaaattgggacatggtgacacaacgcagaggcttgccctctgacaaagatttccggcgtattttcgaattttgaaaaaaaaaataatttgagtaatgcagaccaaatatatgtaaaatttaataaaaaaatctgaattttgaggctaaacaattatgatcaaatgggtgataaagatgtctgcattaaatactctttaatgtacctcccattcgatataactcagaagacaactatgtagtttaaacacaccttgagcacaagccttatcacaacctacatccgaaaccaatacaagtttcgttcattatactctattgtttgttttgcccgcgggctcatatcagccgatgttttactctgaaatttccattctgtttttacagtcgctcaaatagactgaatcattcatttgcgtaatttgccaaactcatcgcggttatattgttttgtttgcttagaacacgaatgcatttgccgcaactgaataatagagtgcagtaaatttatagtgggcaagttgtaaccttggggtcctgaaaaacagctaaataaaaaggccgttatttgcactttggttgattgtttaacattcgactcttagccgctcgtattctttgtattcctcgacttgtgatatttcgcacattcgacaactcacacacatgtgtgtgtatgtatgtacgcacccccctaacccgcccctgggaaatggcacaatgccgataatacatgcttatatatacttcaatttattttttatttatttgcaaattgagtcgtataataatattataataactcggctacaattgtcatgtgactttacgtaaaaataaggtgtgcgcattttttgtcacgactgttgagtaccacgtaattgcgtattcggctttcctttctttaattatttataggaattatttatcataatgagagttttatttagttgaaaccaatcaataccaatccttaagtttggaatattgattgcagagcatgttataccctgattcggcagttaatgggtatactttatcgtttaacttttggttgattactgttcattttcagttttcattttcggcttgctgtttgtgcttttgtgtatgttttttgtcattgccttgccattgttcgcttgacgcttttctcactctcgtgccctgttctactttctatggcgctgatccatgggtggattgaaaagtttcacggatgctgaatcaacagttcgctcaggcacacgtacatatgtacgtggacgatgcctggagtcagagtgtataaatcatcataatttcgtaacaattgaatttagagcgtaattgccgtaaattagatgaaattgcaatgactgagaaataataatcaagagctgagatgaaactaaatggagtcggttggggagtcgaagtgcagagcacgagccgctggtttgtcgatggggagcattgagccaagtcggggcataaattgcgctaataaagcgcacaattaaagtcaccatcgcagcaaattggcaacactttccaatcgaaacgagttgcagattcgctggaaccaaactaacgctgctgattttaattgaaataaaagtaataaaaactaacgaatttgggttagatgcgcccacttggagccccggatacttgcatctcatcggggtgccacgaaattttgtcaaatatactcgtatgtttgcccggtttgcttgcggcgagaggaatgcggaaatattgttttttttttttttttcctctgctcagctgcctttgcctatctttgtttacgtgcacttttctcgctgcactttttcctcccgcttttcgccgcatctgcatctgtttgttttgagatattttcgcgctgccgttttttattttcttcaattttatgttccccctcccccaccccctcgtcctgtcaacaagctgatgatttcgtgtgttgccatgtggtggccacgcaaatgcattttccacacattttctttcgtgcatgacattaaagttttaaatttaacaaccagccaaatgccggcctgatgattcttcgtttcccttgctctttttcaatactctttgcctttctgacgacacctgactcttgcgaacacttgtgaactttgccaagtgcgttaaaagtcgcgccccactttcattccaaactcttaaggtttcaagtcaatactttactgcttcaaatacttttctgaatattgctttgatttctaattaatcgagacgcaattttaggcatatactatatatactataatgtttttaatccttaaataagtttgcaagattgggcataaatatttttttcggggataataacttactcaacttcaccgcagctacgtaaattaatatcaaacttgcctgtcgccagacattgcgcatacgccgcattggcgcaacagagcaagacgaaatgcattttggatttgtggcgagtttgcgtgctcagtgaatggcagtccgctgtcttaattctcattcccgattcatttattttgggaactattttttcggtcgacaagcgaatcgtgcaaatgtcaaaagtgtgacaaacattttgtggaaattcggttcattattggaccaaagtgaccccattcaagaaactgattacaacgcgatgattaccatccacagatagtctgccctcagcacgcttctaatttctatgagccgggctttcttggagcttggactttggcagtatcttcatcttggttgctggccgggcacgatttactgccacatttagatttaaacttgaaaatttgttgcttcaaactgttgcatggctatttttaccagcacgttctacaagttttttgcgtctacctgccgtgcaacgtgggaagttgggaatgggcatgaaatgggtttgctgctgcaaatgtttgtccaaactggacgcattgtttggccgtcatccaatccattggccaaaaggaaacgtttttccttggctgccttgaagcgcaaccaagttgttgactcgacggccgggtttgttgacttgtctctcgatttatctgcgtgttaatttgagcaattaacatggtaaattaaggaagcaccaattcgccgcagatattttcaacataaatacacacctaaggctgctcgggttgcttgttaacctgccaactacaacatgatcaacatctcattgtctgttatttttctcctttactgttttttgttttttgtttttggttaactctttgcgttaaagcaagccaagcagttgacgcaaaaaatttggtctaaagttgaccgaatgaggaaatgtaaacgaggtttctgacaattagataattaattaagttccaaaaatatctcaaaatttataattaatcactctggtttaatgtggcaatacgttaaaattaagatatttattaaaaataatttattaatttgacgggttataggaagtgcttaacggattgggatgtaatttgcccaaaatcaagttattagtaattgggaagctcttaaagttgagtaatcttagtagcttggccctctttggcataaaattactatataatttattgtcgtatttatggagcagctctcaaatatggaaagaaactacctcatagaaatccgattagtcacttatgttgtatacataaataccaaatagtatctttggtagctagctggctttcctcctgcactgccgacttgcacacaagtttttttaatgctttttttttttaagcgagtataaaaaccaccttgcgcccagttagtcattcggcacacacagacatgtgttggtataggtatataaatatagccacaagccccgatatggccggtatacagttaaccaattgttaacccaaatgtgctgccaactgattcggaaagcgaggggggaagcatcgaggtgcgcctgcgcacagcacattgccaactgatttgctgcgcattgattgaagggtaaattacaccttgccacatgcgattcaatgcgattcgatgcgattcaatccgatgacggacacttgaacggcggaccgggccttacttgtccaggtcttagcaaaccaatgcttcctttggtacttcgagaaaagctgctctatttatttcaacatagaaaaaagatatattaacataatgcaatgaatatttttaaaattatatattgtttaatgggttgtttttatttggttgtcttaggattcatgttgcactcagttgatatacatttagatttgcatttctttccgtgtagtcgctttcctctttactctgcacatacgtatccgtaagatactgttagctactgccgctacggccaccgggcgaatgttatttgtatttgtagaattttgtgtgcaaatacaaattttgcgctcgcaactatttgtaaattgcgtcaccaccgaaacttggtttttggttatggttcgctagtgtgtccatgtttggatgtttagagcgccctctctatttctccaactatccgacaatcgctggatgtgtctgtgtatctcagggtgcgagtatctgagtatctgtgccaatcgctaacacttgtgtctgtgctgcgaccataactgcatacatatttaataggatttcaatgttgtttcattccaagtgcgctgtcacgtaattaaagtcacataaacatttgaatagatttcttgaatggctttacttttgaatttttcgatattgttgttttatttttcatttttggcacatttatgaacgtacgcgtaggcatttcgactagactgatatagatacattccgcggcaaaaatagaccttcttatagagctgtctgcgtcactagttatgaatatgaaatgttcaatggttgatttcgtgtcatttgatatgaataagtgtattgtgtggatatttattattaacttgggccaacagggttttattgatagctttttgtttttaaaaaaacattttattttattaattcgttgtgatagaaaacactaaaaaaaacctttctctgcaatgcaaataaatcagctaataaaacgatccttagtttctaaggctaattaatttgttttattttttcgcgtttatttaattaaccaaatagtgacttgcagtgtctattcgattgtcgttaaagaaggaaacacctttattactcactttttaacgactggccagcggcaacatttcccttttaattaataatacctccaccgccgttttgtggcgtgttgccagcggtgccttttgggccaatgccaccgaatggcaaaaactttatgacactcagacctacacctgggtaatacctcatcatcagactgaggcaaacgcaaattgacagccgttacggatgtgatgatgacctcatttgtagagcaaaaagcagatcttaattaagtctggcttttttggttctgatcgttggcaaaacttcattttcgctcctcactgattgagaatgatgtgtttttaataacatcacttgtttctctttttttttttttacacatttaaggagctgctacatttgataccacacgattttttatcgctgaccaattttggttttttgtgattttttatttttaaataattgttgcaatcaaatgtaattacaaatgcattgaagctgtccgtttgtgtttcctttttgcatggcaattacaaaactagacaaaaagcaaaagcaagccaagagctcaattattgttgcaacttgcaaaaggcagcggcaacaccagccacatcggcaacaactgccgactgactgttgtcgatgcggtaacatggctcaattttggctgctgaacattattattatttcgcatttgcgaacaatattcgcttattgttccaaagatcggcccacaacaactacaactgcatcaattgtggcagcagcagcaacagcaacaccaacaatggcaacaacagctgaaaaacgatggccacaattgatcatattttggttagacaagagaaacgaaaaaaaaaatatgatagatgattgcaagccgaagaaaatgtttgaaactcccttagaaattttaatactcttccaagttttaaagttttaagtttcaaaagttcaaggaaacaagtaaatagctttcaattcatttcaaactacgtaatgctcgaatcaatttaaagacattggggttaataatttttggtcaatttttaatttacgaaaaacgtaatttgacaacgccaaatgcgagttcaaaggttttccaattgcttttaaatcgcccaacgtatgagtctatgcgatgtctgctaaaagccagcgacaacctttttttggaaagggcatgacaaacagataggcaacccagacagacagacagacaaccaaaaaaaaactacagaaaacaaaaaacgagaagaaatccaggcactgaaaataaggcagttgggcctgcaatcgggccaagatgcatcttggctaactgtaatgtcgtcagcgatcttggcctgacgacgccattatgaaattgcactggcagtgggggtttggatactggcaccactgccagccgcccgccattcaacagatccgaggtttgttttctttgtcggacacttttcacctgctctcccactctgtctattgtgtgccaggccatgcaaatagtgctccagccaccgccgcacgccccaaaaaaaaaaaaagaaaacctgaaaaaaaaaaacgaaattagaaacaaacgcgactccgcaatccgctgatggttgcgcctgtccgcgaggcaatcgtcgtccagctggtgccaccagtgttgaatgtttgcactttcggatcgctcactgagtcagtcagtcactcaggttaggcacactgagagaaaaaaccagccactagccattatgggacctaagaaacctaattcacattgtgcctaagtcagcagctttgtaatagaagagattgattgatgttgcgaactcggttttaatgcaaatgtttctataaaccattccacttaaataccaataaattaaagaacaataatagattgacatttgtcaacatttctctttgtgcaaacaggcaatcggagggcctgtctctcgaattggttaccattaaccatcgagcattctccggggcttttcaatttcatttgcgcaattattgtgaattaagatgtttactcaggcaacgttcgcttctcctgctgctgcggctactatcttgcagatacattgggaactttctacgagcttgtagattcatttgatttcagccagctcatgtgaactattcgccacgataagatatgcgagtgagctaattatgtcaaggaaattgttcagagacccaactgacatacaaaaaaaaaaataaggcaaagaaaaatctgtaacaaaaacagcatctttaggtctctcagaacaaaactttcacccgaaaaaaaagagtcggatacaagcgactaacaacaatgacaacgaacaacgttgccccgttgttgcaacagttttatggcttaaaattcacactcttaattgccaagaagtagtgtgtatcttttagatactcaagcgcaacgcatctctacgcatgtgtgaccgaccgaccgaaagaccgatcatcatcagaatgattgtaattacatttaagactggcccagagagcagaacaatgaaagagaaaattaatagttaatgcaactgcaattggagctgtgcaggttaattgagcgcattagcggctcataaccgagatttctctccgacttttctttggtactttgccaggaacgcaccgtagatccggctattctgttctctgggcacagatacatatactttggattctttatgagaattgtaatatttaaaattggttggaaacaatagtcgctgtatatcaattggatttcttgattttgattagttttaaccacaatctcctcactttttcttatatttcaagactcctaaaccacagccaaatgacataatatttatatatccgcgttattcgatacagcgctagtgggctttttagaattacatcgaataaatatatggcagtgacagtacgtacctatttataatgctttttccagctgggaagtgcgtacgtgagctcgttttggatttcgcggtcggtggcatttgtgtatctgtgcgataattcgcaattggagctgcaacaaacacacacaacgcacacccacttgcggttgtcatcaccacaaacacacaaacacatagatatgatattcactcgaatccgcagataattttccagttcttacgcttaagtaggaaaagcgttcgtgagtgtaaattgtgttaagttctttttggctttctcgccgcgacggctttctatttttcacgatgccgttggtgccactgcaacgttatatctgttgtggttgtggccgcggttggtgcctcagttctgactaatgacaaccgtttggtgggagtaggaagtaccacctccctcacctttatgtctttgttttacctggtatttttttttcttatttttttcggcgtctggttttctctttggcaagattctggaacgtcatagttggatgttcttcccgaggtttttaaaattacttactaatgataattagaggcattattttcccattattcttcggaaagctgtttcccgtaggtagcatttctgttggtttttattgcaattaaagcgtcatttaactgggcgtgggagctgtcgatccaggaaagatttgaccccgcccaagtgaagtggtaataaagacatgacacttgaaaaatgaccacgaccattcgattttttaattaaaaaagcaagagctaaccaatgtttttgcattgtatttcatacggttgggatctacaatattttgttttgctttctatttctcattttcagtttcaattaaaaataatggtcatgcacattttacaaataagtttcggttcaacggagcttttgattatgcaaaaaactgcaatggccaatggccacatgtgccacatgtgtgtgtgtgtgctccacttattggccaagattaactttgcctgctgtttgcgctttgtttgccaacagattcagattgggattcagcaacatcatcatctccatcatcatggagtcttcagtggccgccgcttcttcagcttcttcagctgttttgtgccttgagcttccgactttctccaaacacacaccgcctgccatacatacgtatgcttgtttgtatacaccactatactatatatacacttggttagctcggcgttataacaaatccagagtgtgtgctgctcggttgctctgcctggccagctgcctaatgatccgtctatgttataacttatatgcaaaccggctgccaaattgaaatgtgcacggatttgggagagtaagtgttcctcctaaaagtttctccatctcccttggtattttgccaaaaaatgtgttttgtctttcgaagcatttgatgttgatgtatacgccgccaactgttttaaacaatttggcgtcataaatgtctagatattacggcatttgtcggctatggaaaacgtttcgtcatgaatatatatcgggaatttattgttgatacttttaaagtcatgagttcttcttaaacgttttgtcatgattaacgtataatattcatagattttgag

SEQ ID NO: 16430 - DNA, 2838 bp, DROSOPHILA
atgctacctacgggaaacagctttccgaagaataatgggaaaataatgcctctaattatcattaataaatcgagagacaagtcaacaaacccggccgtcgagtcaacaacttggttgcgcttcaaggcagccaaggaaaaacgtttccttttggccaatggattggatgacggccaaacaatgcgtccagtttggacaaacatttgcagcagcaaacccatttcatgcccattcccaacttcccacgttgcacggcaggaacccaagaagtttcggctagaccgtggaccctacctttcccagctggactaccaatctcgtctgcagttccaagcaccagctctgaggttaccccttaccagcattatatgcaccattggaccctcatccagccagcccgaggttcttcttaatctcattcacgctgggatgaaggtggtccgattggacttctccgacggcacccacgattgccattgccaggctatccaggcggctcgtaaagccatcgccatgtatgcggaggaaacgggtcttcccaggagcttggccattgccctggacaccaagggtccggtaatcaatccacagggtgtagctgctgatttaaacgccataaccgaacaagacaaactggatctcaagtttggagcggatcaaaaggttgacatgatcttcgcatcgttcatccgcgatgccaaagctttgaaagaaattcgccaggcactgggtgcctgtccatcaagtgagcacataaagatcatttccaagatcgaaagtcaacaggctctggcgaacatagatgagataatccgcgaatccgatggcataatggtggcccttgggaatatgggcaacgaaatagcactggaggctgtaccgctggcccagaaatcgattgtggccaagtgcaacaaggttggaaagcctgtgatctgtgccaatcaaatgatgaattcgatgataaccaagccacgtcccactcgcgccgaatcctctgatgtggcaaacgcaatcttggatggttgtgatgcccttgtgttgtcagatgaaacggccaagggtaagtacccggtgcaatgtgtgcagtgcatggccagaatatgcgccaaagtcgagtcggttttatggtacgagagcattcagaacaacctcaagagcgaagtccggatcaacgccgccgatcacatctcggcggtaagcacggcaattgcagaagcggcaacggtgagtcaggctcaggcaatagtggtggccagtccgtgctccattgtgtcccagatggtcagtcaaatgaggccgccgtgtcctatcgtgttgctcacaggctgcccacatgaggccgctcaatccttgctttttcgtggcgtttatccactccttgtcaaggaaatggtttatggcagcgtaaactactgtcgcatcatgcaatcgggcttaaagatattggccaagttggacatcctgaaggcaggccaaaggggaactttggtgctggtcaatgccatgtcggcagacaagctcaccttcaggctgttcacttttgcacagccaactgaggcagagcgagaagaagaacgctgccgaaagttggccaggaagcagcgatgcaaggaaatgtctgtaaataaatcctgtccaaatccaaagagcagtaagtctgaaatatctataaagtccgatgaaaaagatggtaccagttcaaagaaagaatttcctaaggacgaagaagtttcgaaatgtttacaactagaaaatgaaattcagcagaaacggggtgaagattctgtaatgaacaaagaaaatgaaaatctctgccacaacgtggcattgaagtgcttacatttgaagaatgaaagacaagctcaatcggaagctatgatgaaacagacggaaaaacttaaaaaagcggaagatcctagaaaaaacaatgggacccttaaggatagttttaaccgtaagaaaaaagacgataaaacctcgaagtccgataaaaaggatggttccagctcaaagaaagatcgtcctaaccacaaggaagtctggaaatgtttacagcggagtcaagatttggtaatggcagaagaaaatgaatatctctgttcaaaaaaatcaaaagaatgtcccaataaggacgacgaggccttgaagtgcttacagctgaaaaaacaaagacaagctcgagcggaagctgagatgaaaaagaaggcagaactaaaaaaaaataatagtttaagccataagaaagaagacgataaagcaccaaactgcaacaaacttaaaaaacaaggcccaaagaagaataagtgcagagtagtcaaaatttcgaggacatccgaaaaggataattatattccgaagaaagaatatcctaggatcttcaatatagaaaaggctcagccaaaaactgtggtcaaacacagtaaagagttggcaaagtcctgcgatattgtactcgaaaactgcaagaccgtaaaacgcaaaaactgcaagactgtaaaattagaaaaatgtaagacagtaaaacttgaaaactgcaaaataacaaaacttaagaagtgcaaaacgatcaagctcgaaaattgtaagcagccgcgaagagttaggcaaagaactaatcttactaaaaaggcatacactttcagtactagagatacgaggaaaaaaataattccaccaaagcgttatcgcgttgtacgcggctctgcaattgttaaacaactaaaggaaaataaagccagcgagagtccaacagctgcgagcagattgtcgagtttcgctgaatgcgatagatttagcgagagagaaaagatacatttacggagagcgaatcgctga

SEQ ID NO: 16431 - protein, 945 aa, DROSOPHILA
MLPTGNSFPKNNGKIMPLIIINKSRDKSTNPAVESTTWLRFKAAKEKRFLLANGLDDGQTMRPVWTNICSSKPISCPFPTSHVARQEPKKFRLDRGPYLSQLDYQSRLQFQAPALRLPLTSIICTIGPSSSQPEVLLNLIHAGMKVVRLDFSDGTHDCHCQAIQAARKAIAMYAEETGLPRSLAIALDTKGPVINPQGVAADLNAITEQDKLDLKFGADQKVDMIFASFIRDAKALKEIRQALGACPSSEHIKIISKIESQQALANIDEIIRESDGIMVALGNMGNEIALEAVPLAQKSIVAKCNKVGKPVICANQMMNSMITKPRPTRAESSDVANAILDGCDALVLSDETAKGKYPVQCVQCMARICAKVESVLWYESIQNNLKSEVRINAADHISAVSTAIAEAATVSQAQAIVVASPCSIVSQMVSQMRPPCPIVLLTGCPHEAAQSLLFRGVYPLLVKEMVYGSVNYCRIMQSGLKILAKLDILKAGQRGTLVLVNAMSADKLTFRLFTFAQPTEAEREEERCRKLARKQRCKEMSVNKSCPNPKSSKSEISIKSDEKDGTSSKKEFPKDEEVSKCLQLENEIQQKRGEDSVMNKENENLCHNVALKCLHLKNERQAQSEAMMKQTEKLKKAEDPRKNNGTLKDSFNRKKKDDKTSKSDKKDGSSSKKDRPNHKEVWKCLQRSQDLVMAEENEYLCSKKSKECPNKDDEALKCLQLKKQRQARAEAEMKKKAELKKNNSLSHKKEDDKAPNCNKLKKQGPKKNKCRVVKISRTSEKDNYIPKKEYPRIFNIEKAQPKTVVKHSKELAKSCDIVLENCKTVKRKNCKTVKLEKCKTVKLENCKITKLKKCKTIKLENCKQPRRVRQRTNLTKKAYTFSTRDTRKKIIPPKRYRVVRGSAIVKQLKENKASESPTAASRLSSFAECDRFSEREKIHLRRANR

SEQ ID NO: 16432 - DNA, 2581 bp, DROSOPHILA
cattcagagtaatatcctgcaaaatgtatcctgctgaaaaacaataaaaactttaatgctctcaaatatagaactctcaatattactataacaggttctgcttaaaaaacaaaatatatttggctcaacaactttgatcgaacttttttacaatattttatcatatcattttatcatagaatatttatttcatatatcattacttaattaatatcttagggcattgaaactgttgaattattatcagctttattaaattcagcaggggtttcttgtgtaaccgctacgctactctcttctacattttttgcggcagtatccaatttcgatgtggcgtttttgttttgaggtatttccactccaataatgctcattatattcctcgaacttttccggcagtcttcgttcatcagcgagtaaaagagtattccggctaaaaaaactccaagtattatgccaagaaaaagacaaccgatagactttctggcaggtagtcctttgaatcaaaaatgtattaattttaaccaaaaatagttgaataatattttctataataaaattcaatattatttgtaataagcactcaccttcatttaggaagggtttacttgccagtttcctatttaattttgatgagcttattgggatcatttttggacaaggtctctttggcgaataaatttaaaacgtgttgagctcattcttttcttataaaaattaaacgactttgaaacaattgagtaaacatacattttaaatgcataaaaattgagcagacagaaatgcgcacgaggtaatttaacacgtttcgtttatataattaatataaacgaagttacatatatattcaacttttcgaatatccaattttgagcggtaatcgaatattgtttcattgactgaccagttgcactaagtgatatctatatcgatgtgctttccatatctagataatgattgcgaaaagcagtttggaaaaaatattatatattgattgtttgtataagtaagttttatttatttcatcaaaaaattctaagcatatatattgagagcatcgaagtatttatttaattgcagtaaagacggattttttatagatgtcgattaaatgtttcgaatctgatcttggtattttattgtgcaagggctcgccggacattctcgcaggacaacgtgttacatcgctcaagggtcactgcacaaagataacatatgtataaaatatattttttaaaaagtgtttatatatacttacatatacaattagcttttgcgagttcgcatcgggagatttcacgccaatttctttgtgttcgccgacagttctcattgaaaatattcgaaatatcgttgtttctgccatttctcacgacccttgactcacatctggcgacaatccgtctacaaatatctctatcactttgggcctgaacgataacgaaaaggcaaataaaagctaaataaaagaataaaacatatatttgataatataagtatttggattgtgaaattcaatttacaaatccttaccaataaacagagtaatcttggacatcgtgaattccgtactaaaaatcgtttacgaactgttttccttgagcccaaacatgagcttttataaagtgtagcccgctttaacgaaaaacacccggcttttaatttttgatgtacttttttactgacatccaggaagcaaaataaaaggcttattcaacttaacaaaaacttgtcctagtttgaatacatttcctaaaacttttgcaccctttactaaaggtttttatttctggtttgccatatttttaaaacatctgtcatttctgagacatattgtttatggtatttatataaagtccagttggatcggaaacttctgtagtgagccaactgataagttcccatagtgagagagtttaaactacaataatgcgcctgaaaacagttttaaccatctttttcggtaagttaaagctggaaataattatgatatcatatttagaacttaaacatttggttcttagccatatcgctgactctggttgctggtcaagatcgggactgtgatgaattggcaaggagatgtgaatcctgtgtgaggcgtctaaataatacaatcgatcgcgatttacccctcttcaatagagagtgcagacaaaggaccgaattatcttggcgctggaggaacgtcggacgctgtgagctctccaagctaaattgcttgggtaagttttgcacacaaaacttatatgaatttgtatctttaataaacgttttttatgctataggttggcaatcacccatgaactgtgaagacattgctatgagggctggtatggaacgcaggcgtacttaatagttatccactaatgcataaatgaaatgattaaaaaaaaaataaaaagagcatcgaagtaaaaaactaagttattttatttgtcatacaattcaaatttcttcgcgccacttatgcatcgcatatcgcactatccgatcttcaatttcatgttcaacgtgtggctcatactgaccgtaatctgtgtcttgctgattttctggatttcgttagataaacgtagaa

SEQ ID NO: 16433 - DNA, 447 bp, DROSOPHILA
cgatttttagtacggaattcacgatgtccaagattactctgtttattgcttttatttgccttttcgttatcgttcaggcccaaagtgatagagatatttgtagacggattgtcgccagatgtgagtcaagggtcgtgagaaatggcagaaacaacgatatttcgaatattttcaatgagaactgtcggcgaacacaaagaaattggcgtgaaatctcccgatgcgaactcgcaaaagctaattgtatattgacccttgagcgatgtaacacgttgtcctgcgagaatgtccggcgagcccttgcacaataaaataccaagatcagattcgaaacatttaatcgacatctataaaaaatccgtctttactgcaattaaataaatacttcgatgctctcaatatatatgcttagaattttttgatgaaataaataaaacttacttatac

SEQ ID NO: 16434 - protein, 95 aa, DROSOPHILA
MSKITLFIAFICLFVIVQAQSDRDICRRIVARCESRVVRNGRNNDISNIFNENCRRTQRNWREISRCELAKANCILTLERCNTLSCENVRRALAQ

SEQ ID NO: 16435 - DNA, 6258 bp, DROSOPHILA
ttgaggtgttgaggtgttgaagtgtcgaactgtgtagcaaaactgaggagaagccggtgaagtgcccgtaatacgacttgacactagaggcatagccagctggatttgaaaatcttttcgaaatgaaaagttcagtttaactgagtagtagaacaggctgctttatacaatgttttggatgcgtggaatttaaatcaactaaagagagttcctcgactataagatacccgttactcagctagtggatgtgagaacgcgaaattttatcattttctgggcaaatcgatagaaatttacaagattaataaaaatgcgaaaaaagatcaacaaacttgcgctacgtctttgtctctagaatctgtatgctggatctcaaccttctaggtacggacatggcggacagacggacatgactagatcgactcctgatcaagaatatatatactgtacatggtcggaaacgccttcttctgactgctacatacttttcaacaaatttagggtacccttttactcttcgagtaacgggtataaaaatggataacaagtcagatttgaatccccgttgctgaaccggtaaattgatatagaaattgtaattcaatccaaaaccgaactcattttaagcagaaattgttacaaaaatacaatatattaatataaatacaagtattaattaatattattaattttaataatatttttaatgttaaattaatatttatttatagttaaaggcacttaattatttaattatattttattataataatgtgatacaataataaacaatattttcaaacttataccgatcgatatgtaccgccgtgctgactgtaatcgatggtcgcgatgccctgccaatcgactatcgataacaacaaacacgaagatatagaggaaaatagagaagaagaagagttaaagaaaacgccaacaaaatagacaacaaggcaagtccgcgcctccgaacaaggacattataccacaagacacgctgcaactagttataagccgcatagccgtgctgattttcgaccggagtacgaaaagaaagcagccaaaacggaggcgcgcaggctagcggagatcgcggcgatggagaagaaggccaaggagtcgctgcgccgctacaagaaggccgcccgtcacagtgcgacgcactcgagcagctcggactccacctcggactccgacagcgggagcagctcgtacagcagcacggacagcgagcagggcgtgggcggcgtcggcgtgggggtgggcgtacctggtggcgccggtggtcccggcggcagtggcagcgtccacggtcatccccatacccacggccatgggcatcatccgcgctccgcggagcgtcatcatcgcaaaaagaagagctcacggcgcggcggcagctcgtccggagatgaaccatcgtcgtcgcgccgcaagcgagacaaacgggatcatgtgcaaaagaagctggtggccaagcgaaatcatatcaaacggaaactgaaggaagcgcgccttaagaaacgggcggccgccgccctcagtggtcacgtccatcgttccctgtcgccgacgacgcgagccaagctaaagaagctggccgagcgaaagaggctacgggctgccagcaaggagcaacgggagcgggacaagctgcgcgtcgtccaacgagacagagagcgagaccatcatcgattgggcagcagtaggagtccgccgagcagcagcactaccaccaccaccaagattcgcatccatcaggacatcgtgggtaagcggcaaaagagtccaggtaactatcagatactacatatagttatgtctaggctcaacccactaacccattaattttgcttgactttaaggtttaggttctggtcttggaggcggcagcagcagctcatcctcgcgaatgcatcaccaactgatgtcgcgagagaagatcatcatccagacccgcgcacgtggacgtactccgtccctggaacgggagcgggaaagggagcgcgagcgagaacgagaaagagagcgcgaacgccacgatctctcattgcgggagcgagatcgtcgggatcgggagcgcgagcgtgcggaacgggaggcagccagggataaggagcgcgctgaggccttggctcgctgccaagaacgtcaacgggagcgggaacgcttggctcgcgaaaagttgcgtcgtcaggaggaagaggaaggtggtaaacgcggtggtcccggtcgagacttggatcttccgccgtatggcagccgggagcgatcgctggacaccgtcgaaagggaacgagagcgcgaacggagcgggcgtcatgtccgcgataagcgcgagttggatccctacgagcgtgagcaagagtatctggaggaacgacacggccacgggctgatcgacgagatgcgaaggtatcggcgcagggacctcagtcccatgcctgagcattatgcacccagactgcgggatccgcgggaactgtactccgaggaggagcgggagaggtaggtttaggttctgcacttaactattccacgaaaagctgaaactgtaccattttggttacttttttctgttacctagaacatagttaactaggtagcagaacgggaaccttttctcattaatgtttatggccacgaaatcggcattagctaatccgctgtttgggaattccttattttagagcctacaaacgcgcctatctagatgcccgctattcctcgcgggaacgagaagcctggctggaggcacgcgagttgcgggaacgagagctgcaaggacgcgagtaccgtgacctcgaaacggaagacaccctctatccggacgagcgggaacgtctaatccgggacagggagcgtgatcgggaacgagaacgtgaccgcgaaagggaacgtaatattggaccccgtggcgacttccgaccggagtgggaacgcgagtgggaggaggagggagctggtggcggcccaggcggacctagtggaacccctgggcgaccgggtggctttgttggcggacccaagcggggcaaacccccagctcatgcgggcggaggacctccctcgcagcagcagcaccattctgcttcggagcccgactgggatgcggacgagcgggagcgagagcgggaacgagagcgcgatcgggaacgcgaacgcgatcgtgaggatcgaccggacacaggaggcggaggcgctggcggcgataggccatctatcaaaaacgagcccgcttggttggagcacgatcagcgggaaaagccacgcggctggcaacagcagtcgtccaattctggaggtgattggcgggataacgatgacgcgccgccagcaccatcgcatccgcatccagcttcaccgcaccaccatgtgcatccgaggggcgaacgaggatccggcagaggattccggcgcggaggccacggtcatggcgatcacggcgagcggcccggttaccgatcgcatccgccaccgctgatgacgttgccggtgcaaccgcctggtggttactcacgcggatttccccataagagattgccttatggatctggccgagatggcgccgcactgggcgcccgtgacggcggactgcccggatcgtcgactttcctcaagaagcacacgcacgcaccgctggtctcgccgacgcagacaccactcctgaatccactcctcaacgcggccaaaccaaatgctgccgcacaggcgagtgctgtggcggcggccaccacagcagtggcagcggctaaggctgcggcccaaagcgccgccaacgccaccaccaatcccggaatactggctcaggtgcgattgattttcgtttacttcgctgcagagacatcggatgcggcctatcatatcatttggcggcaatgatttcgtctttgtttataattatataaatgtgtttatgttagctgagtgcaacgttcatccattcgaaatcaattgttcaccaaccgttgtgcaataacgtagtcattttgtccagcggaaatggtaaaaccataactttccattagtaataaatttctcttattgtaatcctcattcgatgtttaaggtaagcaaactaaataccgtgtgcatcaagcaggaagatgcgtccgaggactccgcaggcacacctgaactgggcgcccaagattcgccgacccagagcctgaacctgaatcagtcgctgtcttccgagggcaatccagttaaacaggagctaatccgcaccagcgccgtcgagggtgagctgagcgagattagcgacagcgatgacgatattctcaataagacggacaaggtgcggcccaagaacgagctgcccacggagacggagcaggaaatggacaccaatgcggatgaggtcaaaagcgaggcactccacattgtggctgggcatccgatcaagggcgaggaaggggacgaggtgctggactttgaggaaatatccgatggcgaactcgaggaggatgcacgccacaagggtgagtcactcatgtataaacatttttccttatccgatgacaacatggtagtcacaatgcttgtcaatacttgactcggactcggatttatggtcacatttatttgattagtattcaatggtcaggtggaaatgatgaatgattacagttagaggcgatagttatatgtaatttcccatctcccattccgcaggcattggcgatgctttgggcgtggactggcaaggattgatagcagagacccgtcagcaggccagcgatgctcaggcggcccaacagggcgtggatcgcggcacatccgccaagcagagatggcagccatatcgcgtgctcctcgacttgggcatatcgttcggaatggcgggcgagggctacgcccgttgcgtaatggaggaggcgcgccagcaattgctccaggagaaggaacagggccaacagcgcgaactggatggagacgaggagcctccggctaagataccctcgccactgctcgactatcgcgaattcctggccagccagcagcaactggagccactggcctgcgtgcagatgggtcttcgcagcgccgccgtcgagcgccagcgtttggtgggcaatgtctgcggtccgggaagccgagctctgagtgctcgccaggatttgcgcttgcgccgccagctgtgcggattgccagcacgcgaatgcgagttcccgcgcagtgttcccatcgtgggagagggactgcgaaacctggcaatgcaaatgttccagcgcaggcttctggatgtcaaatgagatccgatgcccggcgtgcagcgagagctgcgttaccgaaagccacgtcactatcgactggatatacagatctttatgggcgtggagaagggcaaggcgacgaaacgagaccactactaggtggattttaggaataagcttaatgtttgagatataacttgatttcgattattgattcaaacttggaaattgtgaaaattgtgaaatatgaattgcattataaaaattgtagattataaattgattatgaattatacaaaattgtgaatatcaactgcattaatacatgttcgaaatataaagtgtcgtcccaataaacagagtgtattttcatttcattcctgagctcggaactcaatgcattgcggaagttctggaaaggatgtggtgcttgtggtagcgacgaaaggatgggaaacatttggtatttttaatagtagatttattatatcgtcgttggaacagttttataagaaacctagtgccgaaaacaatgttaaaataaatgttacttcaataaatacatacattcataacgaacggctatcgtgtatgtgtgttaggctattcgtaataagcaactcaggccaggcatcgtggaataatctgcgtacattatacaacttaagatatctcctaaggattagcggtacccaatctccagacctaatactaattaatgtatgtatgtatgtgctgggctatcacatgcgatggaaaagctgttcgcaaagagcgtagcaaggattccggacttccagattctctgatcgcagccaaatgagtgagtccaccgatgtacagttaaggtaagggtatgtgtgtgtgtagaaagttgcggatagatagagagggacgcaatatctatggaaaaatgcgtgggttctgctacgaaattaagtcgtacaaattgttgcacgcaaaaaaaagagcacaacatttgggtgagattttggatttttcttgtttattttaaatagaattgttatttttgttaatt

SEQ ID NO: 16436 - DNA, 3551 bp, DROSOPHILA
caactagttataagccgcatagccgtgctgattttcgaccggagtacgaaaagaaagcagccaaaacggaggcgcgcaggctagcggagatcgcggcgatggagaagaaggccaaggagtcgctgcgccgctacaagaaggccgcccgtcacagtgcgacgcactcgagcagctcggactccacctcggactccgacagcgggagcagctcgtacagcagcacggacagcgagcagggcgtgggcggcgtcggcgtgggggtgggcgtacctggtggcgccggtggtcccggcggcagtggcagcgtccacggtcatccccatacccacggccatgggcatcatccgcgctccgcggagcgtcatcatcgcaaaaagaagagctcacggcgcggcggcagctcgtccggagatgaaccatcgtcgtcgcgccgcaagcgagacaaacgggatcatgtgcaaaagaagctggtggccaagcgaaatcatatcaaacggaaactgaaggaagcgcgccttaagaaacgggcggccgccgccctcagtggtcacgtccatcgttccctgtcgccgacgacgcgagccaagctaaagaagctggccgagcgaaagaggctacgggctgccagcaaggagcaacgggagcgggacaagctgcgcgtcgtccaacgagacagagagcgagaccatcatcgattgggcagcagtaggagtccgccgagcagcagcactaccaccaccaccaagattcgcatccatcaggacatcgtgggtaagcggcaaaagagtccaggtttaggttctggtcttggaggcggcagcagcagctcatcctcgcgaatgcatcaccaactgatgtcgcgagagaagatcatcatccagacccgcgcacgtggacgtactccgtccctggaacgggagcgggaaagggagcgcgagcgagaacgagaaagagagcgcgaacgccacgatctctcattgcgggagcgagatcgtcgggatcgggagcgcgagcgtgcggaacgggaggcagccagggataaggagcgcgctgaggccttggctcgctgccaagaacgtcaacgggagcgggaacgcttggctcgcgaaaagttgcgtcgtcaggaggaagaggaaggtggtaaacgcggtggtcccggtcgagacttggatcttccgccgtatggcagccgggagcgatcgctggacaccgtcgaaagggaacgagagcgcgaacggagcgggcgtcatgtccgcgataagcgcgagttggatccctacgagcgtgagcaagagtatctggaggaacgacacggccacgggctgatcgacgagatgcgaaggtatcggcgcagggacctcagtcccatgcctgagcattatgcacccagactgcgggatccgcgggaactgtactccgaggaggagcgggagagagcctacaaacgcgcctatctagatgcccgctattcctcgcgggaacgagaagcctggctggaggcacgcgagttgcgggaacgagagctgcaaggacgcgagtaccgtgacctcgaaacggaagacaccctctatccggacgagcgggaacgtctaatccgggacagggagcgtgatcgggaacgagaacgtgaccgcgaaagggaacgtaatattggaccccgtggcgacttccgaccggagtgggaacgcgagtgggaggaggagggagctggtggcggcccaggcggacctagtggaacccctgggcgaccgggtggctttgttggcggacccaagcggggcaaacccccagctcatgcgggcggaggacctccctcgcagcagcagcaccattctgcttcggagcccgactgggatgcggacgagcgggagcgagagcgggaacgagagcgcgatcgggaacgcgaacgcgatcgtgaggatcgaccggacacaggaggcggaggcgctggcggcgataggccatctatcaaaaacgagcccgcttggttggagcacgatcagcgggaaaagccacgcggctggcaacagcagtcgtccaattctggaggtgattggcgggataacgatgacgcgccgccagcaccatcgcatccgcatccagcttcaccgcaccaccatgtgcatccgaggggcgaacgaggatccggcagaggattccggcgcggaggccacggtcatggcgatcacggcgagcggcccggttaccgatcgcatccgccaccgctgatgacgttgccggtgcaaccgcctggtggttactcacgcggatttccccataagagattgccttatggatctggccgagatggcgccgcactgggcgcccgtgacggcggactgcccggatcgtcgactttcctcaagaagcacacgcacgcaccgctggtctcgccgacgcagacaccactcctgaatccactcctcaacgcggccaaaccaaatgctgccgcacaggcgagtgctgtggcggcggccaccacagcagtggcagcggctaaggctgcggcccaaagcgccgccaacgccaccaccaatcccggaatactggctcaggtaagcaaactaaataccgtgtgcatcaagcaggaagatgcgtccgaggactccgcaggcacacctgaactgggcgcccaagattcgccgacccagagcctgaacctgaatcagtcgctgtcttccgagggcaatccagttaaacaggagctaatccgcaccagcgccgtcgagggtgagctgagcgagattagcgacagcgatgacgatattctcaataagacggacaaggtgcggcccaagaacgagctgcccacggagacggagcaggaaatggacaccaatgcggatgaggtcaaaagcgaggcactccacattgtggctgggcatccgatcaagggcgaggaaggggacgaggtgctggactttgaggaaatatccgatggcgaactcgaggaggatgcacgccacaagggcattggcgatgctttgggcgtggactggcaaggattgatagcagagacccgtcagcaggccagcgatgctcaggcggcccaacagggcgtggatcgcggcacatccgccaagcagagatggcagccatatcgcgtgctcctcgacttgggcatatcgttcggaatggcgggcgagggctacgcccgttgcgtaatggaggaggcgcgccagcaattgctccaggagaaggaacagggccaacagcgcgaactggatggagacgaggagcctccggctaagataccctcgccactgctcgactatcgcgaattcctggccagccagcagcaactggagccactggcctgcgtgcagatgggtcttcgcagcgccgccgtcgagcgccagcgtttggtgggcaatgtctgcggtccgggaagccgagctctgagtgctcgccaggatttgcgcttgcgccgccagctgtgcggattgccagcacgcgaatgcgagttcccgcgcagtgttcccatcgtgggagagggactgcgaaacctggcaatgcaaatgttccagcgcaggcttctggatgtcaaatga

SEQ ID NO: 16437 - protein, 1150 aa, DROSOPHILA
MEKKAKESLRRYKKAARHSATHSSSSDSTSDSDSGSSSYSSTDSEQGVGGVGVGVGVPGGAGGPGGSGSVHGHPHTHGHGHHPRSAERHHRKKKSSRRGGSSSGDEPSSSRRKRDKRDHVQKKLVAKRNHIKRKLKEARLKKRAAAALSGHVHRSLSPTTRAKLKKLAERKRLRAASKEQRERDKLRVVQRDRERDHHRLGSSRSPPSSSTTTTTKIRIHQDIVGKRQKSPGLGSGLGGGSSSSSSRMHHQLMSREKIIIQTRARGRTPSLERERERERERERERERERHDLSLRERDRRDRERERAEREAARDKERAEALARCQERQRERERLAREKLRRQEEEEGGKRGGPGRDLDLPPYGSRERSLDTVERERERERSGRHVRDKRELDPYEREQEYLEERHGHGLIDEMRRYRRRDLSPMPEHYAPRLRDPRELYSEEERERAYKRAYLDARYSSREREAWLEARELRERELQGREYRDLETEDTLYPDERERLIRDRERDRERERDRERERNIGPRGDFRPEWEREWEEEGAGGGPGGPSGTPGRPGGFVGGPKRGKPPAHAGGGPPSQQQHHSASEPDWDADERERERERERDRERERDREDRPDTGGGGAGGDRPSIKNEPAWLEHDQREKPRGWQQQSSNSGGDWRDNDDAPPAPSHPHPASPHHHVHPRGERGSGRGFRRGGHGHGDHGERPGYRSHPPPLMTLPVQPPGGYSRGFPHKRLPYGSGRDGAALGARDGGLPGSSTFLKKHTHAPLVSPTQTPLLNPLLNAAKPNAAAQASAVAAATTAVAAAKAAAQSAANATTNPGILAQVSKLNTVCIKQEDASEDSAGTPELGAQDSPTQSLNLNQSLSSEGNPVKQELIRTSAVEGELSEISDSDDDILNKTDKVRPKNELPTETEQEMDTNADEVKSEALHIVAGHPIKGEEGDEVLDFEEISDGELEEDARHKGIGDALGVDWQGLIAETRQQASDAQAAQQGVDRGTSAKQRWQPYRVLLDLGISFGMAGEGYARCVMEEARQQLLQEKEQGQQRELDGDEEPPAKIPSPLLDYREFLASQQQLEPLACVQMGLRSAAVERQRLVGNVCGPGSRALSARQDLRLRRQLCGLPARECEFPRSVPIVGEGLRNLAMQMFQRRLLDVK

SEQ ID NO: 16438 - DNA, 3803 bp, DROSOPHILA
acttttttccaccacatcatgtgacccacacacaacggtgatggtggttatggtagcacgggggcggggtggtgaaaaaatcgcagttacttgtcgccctgccatttccaattggatttttgtttctgaaaatgaaacttacgtttacgagcctcggcgaccttctcggctgcctttttctcggcagcgagcaactgctggattccctgcgtctggctggccataatttccaaacttctctaattcctcgccgtggtgtatactgtgcaagtcgaaaaaagcaagtgcgacagaatcacaatcgacgacgaactgtgaaaaatgtcatatgacgaagtcacacacacgcaaactcaccacggtggctagttggtgtgggtaagcagtgtgccggaaagctgggtgctgcgaaactcttggagatggctcggtcgattgcatatcgattagcttagttgtatattattgtttggtattgtattggccagaagtattaaataatttgacgtttttgtaagcattaactttctcatttattcccatcatgaatatttttcttttataattttgtaaactttaattcattttaatttaaatgcagcgtttaatctgcttcgcactgtaatagttccggctgtatttaaagctattgtaagaaattagttcgtaaaaaattctttatattattttaaaattgaaatacataaagattaaattttgaaataatttattcatattaatatctgaaggctatcgtttgatattaaataacaaccatgttgtagtggaccgaactcaccacacctcagaccaaaattaaatatttgaaaatcacaaatcgtaactatatgaagctgcaaatactttatatatctttagccatagtgtatttatttcaatcaatttgaatactttgttgatatttttccgaataaatctctgctgactagctatcgatatcaccgatagtgtcatctctgtcctagaagttaaaccacagatgctcaggcattaaacaaaattaatttcgaaatttgttgcagtaaatatagtttaattgtttaaaattcctgtataaatccttaagaggggtgcctaaagatgtttacgcccaccacgaacaacgccattggaggcgccactgctgctaccggcgcttttgcttttggcgcgcgaccggcgacgacgactgctccgcctccatcctttggagcagccacctctacgccaaccttcggtgctgctccggccaccacctccttgtttgcagctcccgcggccacaccggcctttggggcaccagctgctacgccggcttttggagcacctgcgtccacgcctggttttggcgccacttccactgcggcgccggcttttggaacggctgctgccacgcccgcttttggcataccagcagcaacgtcggcttttggagctccagctgctacgcccgcttttggagctgcagctgccactcccgctttcggagcacccgccgccacgcccgcttttggagcacccgccgctacatccgcctttggagcaccagcagccacaacggcgtttggagcgccagcttccacgcaagcatcggccttcggagcacctgcaccagccgtgggcactgtggctcccactttctcctttgccaccccggccacaagtgcgccgaccaccgcgccgccggcctttggattcggcaccaccgccacaacggcggcagctgcgatgccagcatccctcagctccggaattggatcgttttccttccccaagccacaggccaccacggcggccagcttgaactttaacacaaccacgacgacggcgacggcacaacccttcaacacgggtctgaaactgggaaccaccaatgcgacgacaaccctaggaggaggaggaatctttagcaagccagcgggtcaggcagctgccccggcagcatcgactttcgtgggtctgggggggatcgatgtgaccgccacgcaaccaaagctgggggacaataagcaagatggcatcaaggtgctgaccatgagtctttcacagagaaacaaaataatcattttattttcgaccactccagattaaggaaacccaagtgcccgacgagataataaaaacggtggatggcctaaaagcgtatatcaaacagcagaagaccatctcctctgacattggacggacatccacctccaaattcacgaatgtcagccacgagatcacgaacttgaaatgggcgctgcagaatatggccactttagttgagggcagcaatcagcagatccgcctgatgcgccaagagaccgtcaaggcgattcaatctctggagatggcccaacgcacgcaggacaccccagccggcctgcagttcgagaacaatgctccgttccagtactttcagtgcctggtggcgaagtacgagcaggatttgatcgcctttcgccagcagatcgctctgaccgagcgccacatgcacgcgatctcgaatccgcagagtatttcgccggatgatctaaagcgtggctttcgccaacttaatgagagtttcatctcgctggcgggacgcctccacgaggtgcatcagcgggtggaggagcacaaggagcactacctaaacctcagacgctaccgcctgcgagacaccaccaacgttttcgagcggattgacaatcctccgctgccgacggtggaacctcaacggattagtagcggtccaacgcccttctccaacatctcggctctgatgaacaagtcctatgcagcggcggccagttccgccagcaatgcgacaggcaattgagaatggcactctttacaagtttcaataaatcgttatgtcgaaaggggcctagactttcactttcagttatagcatagaatatatatttcacacgcaacaatctttatttcttcaccacctggatgacgtcctcgtcggccatcacatgggcaatccccacgcgctgcggcgagtatttcgtggaggtgccccacaccagggcatacttgaactgcgccgccagcgtgcgatggatggcatggcacacatgctccacactgacgccctaaacaaggaatatataaggaattagagttgctttaccaggctgaagaaggaattggatgaatggaaaacagtctcttgcctttctcagaatcaatccatcgtcaaagtctggaggagcgcctggcttctttgtgtacactctgatgagctggagagcttcccagagcgcctccatcatgtagtccagattaagtttcatgttgcaactaaccactatcgagtttggctggcgcgccaagcggtccacctcctcgatggagatctgatcgatcttgttgtagacatacagacagggcagatacacacggttggcggtgaccacgtcgatgaactcgtcctcggtgcagtcttcgcggaagagcacctcggcgttgaagatcttgaaggagtgcaggatggtctggaccattttctcgttgcagcgcgtaagggaacaggtggcgttgaagctcaggccgccgcccttcttctgcttgaagtagatgttgggcttgcgcttgttcagacgaatgcccacgctctccagctctcgctcgagcagctcccggtgaacgttgggcttggtggcgtccagcatcatcagcaccaaatcagcggtgcgggctacggcaatgacctgacgaccacgccccttgccctgggcagcgccctcgatgattccgggcagatccagcaactggatattggcaccctgatactcaatgacacccggaatgcaggtcaaagtggtgaa

SEQ ID NO: 16439 - DNA, 1742 bp, DROSOPHILA
atgctcaggcattaaacaaaattaatttcgaaatttgttgcagtaaatatagtttaattgtttaaaattcctgtataaatccttaagaggggtgcctaaagatgtttacgcccaccacgaacaacgccattggaggcgccactgctgctaccggcgcttttgcttttggcgcgcgaccggcgacgacgactgctccgcctccatcctttggagcagccacctctacgccaaccttcggtgctgctccggccaccacctccttgtttgcagctcccgcggccacaccggcctttggggcaccagctgctacgccggcttttggagcacctgcgtccacgcctggttttggcgccacttccactgcggcgccggcttttggaacggctgctgccacgcccgcttttggcataccagcagcaacgtcggcttttggagctccagctgctacgcccgcttttggagctgcagctgccactcccgctttcggagcacccgccgccacgcccgcttttggagcacccgccgctacatccgcctttggagcaccagcagccacaacggcgtttggagcgccagcttccacgcaagcatcggccttcggagcacctgcaccagccgtgggcactgtggctcccactttctcctttgccaccccggccacaagtgcgccgaccaccgcgccgccggcctttggattcggcaccaccgccacaacggcggcagctgcgatgccagcatccctcagctccggaattggatcgttttccttccccaagccacaggccaccacggcggccagcttgaactttaacacaaccacgacgacggcgacggcacaacccttcaacacgggtctgaaactgggaaccaccaatgcgacgacaaccctaggaggaggaggaatctttagcaagccagcgggtcaggcagctgccccggcagcatcgactttcgtgggtctgggggggatcgatgtgaccgccacgcaaccaaagctgggggacaataagcaagatggcatcaagattaaggaaacccaagtgcccgacgagataataaaaacggtggatggcctaaaagcgtatatcaaacagcagaagaccatctcctctgacattggacggacatccacctccaaattcacgaatgtcagccacgagatcacgaacttgaaatgggcgctgcagaatatggccactttagttgagggcagcaatcagcagatccgcctgatgcgccaagagaccgtcaaggcgattcaatctctggagatggcccaacgcacgcaggacaccccagccggcctgcagttcgagaacaatgctccgttccagtactttcagtgcctggtggcgaagtacgagcaggatttgatcgcctttcgccagcagatcgctctgaccgagcgccacatgcacgcgatctcgaatccgcagagtatttcgccggatgatctaaagcgtggctttcgccaacttaatgagagtttcatctcgctggcgggacgcctccacgaggtgcatcagcgggtggaggagcacaaggagcactacctaaacctcagacgctaccgcctgcgagacaccaccaacgttttcgagcggattgacaatcctccgctgccgacggtggaacctcaacggattagtagcggtccaacgcccttctccaacatctcggctctgatgaacaagtcctatgcagcggcggccagttccgccagcaatgcgacaggcaattga

SEQ ID NO: 16440 - protein, 546 aa, DROSOPHILA
MFTPTTNNAIGGATAATGAFAFGARPATTTAPPPSFGAATSTPTFGAAPATTSLFAAPAATPAFGAPAATPAFGAPASTPGFGATSTAAPAFGTAAATPAFGIPAATSAFGAPAATPAFGAAAATPAFGAPAATPAFGAPAATSAFGAPAATTAFGAPASTQASAFGAPAPAVGTVAPTFSFATPATSAPTTAPPAFGFGTTATTAAAAMPASLSSGIGSFSFPKPQATTAASLNFNTTTTTATAQPFNTGLKLGTTNATTTLGGGGIFSKPAGQAAAPAASTFVGLGGIDVTATQPKLGDNKQDGIKIKETQVPDEIIKTVDGLKAYIKQQKTISSDIGRTSTSKFTNVSHEITNLKWALQNMATLVEGSNQQIRLMRQETVKAIQSLEMAQRTQDTPAGLQFENNAPFQYFQCLVAKYEQDLIAFRQQIALTERHMHAISNPQSISPDDLKRGFRQLNESFISLAGRLHEVHQRVEEHKEHYLNLRRYRLRDTTNVFERIDNPPLPTVEPQRISSGPTPFSNISALMNKSYAAAASSASNATGN

SEQ ID NO: 16441 - DNA, 3113 bp, DROSOPHILA
ctcagaagcgcctctaccgaagtcaagctcgtgccgaataactcaagctactcagttgacagaccaaactactcagctctgaatgtaaatgaagagtcagtcgatgtgagctcagaagaggatgccacgaataccctgaaggatgaaaaagtcgttctgatcaggctgcaacaggagtactatcgatgcgaaaacgcccgggcagccgagaagcacaagcttgagatggagaagcagaaatacgagctggagcagcgaaaggtggagctgcgcaatatgcgcctgaaaaacgaacttctcgaagcggaaatactcgaaaaacgacgcaaagtcgcgcaaagcaaggcttcatcctaaggaattgctagctaggataagttaatttattcttgtcttcataatgtcagtgctcttcagtaattactatagtcctagttaaacaaaagattatcgaaagaaactcatgtacactccttgatttttgaaaccagaagcaaacaattacatcttcaaaagatttaataatgtctgtcaaacttctaaagattcgtctacattttaacaagtaagctggatttaggctgctggatttaagcccttcacatttattcctcctcagttcgaatgaattgctcgtttatgctcggtcgttctgtttggttgtatttattaatttacatcgatccattcactatgcagttgggggcttaaacgataacagctcctctagccgaccacgagaagaccctcgttggggaactcgtgggtgggcacctccaagttgaggggcgcgggtcccttgcggatccttccggaggcgtcgtagtgggagccgtggcaggggcagtagtagccaccccagtcgccggcgttcgcgatgggcacacagcccagatgcgtgcacactccgatgaccaccagccactcgggcttgatcacacgttgctaaagaggaaatgggtaacagcattagcgaatcgacccactccacggtacctacatcatcagcctccggatcgcgcagcgtggatgtgggcacatttcgctcggtctcgatttccgcggccgtgcggtggcggatgaacaggggctttccgcgccacttgaaagtaaccgacttgccctccgggatgtcggacagcttgatctcgatcttggccatggccagcacttcggcggaggcgctcatcgatccgatgaaggtgttaaccaggcccttggccgcataggcaccgcccacggctccggcgccgaccatcaagtaggagaaggccttgcgctcctcggcggtgtcgttgcgacgacgactgtccttcacggactcccggcggtatgccgagaagtctggcacctgcaggtcggtgtgtgcctggcgattggctgaaaggaaggagggaatcattaattatccattgatcgaagtgcagaggttctatagatccttgtgcttgtttgcagagcagtgttgctgatataatcataaattttttgtgtggtgggcagtgaagagtgtaaacaacattgttttggggttgtcaaggctgaaggtatatttcttatagccgacacagggcatcttgggccaacttggcataacttggcgtcccttgcagacagaggtgccaaacttcgcatgatgatattcctggtcccagaggtagtaaatcccacgtttggcagaaatcgattgagtatatcccacagatccgatgtaaattgcaggtgtgcttgtgagccagtgattgttgttattgtacgaggttatgttgaaattacgtaaggaaatttgacaaatcgccttaaagccgagtgcaaatcacgtcctggtggcatttccaagcttttattcaactttttccgcctatttcccgatccattcattatgtaatggctgtgttttcagctggcagctcgatgaattcgcctcgcagagccttacccatcgagttgacggccacgccgctcgccttcaatcccgtggagaggacctgggctccgcctctgacgtaagcacgcgacacggcgttcatcattttgtatgtttccctatcaaattaaatgatcacgaaaatttcgacgtttgtcgttttcgtctgagaaccagtgtgaccgcactcaagtgggtgagaaataccaggtaacctgcaaaaaataccacaatatactagtatatattagtgtatagtgctgccagctatttgcattctcagagttgccactacgattgctcactgtcaggagctggccgctattacagcccagtaacggttttttaaataggtgaatagaatttcaaataatttttggaacaaatgatattgtagctcgttaaaccaccccgcagtgcataaaagcttttactttaatttaaattgatatgcatttcatgttgaaatgataatcctgcgtcgaattaaattgcatttgtttcaccttgccgttcaatccttcatcccctttcgttttccttcgaaaggtgaaaaggaggctcagtttccacccttcgaccttttcattcaagtgaaaactacctttcttttcaattggaaactgcagtggcatagatttagcccggatgaaaaggggtttccatggcaaaccggttggtcaacgcaccaccgagtggagaacaaaagacgaggtccaaccaccggactttcactatccagtttttccactgcacttttccattttcccccgggcagcatcattatgatgtcattgattggactttgctggatgttgcctattttcttcggggtagtttctctcagcttaattaataagcgtagctcctgaattggagatatgcctcggctgatctcatccaacgcataaaatggcaataaaaactgcataaaaaacagccgatgtaggggaatttgttatgcgcataaaagtttgccgcccgaaatttggccaaactttaaaaccaaaaaagcggccgtggcagcggggaaaactctcccgcagccggctgaaatgtaattcctctggcgccagtcctgtgattatcgaaagtagttctttttgatgtcgaaactttgctgccacccactcccctcctcctttcactggctaggtggcaagtgaaagtgggcccgaaagtgctc

SEQ ID NO: 16442 - DNA, 554 bp, DROSOPHILA
gcggtcacactggttctcagacgaaaacgacaaacgtcgaaattttcgtgatcatttaatttgatagggaaacatacaaaatgatgaacgccgtgtcgcgtgcttacgtcagaggcggagcccaggtcctctccacgggattgaaggcgagcggcgtggccgtcaactcgatggccaatcgccaggcacacaccgacctgcaggtgccagacttctcggcataccgccgggagtccgtgaaggacagtcgtcgtcgcaacgacaccgccgaggagcgcaaggccttctcctacttgatggtcggcgccggagccgtgggcggtgcctatgcggccaagggcctggttaacaccttcatcggatcgatgagcgcctccgccgaagtgctggccatggccaagatcgagatcaagctgtccgacatcccggagggcaagtcggttactttcaagtggcgcggaaagcccctgttcatccgccaccgcacggccgcggaaatcgagaccgagcgaaatgtgcccacatccacgctgcgcgatccggaggctgatgat

SEQ ID NO: 16443 - protein, 158 aa, DROSOPHILA
MMNAVSRAYVRGGAQVLSTGLKASGVAVNSMANRQAHTDLQVPDFSAYRRESVKDSRRRNDTAEERKAFSYLMVGAGAVGGAYAAKGLVNTFIGSMSASAEVLAMAKIEIKLSDIPEGKSVTFKWRGKPLFIRHRTAAEIETERNVPTSTLRDPEADD

SEQ ID NO: 16444 - DNA, 5028 bp, DROSOPHILA
gtttaggtatttagccatagacattttggttaatcaataaataagagcattgcttaatattgacaccaaaattcactagagagcgaatagtgtgacctaatttggcattaaaagaagaagagtggcacacagacatatgtactttgaaatgaaagtggttgtttttacctatttaaattgaaaaataaattactccatataaaaatcggagcctaggctctgtgtgaaacccttccagaaatcttaaatccatcaaagatggcttatagtaatagtgtcacttaaacattattcgatagttaaaggcagacaaaattttgttccgaatactccagaaagtttcaggaaacgtaaatgcaaagaaactgtttctctttgcgcgtaagttaccaccattccatacaaaacattaatttaattcgttctttccgatcagcccttccttcggggagtcggtgatgtgggtgcagtttgtaagcccattcgtgaatttcgcaactcggctgctttgaaatatgctgctgctgcagctgcagctccgaagacacgtcctggaaaagttcctccaaaaatggtcaaattgaggaagcaatttcaggcggacaatgatttgccgatttttctaaaaggcggcagtatggataacatattatacagactcacctgggtgctctgcttcctcggcataggtggcgatgtatggttgtggcttggctatatcattgcctaaaatcaacagagatcatgcaagcaagcccacaaaacacaaatactctgtacacgaatgcaaataccaattgtaacgacacatacattagttaactagtaacgtttctgtacataggtagttcaaatacggaaaatcaattatataataataataatgtgctttacttcaaagtgttcattggagtttttaaattatgccgccaatattttgccattcacatatcatataacacatatgtggtgttatatcgactcacaaagcagctggtcacactgcttgaacaacttgcacttttgtcggcatttcttaactgcatattttctcactttttaaaggtaagtacgcacgaaattacttattgattatcttttccacttaaaacacgaatgcccggtgggtttttgtttgttttgcgattgactaaccacgtagttcttaaacattcacattttccttgggctctgccagttcttcacgttttcgggctccattttagccatagttttgttttctatattcttgtggtaaaacgccgcttaactgccacatctgcagtttagccggcttgctggagataaaattgcattatcaagttttcatgtgttccccgagttatttggcttttcatccaaattaaagtagccttttcacattttccagttgggcgacaagtaatgtaaagtcttcaaatagaatactctcaaaaaattcccagtaatgttttggctaagagggctacagagatcccggcagcaactgaacaggctgtgtcatttccgtagtcgtctaaattacgggaccagtcccagtattcgctcagtccaaccgtcaatctccagaagtttgggattttgtagctccctcgttcgttacaggtatttgccaggtgttatctaaagcccatgtatataatcggtccggttcgccatatgatatctttgcagctgcagcaccaaccttccccaacccgctgagatggccagtaaaaccgcgcacttcgtcctgcctaacacgcagcccattgccgatttggactgcaagagtgccttcgagaatctcaccgagaaggagaagctctacgcccaccacttcagccaggcctcctgggacggcggactcattgccttgatccagtccagtccggaggcgccgctcatcttctccctgctgcaccgcattttcctagccgaaaagattcctgttcttagggcgaaagccctggaggcgggagtgtctgctgatgattttacggtatggcagaggagagtttcatattctcgaaaataaatattaattttgatcactttcaggccttcctagtgtacgcctgcggtgtgttcgccaacgcgggcaactacaagggtatgggcgacagcaagatcgttcccaatctctcagaaaagcaatttgagactatagtaaaggcatccgctgcttacagcgatgagccgcgcgtaggcaagatcttcgagaaggtcaagaatctgatttatgcgctcgagtcgcgtaacgagatcctgggctttgctcccgacggaatcaccacctactggtcggataactgcaccaaggaggactccgagatcgtgaacgcttggctgacctcaaagcgtatcgaaccgtacatgtgccggaccttcaagatagttgaaaatggtcaaaccgtctacgatgtaaagctgggctccgtggcggagtccacgcaggacggcatcacacttccgctggaagagtataatggcaacaagtttagggtgacacgcggtgattaccagaagctgcttcagcgcgtcaaccagcatctgctgcaggcccagaaatacgcagccaatgaaaacgagtccaagatgatcgagcactatgtccgatcctttgaacagggctcgctggacgagcacaagaacggatcgcgttggtggatcaaggacaagggacctgtcatcgagacctacattggtttcattgagacatacagggatcctgctggaggtcgggctgaattcgagggcttcgtggccatggtgaacaaggagagctcggccaaattctccgagctggtgaaccgcgccgagaaactaatagagtacctgccctggacggagccttacgagaaggactcttacctgaagccagacttcacatccctggatgtcctcacatttgccggcagcggagtaccagcgggcatcaatattcccaattacgacgaaatccgccaggatgaaggcttcaagaacgtctcgctgggcaatgtgctggccaacatcaaccgcaaggatcccattcctttcctcaccgaggaggatcaaactctgatgaaagagtacaaggtgaaggcttttgaggtgcaagtgggcctccatgaactcctaggccatggtagtggcaagctattccgcatcgacgaaaatggtgtgtacaactttgacaaggagaacactaagaacctggtcaccggtgaacccatcaccaagtggtatcttcctggagaaacttacgacaccaagttcggagcaattggttcctcgtacgaggaatgccgcgccgaggcggtgggcttgtatctctccctgcagcgtgacatcctggagatctttggcttcaaggacaaagccgagcaggacaacatcatctatgtcaactggctgagtctcatctggaacggcatgggtgtggctctggaaatgttcaacccgaagtccaagctgtggctccaggcgcactctcgcgctcgtttcgtgatcatgaaggtgctgctggaggcaggcgaaggactcgttaaggtcgaggaaaccgaaaagggtaaaaaccttttgctgacggtggatcgcagcaagatcgataccgtgggcaggaaggcgctgggcgatttcctgaccaagctgcaggtgtacaaatccaccgccgacatcgaggcagcttccaagatgtacgaacactactcgaaggtcgacgagagcggatcgcatccgtgggccaagtggcgggatatctgcctggcgcacaagaagccgcgtatgattctcgtccaggccaacacggcgatcggccaggaccaaaaggtccagctgaagacctacgagcccacccacgaggggtacatccagtcatgggtggagcgctaccccaacactgacatcgacgatcttctggagagcatcgtggagaaggacaagaagtatttcccgactgccttcaacaactgagaacatttcgcatttaacattttcgccttcattatcaattcaatttgttaactatgattttgaaaaaaaatatataaaaatatatatagtcatctaatgaccaacaattttaaattttaaattgcttttatagtaaaactttcgtagtgaatggtgattttaagatcgtttttgccattcaccgaaaatattgacaaaggacctgaatttaattgcttgtatgtacatacatatattgcgaccaaatgtatattgctcataatagctccacaattaagaatgtaaatataaaatcaaatactacaatttgttcattgaatgttttcatagtagccagtcgataaatattggtttttttttttttattttgtttctcgtttccatttctgtttgcattgttttgaccaccatggcaaccggtagaaatcgtggtaaccacaaggaaggtggcactatcaacatcggacagccgctattccaggtgcctcattcattgcgcaaggagcacgactttttcagctcacagctgttccgaaaattgcagtacgacctggaggaggtgagccgcagccaggagctttccaaagtgagtcccataacccgcgacttcatcgaggaggcagcgatgacgcaggaaatgcaagatcttaagcgtgcggagtttgtggagaggaaacgtcgccagcaattgcggcgggattgcgaggaactgcgcgacttggcggagcagctgcgcctagccgccatttccagggatatagccgagaatttggaggagaaaaaacgtcgtcgacagctagacatcaaattggaagccgcggaagtgtcccaagagcgctgtctgctggaggtcaggcaacgtgagaaggaagtggctcttaaggaggaacaacgccgccttagggagtccttggctgaacaaatggaggagaaccgccgacggcgcctgcaagagcacgctcaggtgatgaatgaccgggagctgagccttctgatgcagaagcaaatccaggaagaggatcgagcccaggagctggaggcgcagagaaaaaaactacaaaagcgacaggacatgctgcggtccatcaagga

SEQ ID NO: 16445 - DNA, 2360 bp, DROSOPHILA
cactgcttgaacaacttgcacttttgtcggcatttcttaactgcatattttctcactttttaaagctgcagcaccaaccttccccaacccgctgagatggccagtaaaaccgcgcacttcgtcctgcctaacacgcagcccattgccgatttggactgcaagagtgccttcgagaatctcaccgagaaggagaagctctacgcccaccacttcagccaggcctcctgggacggcggactcattgccttgatccagtccagtccggaggcgccgctcatcttctccctgctgcaccgcattttcctagccgaaaagattcctgttcttagggcgaaagccctggaggcgggagtgtctgctgatgattttacggccttcctagtgtacgcctgcggtgtgttcgccaacgcgggcaactacaagggtatgggcgacagcaagatcgttcccaatctctcagaaaagcaatttgagactatagtaaaggcatccgctgcttacagcgatgagccgcgcgtaggcaagatcttcgagaaggtcaagaatctgatttatgcgctcgagtcgcgtaacgagatcctgggctttgctcccgacggaatcaccacctactggtcggataactgcaccaaggaggactccgagatcgtgaacgcttggctgacctcaaagcgtatcgaaccgtacatgtgccggaccttcaagatagttgaaaatggtcaaaccgtctacgatgtaaagctgggctccgtggcggagtccacgcaggacggcatcacacttccgctggaagagtataatggcaacaagtttagggtgacacgcggtgattaccagaagctgcttcagcgcgtcaaccagcatctgctgcaggcccagaaatacgcagccaatgaaaacgagtccaagatgatcgagcactatgtccgatcctttgaacagggctcgctggacgagcacaagaacggatcgcgttggtggatcaaggacaagggacctgtcatcgagacctacattggtttcattgagacatacagggatcctgctggaggtcgggctgaattcgagggcttcgtggccatggtgaacaaggagagctcggccaaattctccgagctggtgaaccgcgccgagaaactaatagagtacctgccctggacggagccttacgagaaggactcttacctgaagccagacttcacatccctggatgtcctcacatttgccggcagcggagtaccagcgggcatcaatattcccaattacgacgaaatccgccaggatgaaggcttcaagaacgtctcgctgggcaatgtgctggccaacatcaaccgcaaggatcccattcctttcctcaccgaggaggatcaaactctgatgaaagagtacaaggtgaaggcttttgaggtgcaagtgggcctccatgaactcctaggccatggtagtggcaagctattccgcatcgacgaaaatggtgtgtacaactttgacaaggagaacactaagaacctggtcaccggtgaacccatcaccaagtggtatcttcctggagaaacttacgacaccaagttcggagcaattggttcctcgtacgaggaatgccgcgccgaggcggtgggcttgtatctctccctgcagcgtgacatcctggagatctttggcttcaaggacaaagccgagcaggacaacatcatctatgtcaactggctgagtctcatctggaacggcatgggtgtggctctggaaatgttcaacccgaagtccaagctgtggctccaggcgcactctcgcgctcgtttcgtgatcatgaaggtgctgctggaggcaggcgaaggactcgttaaggtcgaggaaaccgaaaagggtaaaaaccttttgctgacggtggatcgcagcaagatcgataccgtgggcaggaaggcgctgggcgatttcctgaccaagctgcaggtgtacaaatccaccgccgacatcgaggcagcttccaagatgtacgaacactactcgaaggtcgacgagagcggatcgcatccgtgggccaagtggcgggatatctgcctggcgcacaagaagccgcgtatgattctcgtccaggccaacacggcgatcggccaggaccaaaaggtccagctgaagacctacgagcccacccacgaggggtacatccagtcatgggtggagcgctaccccaacactgacatcgacgatcttctggagagcatcgtggagaaggacaagaagtatttcccgactgccttcaacaactgagaacatttcgcatttaacattttcgccttcattatcaattcaatttgttaactatgattttgaaaaaaaatatataaaaatatatatagtca

SEQ ID NO: 16446 - protein, 723 aa, DROSOPHILA
MASKTAHFVLPNTQPIADLDCKSAFENLTEKEKLYAHHFSQASWDGGLIALIQSSPEAPLIFSLLHRIFLAEKIPVLRAKALEAGVSADDFTAFLVYACGVFANAGNYKGMGDSKIVPNLSEKQFETIVKASAAYSDEPRVGKIFEKVKNLIYALESRNEILGFAPDGITTYWSDNCTKEDSEIVNAWLTSKRIEPYMCRTFKIVENGQTVYDVKLGSVAESTQDGITLPLEEYNGNKFRVTRGDYQKLLQRVNQHLLQAQKYAANENESKMIEHYVRSFEQGSLDEHKNGSRWWIKDKGPVIETYIGFIETYRDPAGGRAEFEGFVAMVNKESSAKFSELVNRAEKLIEYLPWTEPYEKDSYLKPDFTSLDVLTFAGSGVPAGINIPNYDEIRQDEGFKNVSLGNVLANINRKDPIPFLTEEDQTLMKEYKVKAFEVQVGLHELLGHGSGKLFRIDENGVYNFDKENTKNLVTGEPITKWYLPGETYDTKFGAIGSSYEECRAEAVGLYLSLQRDILEIFGFKDKAEQDNIIYVNWLSLIWNGMGVALEMFNPKSKLWLQAHSRARFVIMKVLLEAGEGLVKVEETEKGKNLLLTVDRSKIDTVGRKALGDFLTKLQVYKSTADIEAASKMYEHYSKVDESGSHPWAKWRDICLAHKKPRMILVQANTAIGQDQKVQLKTYEPTHEGYIQSWVERYPNTDIDDLLESIVEKDKKYFPTAFNN

SEQ ID NO: 16447 - DNA, 3914 bp, DROSOPHILA
tcctgctggtcgcccataatttggtcggataatgtccggacgggaagctatgccgtggccggctatacggctgcgctatccgccgtaatgatcacgctgatttcgtatatgctagcaggcggggagtctgcgcagctctattccccgctctttgagacggatatacgttcgtcgatgcccgtggcaggtggcttctttatcatctacttcctgctaatcatcctgtcttcctatttggtctactacggtattaagatcaggtaagacgagctctggcttcctatatgtacggatatagtcatgcttgcatctgtttctcagcactcgaggatggctgctaccctggctgggtctaattggactagccattctcttccagtttagctggagcctttggcttattggaggctactatatttatgtgagtagcgattatcttttccattaactaaagctaatgaattcgtgttactctaccgccagctggagcaaaccttctcggcccttttgaacttcgtttgggtagcctacaatgtaagtgtttgaaattcaagggacagcaacaccaactcctgtatcattatgtttataaacccattttactcatccacttagatctattgctggctggtggtcttctcgcagtaccagatattcctggagatccagaatccgaacattgagctgctcatgccatgatggaagaacctccatacagaagctcgaataatctattagaatactttttgacttgacacgcaacaagaactccgtccatgcgcattttttacaataagaattccatacaattccacagatgcctaccaaatagttttatataaatttatatattttacacacatttatacacgatcaattatacttatgtgtaattcgaatgccttagtcttctaaacgacaattaaacaaatagattcgtaaaactactgctactggatacgggctccttggggccaagaaattattgtgggttttgaatatcaacgtttattaccataaattaagtttaggtgtactctaattatacgagtttttgtgtgtttacattgagaaagatattgtttgtacagaaactttaaatgaaaactgacgacctataaccatagaagcgagggatctaaactgggtgaaagaggggaaagtcgaaaagggatcgggtctaagaaagtcactaaatatacattaaggtaaatcttaggatcgaatattttacagagcctggtgttagacacagagcaatgggttggataggctggcctaatagactaggtcttctcctccttttccttgttgtagcgctccagttctttgaggaactgcgccttgggtttcattacatttggccgttctccgcggcagttggggcagaaccacttgccttttggttttagtaccagggagacgcacgaaaaatggaaccactcgatggggcacaggtcattgtcgcacaggatcatctcgccaaaggagatctgcaatagaaaacgtgattagtggcgaagcttttcgataggaaaagcactgcgaactcacctgattgcagacacagtaggtcggctcgtccggatcaatggtctccggcggcggcgtctcctctcgcgtactggcattggcatttgaagccccagaaccgcgtaccttgcgctttttcttcttgccggaattattgccaccaactacgccggctccgctggcaccaccacctccggctgctccactgctcgtggctgcagagccgctagccaaactgccagaagccgactgcagactggcctttcgtccctgtcccgctccactggcaccgcccaacgaggatttgcgctcgccactgccaccaccactgccactggcttcatttgccgagttggactcgttgccgcccatctccagagagcttccgttgttaacaacactctcgtttcgcctcctcgaccgcttgctacctgtgcgctgcagttctccgcctcctccgccgctggcattgccattggagccgctgttgccaccattactgacatggctcgagcgctccgagttgggcgttgagccgccaccgttgccggaggtcatggcattagaaccaggcacaacaccacctgcatagccgcccaaggcgtacagatctttggccgaaagcaggccgtttccatttaggccaccgttgccagtgcccgcttggttgccctgctccctcatcgggctctgcaggcgttgcagcttcgaaggcgtgccatcgtccaggagcgcataccgatcgcggtcctccttcaggtccaggttctgctggtcggtgtccagctggcgcagcttgccgtcgattatctcctgcatatgattgacgatctgcattttttcgtcgcccagttcctgcgcctgaatgagactctggtgcatcctggagatgcttcgagaccgtcgcccggcatccgcggagttctgcagggacagatacaggtcgtagtagtggtctacgtcgcgaatgaggcctgcaaatcgacgggtttggaccaagagaggaggttaggttttccgcttttccaacaggcgtaatctcggccagaactcacctctgtactggacgtctatgtcgcggatgcgtgacaactggcgctgcacgtcgtccggcagattttccaccgaatcgatatagttgtccacataggtggccgaattgatggcctccgactcggatgcaatggggtttatcatcgtgtttggactgcgaatcgctctattcccgccgcgacatcggctcggggacgtgggttcggatgtgagctactcttccggcgctctggaagggatcggctggctatatagtactccgattccactcagttccaactttttgtatggcgttgcgagtcgcaacttgcgactgtactcgtgtgtgcgtgtatgtgtgcgtaggtattatttatatgtatgtatacaatgggtggttgtgctttgcaacactagtcggctggtgttttgctacactgaaatcggggtggttaacggcactgctgtttcggttgaattttttaataaataagtaatattggttttaatagtttgtggtcaaatatcttctcatcatttccctaggcaatagaaagtattaaaaatattttccctttaaatacaaatttaattattactttcagtcctttttttgtattcattttattacaattatcgtaattttaaaatcatgtatcattcattcaacggccagtgtaggaaacgttcaaaaccaaccccttactcatttgcccgggaaactggagaatttcaaataacagtatcagctgattttttaattaggaaaaacaaatgcacttatattattttttaattgattattatttaatattaataatataaatatttattgttcctttcatgaaacatacgtctgaactattcagatttgtatttaggttgtcaagtctattcttcattaagcttaacgttattaaatgcataatactattatacgaattatatatttttaaaatattgttcgtgcattatcttctatgtcggcacttactaaacgtcaccttagaagtattacgtacttcgccatgaaagtatataaatttttataaaaattatatatattcaatagtttgagtcttttcatcctgagttctggctcgcacttcctgtgcatttggctgcattggtgtttgagattcaaagtccatttccttatcaatatctttaaatgcttgttgcagtccattaacttcttcttttatagctttctgcatattatcccgatgcaaatcggtgtttttgtgtttgtttagattatatctatggcggtagtgaacatcgcagatctcgcacctggcaatataaatcaagtaaagaaataagtaaacggacagtagtcgggattc

SEQ ID NO: 16448 - DNA, 1772 bp, DROSOPHILA
cacacacgagtacagtcgcaagttgcgactcgcaacgccatacaaaaagttggaactgagtggaatcggagtactatatagccagccgatcccttccagagcgccggaagagtagctcacatccgaacccacgtccccgagccgatgtcgcggcgggaatagagcgattcgcagtccaaacacgatgataaaccccattgcatccgagtcggaggccatcaattcggccacctatgtggacaactatatcgattcggtggaaaatctgccggacgacgtgcagcgccagttgtcacgcatccgcgacatagacgtccagtacagaggcctcattcgcgacgtagaccactactacgacctgtatctgtccctgcagaactccgcggatgccgggcgacggtctcgaagcatctccaggatgcaccagagtctcattcaggcgcaggaactgggcgacgaaaaaatgcagatcgtcaatcatatgcaggagataatcgacggcaagctgcgccagctggacaccgaccagcagaacctggacctgaaggaggaccgcgatcggtatgcgctcctggacgatggcacgccttcgaagctgcaacgcctgcagagcccgatgagggagcagggcaaccaagcgggcactggcaacggtggcctaaatggaaacggcctgctttcggccaaagatctgtacgccttgggcggctatgcaggtggtgttgtgcctggttctaatgccatgacctccggcaacggtggcggctcaacgcccaactcggagcgctcgagccatgtcagtaatggtggcaacagcggctccaatggcaatgccagcggcggaggaggcggagaactgcagcgcacaggtagcaagcggtcgaggaggcgaaacgagagtgttgttaacaacggaagctctctggagatgggcggcaacgagtccaactcggcaaatgaagccagtggcagtggtggtggcagtggcgagcgcaaatcctcgttgggcggtgccagtggagcgggacagggacgaaaggccagtctgcagtcggcttctggcagtttggctagcggctctgcagccacgagcagtggagcagccggaggtggtggtgccagcggagccggcgtagttggtggcaataattccggcaagaagaaaaagcgcaaggtacgcggttctggggcttcaaatgccaatgccagtacgcgagaggagacgccgccgccggagaccattgatccggacgagccgacctactgtgtctgcaatcagatctcctttggcgagatgatcctgtgcgacaatgacctgtgccccatcgagtggttccatttttcgtgcgtctccctggtactaaaaccaaaaggcaagtggttctgccccaactgccgcggagaacggccaaatgtaatgaaacccaaggcgcagttcctcaaagaactggagcgctacaacaaggaaaaggaggagaagacctagtctattaggccagcctatccaacccattgctctgtgtctaacaccaggctctgtaaaatattcgatcctaagatttaccttaatgtatatttagtgactttcttagacccgatcccttttcgactttcccctctttcacccagtttagatccctcgcttctatggttataggtcgtcagttttcatttaaagtttctgtacaaacaatatctttctcaatgtaaacacacaaaaactcgtataattagagtacacctaaacttaatttatggtaataaacgttgat

SEQ ID NO: 16449 - protein, 433 aa, DROSOPHILA
MINPIASESEAINSATYVDNYIDSVENLPDDVQRQLSRIRDIDVQYRGLIRDVDHYYDLYLSLQNSADAGRRSRSISRMHQSLIQAQELGDEKMQIVNHMQEIIDGKLRQLDTDQQNLDLKEDRDRYALLDDGTPSKLQRLQSPMREQGNQAGTGNGGLNGNGLLSAKDLYALGGYAGGVVPGSNAMTSGNGGGSTPNSERSSHVSNGGNSGSNGNASGGGGGELQRTGSKRSRRRNESVVNNGSSLEMGGNESNSANEASGSGGGSGERKSSLGGASGAGQGRKASLQSASGSLASGSAATSSGAAGGGGASGAGVVGGNNSGKKKKRKVRGSGASNANASTREETPPPETIDPDEPTYCVCNQISFGEMILCDNDLCPIEWFHFSCVSLVLKPKGKWFCPNCRGERPNVMKPKAQFLKELERYNKEKEEKT

SEQ ID NO: 16450 - DNA, 3261 bp, DROSOPHILA
aatgcacggaaactcagaccccgcgattattaaggggttaaaaggttgagttgagttgaaaccatagcgagtggattttaaaatcatgtatttaaaaatttgttattgaggcgtaggattcacagtccgttgaattacttcttcagcagcagaggagcggcagcggtggccacatagggagagctgtaggccaggggcgaggtgtaggcggcggcgtagggagcgatgggagcggcataggcagcggccactggagcggtataggcggcagcaacgggagcggtgtaggcggcggtgtaggcagctgggaaggctgcgctgtgagccaccgagtgggcgctgtagctggaggcatagggagccacgtacgcggcactgcccaccacagccggagcggtgtaggccagaggagcggcggccagaggagccacaagtccaggcttggcagcagccacagccacaacagcgaagaagcagacggcgatctatagacagaagtactccttaattaatagatcccatcaatccttaagataatcaatgaacttacgaatttcatgttgattgttgattggtgctttgtttggtagaagtgactactgggagctgtgagctaggtttgatgttgaattaacccagctggccagcttatatacaacccacttggtcatccggcgaaggccgcgcttacacatgcagctgtcgtcgtcgacatggcagcacaacgtctttgactccgatccaacttactggccagttgaagacgttgttgctccatacgcacacttgtcacgtgcggaccgaattcgtaaagggcattgccgggtttcctagacccgaacgaccttgagcgaaatcggtttcagttactctaattaatttaaatcacaattctttcagcatgcttcataatgagtaattaattactatcatttggtatccgaaaatatcaatgtagcagtatattttctatatatttgtaacattttcgatcaactgttcgttttccgcctatcacaaaattctaacccacaaaaaatctaaaaaatataaaattaaaatttcaaaaacctacaaaaaagcatccaagaatgactcagttaagcgagttcgccctggacagccactttgcctccgagctgcgcagcctgcagttgtattccaaggagcaccctgtcagccaagatgaccacgacataagtcagcgttggatgcagcacttccaaaacgccaagggtttggataaattcgcacgaaactgcatgctgctgatgatgtgcgaacagttgcgagatcttggccacttgagcaaacccttcaccgaactgaagaacttgagtcgccccatggacgatttgctgaacgagtaccatgggacgactactgtggaggaggggcaaatgtcgccggttgaagatattgaggactcggacaccaatgtctccaactatggcagtggcagtagttctttctcccctggggtgccctatcccatttccacgcccgagttcgagagcattaagcggtctaaccaggatctgcttaaggaaatcgactcgctgcactgtcgcacggtggaagcggaaaagctataccttagcaggagccaaattctggagaagcagattgccgagaagtcggcgttggccaaaacgaaacttccccaggagggtatctatcaatcctgccgtgcggcctgccagcttctgaaaaaatggccaggcgagtcagtgcgactcaattttctgaccacctgcctggagccctttctgcggaacgatatgatcaccagcttgcagatctccgagttggatctcagtttcgagaatactctgaatgccatggtgaaacgggcctgctcgcgaagggacgacaatgtccgcatgctatatgaccaaattttgtgccaggaaaagaacgacctgaaggagaaggaggacaaggtgcgacgattacaggaatccacaaggttggagcgccaaagattgcgcgctctagccgaggacttgaaacgtcgagagaatttcatttggaggcaccaggccgtcgccacactggcagttgcaggactttcctccgatgaccaacgcagtcccagttccactaacttaaagtgtgactcatgtctgaaagaaatgtccattagaaaaggacctctggatcccataggcaggagcagcaaaggtgaaaaaaccaatgatgtcgtggatctggagaagttatctgacgcactgagcgatatgtccatagacaaatggtaatcctctagcgacagcacacttttataaatatatatatttttattttcctgttggcatcaataaatcgttgagttgctttaaaaacttccacgcctcccccctcgcacttttcaccgcctgcgcccctgtcaacggcaaaacttttaatgtagttttaattttctcgtaatcacgaagggaagttggctgtagtcctggaaagtcggcaatcatctacgcacttacaccgcgaggaaagtttggttttaatcacatcagtgcctaatgttataattaaggtttttaatttaaatcaatttcccaaggctatacaaactgtattacaattttgtaaaaataatataacatatacatataatttctttaattttcctcagtgtagtgaccatttcttcatccggcgaggatgggaaaagaaaacgcagccaaaaacaacaaagtaggaagcgcagcaacagctttgttcgtaattagtttttaagcgcttcgaaagagtatgtggtggtggatatacatacatatatatcctaagtgggcccaaatagagtgtgtgcgtgtgcgtgggtgtgttttggccatggttatgacaacatgcagttaagcacttcttaacgacggctgactgccgataatggcattttgcttgtgcaataagtgcaattgattttcttggcagctaacataagtttttcagaaataaattatttttgatgccacattattattcagtattaagaggatttttaattttcttaattcccaaaggaaaacttttaaaagcgaaacatctcaagcggccttaaaaaagcgtataaatttcgaaaatttgataaagccaacatttcttgccatgcatacgccaaagaacatacataatagtttttcctcgccgcattcccaaaaaaccattcattttcgaagaaagccaggcaaaagtcacagaaaaagttgctagcagtcgggaaaaagttgtcaaagaaaatgcagtgcctctgcaatc

SEQ ID NO: 16451 - DNA, 1261 bp, DROSOPHILA
tcgttttccgcctatcacaaaattctaacccacaaaaaatctaaaaaatataaaattaaaatttcaaaaacctacaaaaaagcatccaagaatgactcagttaagcgagttcgccctggacagccactttgcctccgagctgcgcagcctgcagttgtattccaaggagcaccctgtcagccaagatgaccacgacataagtcagcgttggatgcagcacttccaaaacgccaagggtttggataaattcgcacgaaactgcatgctgctgatgatgtgcgaacagttgcgagatcttggccacttgagcaaacccttcaccgaactgaagaacttgagtcgccccatggacgatttgctgaacgagtaccatgggacgactactgtggaggaggggcaaatgtcgccggttgaagatattgaggactcggacaccaatgtctccaactatggcagtggcagtagttctttctcccctggggtgccctatcccatttccacgcccgagttcgagagcattaagcggtctaaccaggatctgcttaaggaaatcgactcgctgcactgtcgcacggtggaagcggaaaagctataccttagcaggagccaaattctggagaagcagattgccgagaagtcggcgttggccaaaacgaaacttccccaggagggtatctatcaatcctgccgtgcggcctgccagcttctgaaaaaatggccaggcgagtcagtgcgactcaattttctgaccacctgcctggagccctttctgcggaacgatatgatcaccagcttgcagatctccgagttggatctcagtttcgagaatactctgaatgccatggtgaaacgggcctgctcgcgaagggacgacaatgtccgcatgctatatgaccaaattttgtgccaggaaaagaacgacctgaaggagaaggaggacaaggtgcgacgattacaggaatccacaaggttggagcgccaaagattgcgcgctctagccgaggacttgaaacgtcgagagaatttcatttggaggcaccaggccgtcgccacactggcagttgcaggactttcctccgatgaccaacgcagtcccagttccactaacttaaagtgtgactcatgtctgaaagaaatgtccattagaaaaggacctctggatcccataggcaggagcagcaaaggtgaaaaaaccaatgatgtcgtggatctggagaagttatctgacgcactgagcgatatgtccatagacaaatggtaa

SEQ ID NO: 16452 - protein, 389 aa, DROSOPHILA
MTQLSEFALDSHFASELRSLQLYSKEHPVSQDDHDISQRWMQHFQNAKGLDKFARNCMLLMMCEQLRDLGHLSKPFTELKNLSRPMDDLLNEYHGTTTVEEGQMSPVEDIEDSDTNVSNYGSGSSSFSPGVPYPISTPEFESIKRSNQDLLKEIDSLHCRTVEAEKLYLSRSQILEKQIAEKSALAKTKLPQEGIYQSCRAACQLLKKWPGESVRLNFLTTCLEPFLRNDMITSLQISELDLSFENTLNAMVKRACSRRDDNVRMLYDQILCQEKNDLKEKEDKVRRLQESTRLERQRLRALAEDLKRRENFIWRHQAVATLAVAGLSSDDQRSPSSTNLKCDSCLKEMSIRKGPLDPIGRSSKGEKTNDVVDLEKLSDALSDMSIDKW

SEQ ID NO: 16453 - DNA, 5053 bp, DROSOPHILA
ctttttgcattttcttttgccttttcactacgcttacgattcgagaaattaagtaaatatactaaaactaaagtaaatgcgtaaaatatataaaataaatatagttagcagagatgctgagatagtgcagaatgctttccaagggaaaaaatatataaaaacttttcccaaagcaattcctttgcttatacaatataaaatttaaaattatattcataaaattacgtttgttttggaatttcgagcataagttgcagatttgcaattgattttatgtttgctgtgaaattaaatggaattgtgaaatattcttcagcttgttcggattataaatgcggggggaatggaaggaatatgtttgcaaatcaaattcgaatcggtgtgcgcatttgtttataaatatcaagttttgctgatattgaagctcgataagattgaattggtcgagcgtttgtttacaaattattcgtaaaaaccttgattgggacttcaatttggttcatatgaaatttcagtttcagccattgaattttaaaatattttagttgcctagtgttgcaaacattttccatgctagcttactgactaatttattggtatttttacatagtttaacttattttgttcacaaaagttgctctgtctatagaaaaatatatatatatttatgtataaaactcattgcagtctcttgcttgatttcttcatatcaaatatcattatttcttttataaagtagtcttttcttgttcttgtcggctttatgtccttcacaacgttgaataattctcggctaaccgtatcctcaaaattagatcgtaagtatataaatagaatatatagaaaatacttgatccctgctgcaagattgcattttaaatcgaaaaagttaaattgcgaggtgtgcgctacgctagggaaatgtctccatcatttccaagtacagtggcatcttaaaatgtaatgagtaagaagtgttgctgaccctgaacttaagtctttaaatttccgcctgctgacccacgacagtgaagtagctggttatcttgcgattcgcctttgtcttgccatcggctgtcatcgagctggacaaagcgttctccttctccggcgtgatctcctcgtcgtcttcggtattgggtgctggctccatttgcatggacagcgtgacttggacttgagcatgtcctgctccggcatctgccggtatgtcctggccagatccatcaagtttgacctgcgctgactcctcaggtatttctggcatagcactcaagctacgcttcaggtcattcagtagcttctcctgagcagcaatcttttgctgcagcttctcgcgtcgcggacgtcgtggcgctgctttggctttgggttcgttttcttgctcgttttctgttgccgtttttgtgtgcttcttatccgcctggccagatccagggacttgctcctcgatgccatgctcccgctcctggtggcgcaatagatttacacgcgacgagtagccacgctgacaggcatcgcagttgtagggtttttcacctgtgtgcctgcgcatgtgcacccgcatatctatcttgcgggcgaaacgcttgtcgcacagctcgcactgaatgggtttatcgccgagatgagtgcgtcgatggaccaccagattttggcgtgcacggaacgccttaccacacagatcgcagctgtatggcttttcacccgtgtgaatccgcacgtggatggacaaatctgagctgcgaacaaatcctttgttgcacttgtcgcacttgtaccgccgatcgttcttgtgatgacgcatgtgcagcgagagatcctgcttggtggccagtggcattgaacagatatcgcatttgtatgccttctcggcgcgatgacgcaattgatgctccaccagacgcatctttagacggaaagccctgccgcactgtccacacacgtatggtttctcgccggtatggaggcgcaggtgatcttgcattcttgagaagcgcttaaaggttttgccacagaaattacaggtgtgaattcccccgattccgttgtgctgcgattcctccgatgactcacgtttaatcgaggtaaaactctcatctgttgagctgttgtgcggcgaaatagtggctgaggagtcatcatccacctcagcctcttccacctcgtcatcatcctcctcctcatctttaatttcgacaacgtagtccacatgctggcggctcttgcgcatgcgccgctctgggagttctggctcctccttgatttctttgtctcccagcggaatgagtacgggtgtcggtgacttacgctctttgcgtccgcgcttgcgcttggttgaattggtgggttcctgtattaatgggggtttttatagatagcttcttagaaaaattaatgtgtgatcttacctctgtcatctgctggtgatcctttgcactctcgacaggcatttgctgatgcacttgatccaccattttagatttgccagcattcgcctcactcttgtccaactgcttctggttgctgttgtcatctttttgtgtccctgctttgcctgcttcatcgattgtcaactgcttatcgtggatggtttctttcagagccacggattctgtattatcctttgaatttgtctcagcattctctaggtgcttgggattagtctcagatttctgggccgactgagtaccgtctttttttgatccctttgcgttctgttgaacttttacgacattatttgactgcgttgcaccgttctccgcctggttgcttgtttttttggcctgcagtggctccaatactggctgctgtccctcctctttgttcagttttttcttcttgtccgtcttctccgcattatcctgttcgtctcgcaggctctccggcttggtgcgctttctgcctctttttttgggcataggaagtttgatgatcatcttgttgaccttggagctgctggttttcttcactcgctcggctgcaataaccgccaccatgtcgttgatcatggtgagatcctccttgtcattggacgcgttacttggtggagcctccttgccgtcctgctcgggtggcggagtttccggagctggaatgggcagctgaagctgggcattggccttgttcagagccagagccccgggaattgtgaccatggcatgcggtgggagatcggtgggttcctccttgggcaccagcaactgaaaatagccatgctgctggctaagatgctcctgaaagcgtaccacatccacaaactgtgaattacaggcgaggcataattgcagcacggattctccttggacaagcaactgggcgcagggcttaagttggcccatttccaagggatcaatgatcaagggaggagtaaccatgggttcttcagcagcagccttggttttgcctcgcttccttttcgatttctcgacatgctccagctggaagtgtctggacaggatcaggttgtcgtcgtagtggtgtgtgcagctggtacagctgtagatgaagcggcgtgacttctgatctgcgagaacttgagcggccaccaaggtagcactggaggcgatggaggcactggaggcctgcgagctagtggatatcttgcgttttggcctcccacgggccttgcgtttgttgttgctgggtttttgagtttcctccagctgctcttcgttaccgttactgacctgcgcttgccgttgttgtttttgttgcagctgctgccgttctttctcggccttttttgttgtcttggctgcttcttcttccaccaaacgaatgcgctgcgcctccagttccgcctcatcctcgctgtcgatttggagtgctacatccggcagatcgtcctcctcctcgtcttcctcatcctcctcctcttcttccatatcggactcatcggactcctcgtcgccgtttgctttcttcattgtttgcagcggatttgcaccatttgccattgccattttcagcatgtcagacacgaaacgcttgcttttcttttaacaaatcggcaaaaactgcggcgcagcgttcagaacaaatccaaatccaccgacgccgctggaaatttttatttttctgcctctctctcactctctctctctctgtgtctcttttagcgttcttacccttgtttgtgttcgtgtgcgagcgtgcgaaattcggcgtacatgtgtgttggtgagcgtgatcgcttgcaacactgtttgagcgtgtcagtgttatacagcgccttcccaaagtacagtgttggaagtcggagctgccgcacgcgctataattcaaataaaaaggagcgttaaatgcgaatcgttaaagtaaaagagcagctgccgccactaatgccattttgatagatatttgacttttggcgcagaagcggccaactatttgtgtattccgttcacgcgctcgaatggcacgtatttcccatgcacttatttttgttttattcgcccactttttgcactacttcgtggccaacatagcggccaaaactcatgtcagtgcagctgacttggtttttttttatccctactgtgtaacactgtttaactgaaatattttaaaatatttaagactaatcttaagtcatgtgataaaaaaaacatgttaatatacattaaaattctcagaggacgaagtttttgattatatactccttgtaagcttcttttatcatttcctttgtagttagtccaactttttctcatataatcttgccagcactgattcgcacacacccagacattttaagcctattgtgctatgtttttttgattttagtgggacgtactttggctacattgtttgcccgcattttcgctacggcggcaacatgtgcaaaagtcaatttgaaaattgccgcaactgccgcacagccgcccaataggcaggaaaagtggtactttgtggtttaaggcttgttttccacgccccaaccaccatcgccccccctcaaacacataaacaatcgaccccgaacagcccaccgggaagttgtttatattgtttttaataacattcagcgcctcgcacaggcaaaaaggca

SEQ ID NO: 16454 - DNA, 2995 bp, DROSOPHILA
tggatttggatttgttctgaacgctgcgccgcagtttttgccgatttgttaaaagaaaagcaagcgtttcgtgtctgacatgctgaaaatggcaatggcaaatggtgcaaatccgctgcaaacaatgaagaaagcaaacggcgacgaggagtccgatgagtccgatatggaagaagaggaggaggatgaggaagacgaggaggaggacgatctgccggatgtagcactccaaatcgacagcgaggatgaggcggaactggaggcgcagcgcattcgtttggtggaagaagaagcagccaagacaacaaaaaaggccgagaaagaacggcagcagctgcaacaaaaacaacaacggcaagcgcaggtcagtaacggtaacgaagagcagctggaggaaactcaaaaacccagcaacaacaaacgcaaggcccgtgggaggccaaaacgcaagatatccactagctcgcaggcctccagtgcctccatcgcctccagtgctaccttggtggccgctcaagttctcgcagatcagaagtcacgccgcttcatctacagctgtaccagctgcacacaccactacgacgacaacctgatcctgtccagacacttccagctggagcatgtcgagaaatcgaaaaggaagcgaggcaaaaccaaggctgctgctgaagaacccatggttactcctcccttgatcattgatcccttggaaatgggccaacttaagccctgcgcccagttgcttgtccaaggagaatccgtgctgcaattatgcctcgcctgtaattcacagtttgtggatgtggtacgctttcaggagcatcttagccagcagcatggctattttcagttgctggtgcccaaggaggaacccaccgatctcccaccgcatgccatggtcacaattcccggggctctggctctgaacaaggccaatgcccagcttcagctgcccattccagctccggaaactccgccacccgagcaggacggcaaggaggctccaccaagtaacgcgtccaatgacaaggaggatctcaccatgatcaacgacatggtggcggttattgcagccgagcgagtgaagaaaaccagcagctccaaggtcaacaagatgatcatcaaacttcctatgcccaaaaaaagaggcagaaagcgcaccaagccggagagcctgcgagacgaacaggataatgcggagaagacggacaagaagaaaaaactgaacaaagaggagggacagcagccagtattggagccactgcaggccaaaaaaacaagcaaccaggcggagaacggtgcaacgcagtcaaataatgtcgtaaaagttcaacagaacgcaaagggatcaaaaaaagacggtactcagtcggcccagaaatctgagactaatcccaagcacctagagaatgctgagacaaattcaaaggataatacagaatccgtggctctgaaagaaaccatccacgataagcagttgacaatcgatgaagcaggcaaagcagggacacaaaaagatgacaacagcaaccagaagcagttggacaagagtgaggcgaatgctggcaaatctaaaatggtggatcaagtgcatcagcaaatgcctgtcgagagtgcaaaggatcaccagcagatgacagaggaacccaccaattcaaccaagcgcaagcgcggacgcaaagagcgtaagtcaccgacacccgtactcattccgctgggagacaaagaaatcaaggaggagccagaactcccagagcggcgcatgcgcaagagccgccagcatgtggactacgttgtcgaaattaaagatgaggaggaggatgatgacgaggtggaagaggctgaggtggatgatgactcctcagccactatttcgccgcacaacagctcaacagatgagagttttacctcgattaaacgtgagtcatcggaggaatcgcagcacaacggaatcgggggaattcacacctgtaatttctgtggcaaaacctttaagcgcttctcaagaatgcaagatcacctgcgcctccataccggcgagaaaccatacgtgtgtggacagtgcggcagggctttccgtctaaagatgcgtctggtggagcatcaattgcgtcatcgcgccgagaaggcatacaaatgcgatatctgttcaatgccactggccaccaagcaggatctctcgctgcacatgcgtcatcacaagaacgatcggcggtacaagtgcgacaagtgcaacaaaggatttgttcgcagctcagatttgtccatccacgtgcggattcacacgggtgaaaagccatacagctgcgatctgtgtggtaaggcgttccgtgcacgccaaaatctggtggtccatcgacgcactcatctcggcgataaacccattcagtgcgagctgtgcgacaagcgtttcgcccgcaagatagatatgcgggtgcacatgcgcaggcacacaggtgaaaaaccctacaactgcgatgcctgtcagcgtggctactcgtcgcgtgtaaatctattgcgccaccaggagcgggagcatggcatcgaggagcaagtccctggatctggccaggcggataagaagcacacaaaaacggcaacagaaaacgagcaagaaaacgaacccaaagccaaagcagcgccacgacgtccgcgacgcgagaagctgcagcaaaagattgctgctcaggagaagctactgaatgacctgaagcgtagcttgagtgctatgccagaaatacctgaggagtcagcgcaggtcaaacttgatggatctggccaggacataccggcagatgccggagcaggacatgctcaagtccaagtcacgctgtccatgcaaatggagccagcacccaataccgaagacgacgaggagatcacgccggagaaggagaacgctttgtccagctcgatgacagccgatggcaagacaaaggcgaatcgcaagataaccagctacttcactgtcgtgggtcagcaggcggaaatttaa

SEQ ID NO: 16455 - protein, 956 aa, DROSOPHILA
MKKANGDEESDESDMEEEEEDEEDEEEDDLPDVALQIDSEDEAELEAQRIRLVEEEAAKTTKKAEKERQQLQQKQQRQAQVSNGNEEQLEETQKPSNNKRKARGRPKRKISTSSQASSASIASSATLVAAQVLADQKSRRFIYSCTSCTHHYDDNLILSRHFQLEHVEKSKRKRGKTKAAAEEPMVTPPLIIDPLEMGQLKPCAQLLVQGESVLQLCLACNSQFVDVVRFQEHLSQQHGYFQLLVPKEEPTDLPPHAMVTIPGALALNKANAQLQLPIPAPETPPPEQDGKEAPPSNASNDKEDLTMINDMVAVIAAERVKKTSSSKVNKMIIKLPMPKKRGRKRTKPESLRDEQDNAEKTDKKKKLNKEEGQQPVLEPLQAKKTSNQAENGATQSNNVVKVQQNAKGSKKDGTQSAQKSETNPKHLENAETNSKDNTESVALKETIHDKQLTIDEAGKAGTQKDDNSNQKQLDKSEANAGKSKMVDQVHQQMPVESAKDHQQMTEEPTNSTKRKRGRKERKSPTPVLIPLGDKEIKEEPELPERRMRKSRQHVDYVVEIKDEEEDDDEVEEAEVDDDSSATISPHNSSTDESFTSIKRESSEESQHNGIGGIHTCNFCGKTFKRFSRMQDHLRLHTGEKPYVCGQCGRAFRLKMRLVEHQLRHRAEKAYKCDICSMPLATKQDLSLHMRHHKNDRRYKCDKCNKGFVRSSDLSIHVRIHTGEKPYSCDLCGKAFRARQNLVVHRRTHLGDKPIQCELCDKRFARKIDMRVHMRRHTGEKPYNCDACQRGYSSRVNLLRHQEREHGIEEQVPGSGQADKKHTKTATENEQENEPKAKAAPRRPRREKLQQKIAAQEKLLNDLKRSLSAMPEIPEESAQVKLDGSGQDIPADAGAGHAQVQVTLSMQMEPAPNTEDDEEITPEKENALSSSMTADGKTKANRKITSYFTVVGQQAEI

SEQ ID NO: 16456 - DNA, 3747 bp, DROSOPHILA
atgagtactcttaataaagcaaataaataaccccaaatatgaagctttgttgctttttatcggaaaatgtatcaaagaataaaatagtcttatttcggttgagatcaaattatataatttactgcttatttacagggatttgtggtttttttttttatcggtgtagcaaaaagttatacgtacattcacaattttcgatttgttcctacaagtatgtgtaaatctaaattgcatttgtttacatagtatatatatataaatatatagttcgctgccagtgaacagtgttcaagtgtatgtacatatggacgacatacataccataccccatacaacattgattctaattgtagaaaaatacatttcactaaaatacattgcgtataaaattattattcctttgcacatttgtcttaaactaaagtacggagtgttggggcggacaaaggcatgggacaacctcactgggatcatatttaactattggaatacttataaatataaaggaatagtggtgattatactaaactaatagttttaaattggcttgtctgtgtgtgtgggttacacatttgagatctgcaataaagcttaaatcaataagtctttaaaaccaataactaatttgcttggaaactaaatataaaactatttgaattcagatttaattagcgctaaattttaaaagatcctatcgaatgtagttctatcccagtgaatgtactttcgtttgtggaaggttcccatcattattccatcgcgagcttaggattaaagttgtacaacgttgagaatcctctagagatccctagagagaatcctcgaagacattagctaacatcctcctgtttgtattatccgatttgtgagagtcaattaaattgtgtggaccgagagagttatttgttagttttttttttttgtgagcagccgagtccttgaggactcagatgagactaaattgaatttcgctttaactgactttacaaaaatcatttggctaatttatcatttgctgctgttgctgctgctgctgcgaagtctgctgttgctgctgcggtgtcgcttgctgctgggtgatcacaatgtgatgttgctgttgctgctgctgctgctgctgttgctgttgttgttgctgctgctgctgctgcaactgctgttgtgcgctggccagctggttggcatgttgcagggccgccgttgttgcctccgtgacaacgggttgcaacatactggtaccattctcgcgccgcacatggctgtttagctcggccttgacccggcgcgcgatgtgggagcgggtgtgtttgcgcagatgatccttgcgatagaaacccttgccgcactcgccgcactggtggcgcttctcgccggaatggatgacaaagtgcagactcagttgctcctttcgcttgaaggccttcaggcacacggtgcagatgtagggtctttccggattgtgcgactgtttgtggcgggtgaggtgatccttgcgcttcagcgacgcctggcagatgtcgcagacatagcgcttctccaggttatggcccaccagatgcacttcgagcagttccggctccggatacgccacatgacattcgggacacatgtacagcggactgccgtcgagtgctgtgcccaggcgaatctcgccgggtcgcagcttcgtcttccggtccttgctacgctttttgcgcttcttcttcttgccggaagtggcgccggatccgccggctgtcgtcgctgtcgccgtcgtcgccgtcgccgtgaccgccgcctgcgtctgcacctgcaacgtcgcctgctgctgcggctgcagcgtcagctgctctgcctgctgaggtatactaatggttgtcgtgcccagggtgttgatcccaatggctggtcccgtctgcacctgcagcacctgaaaatatgtgttagccatgcacattatatatttcacatcctaaatataataatctacagcgacttaccacattctgttggttctccttctttatcgtctccgcggaatacttgaggaagtggtgcagcgacagcggcaacgtgttggctggaagatgcgagaggtagtcggccactgtggtgcccggcgtcagagtttgccacgaggtattctggagtactgcaagggaatttcatttgtttgtttaatcaattaacatcttaaatgtttctagctaagtaatgcaatcgatcaagctctcaccttgctgctggaggatggcgttgcacagatcttgggtaagctcctgcggtgcggtgacctgttgctgctgcatctgctgctgctgctgctgctggccggaagttcccgcctgcagggcatccgttgcagcactcgtcgctgttgcactagcatacgcaacagttgcatattgcgtctgctgttgttgttgttgctgctgctgctgctgggaggaagccaccaagtggccattgtacttgtcaccctggattgcatcgtcctggccgccgcggaacttgttgccactgctaccctggcccgccgtcatagtggcctggccaaaatgcgttacctgttgctgctgctgctggtagcgattgctgctgccggctgcatcctgctgctgttgctgctgcggattattggtgcccgtcactgtcacatccgtcacggcggcagtcacggtggaaaccagcggagctgtgctcgtcgtgaattgcggcaggccgggtatgtttccgggaaaggtgttgccaaacggggtgaagttcattgtgcgttcgttactcagctaatctgggaattccaggggaacttaatgggatcttgtgcgcggagaatcaggctactggaatgagagttttgaagttaagttagtctcacacatctaaacatcgtttcctacttaaacataccaactaaaaactatctaaaatgtggtatgagaataaatcgctttccgtaaacaaatgaatctaatcaacacaagccaacccacagaacaattaattaatccgtcgatcttccgaaaatagacaaaccaaaggtggttaaaaactgcagcacaatttaagcttagaaggcttttgaatggaaagtgaaaacggcgctgcagttgttgttattttagctgacttgccgaaccggaggactcactcactcacacacactagcacgccaccacaccatcgtctaaactgccacccaccgcccaccgcccactttgcattcgtggaggtgacgataaaaaagagcgcgaatcctgcgcgctgtgtgacagcgagagcgagagagacagaaggagggtggcaccgaggtgggagcaataaaaatcgaagggggcctggaattttagcggggatttcgtcgatgtcgacccactatatagcgatttagtgtgtcggtacattaagattaggttagggctgaactaaaccgccagtgcgtgggttttgcgaattgaaaagtgacaaataagcgaagcgttatggaaattaacacgacaatgtaacgcatacgcagtgtgggacattctaaactgactcgcaagtgccaaaaaccaaaggctgcgccatatcgattttcactaagcacgcaaattagtgccgtttctaattgagcacacacgcatataattcagttctcgtcgcgttcataatcataatagtaataataacaaagtgcaattctcgattttgccggtttgttaaacaacagactttcacttggcaaaacaccgtcgtcgtttatttttgcccatctgcgcgcgaacc

SEQ ID NO: 16457 - DNA, 1593 bp, DROSOPHILA
atgaacttcaccccgtttggcaacacctttcccggaaacatacccggcctgccgcaattcacgacgagcacagctccgctggtttccaccgtgactgccgccgtgacggatgtgacagtgacgggcaccaataatccgcagcagcaacagcagcaggatgcagccggcagcagcaatcgctaccagcagcagcagcaacaggtaacgcattttggccaggccactatgacggcgggccagggtagcagtggcaacaagttccgcggcggccaggacgatgcaatccagggtgacaagtacaatggccacttggtggcttcctcccagcagcagcagcagcaacaacaacaacagcagacgcaatatgcaactgttgcgtatgctagtgcaacagcgacgagtgctgcaacggatgccctgcaggcgggaacttccggccagcagcagcagcagcagcagatgcagcagcaacaggtcaccgcaccgcaggagcttacccaagatctgtgcaacgccatcctccagcagcaagtactccagaatacctcgtggcaaactctgacgccgggcaccacagtggccgactacctctcgcatcttccagccaacacgttgccgctgtcgctgcaccacttcctcaagtattccgcggagacgataaagaaggagaaccaacagaatgtggtgctgcaggtgcagacgggaccagccattgggatcaacaccctgggcacgacaaccattagtatacctcagcaggcagagcagctgacgctgcagccgcagcagcaggcgacgttgcaggtgcagacgcaggcggcggtcacggcgacggcgacgacggcgacagcgacgacagccggcggatccggcgccacttccggcaagaagaagaagcgcaaaaagcgtagcaaggaccggaagacgaagctgcgacccggcgagattcgcctgggcacagcactcgacggcagtccgctgtacatgtgtcccgaatgtcatgtggcgtatccggagccggaactgctcgaagtgcatctggtgggccataacctggagaagcgctatgtctgcgacatctgccaggcgtcgctgaagcgcaaggatcacctcacccgccacaaacagtcgcacaatccggaaagaccctacatctgcaccgtgtgcctgaaggccttcaagcgaaaggagcaactgagtctgcactttgtcatccattccggcgagaagcgccaccagtgcggcgagtgcggcaagggtttctatcgcaaggatcatctgcgcaaacacacccgctcccacatcgcgcgccgggtcaaggccgagctaaacagccatgtgcggcgcgagaatggtaccagtatgttgcaacccgttgtcacggaggcaacaacggcggccctgcaacatgccaaccagctggccagcgcacaacagcagttgcagcagcagcagcagcaacaacaacagcaacagcagcagcagcagcagcaacagcaacatcacattgtgatcacccagcagcaagcgacaccgcagcagcaacagcagacttcgcagcagcagcagcaacagcagcaaatgataaattag

SEQ ID NO: 16458 - protein, 530 aa, DROSOPHILA
MNFTPFGNTFPGNIPGLPQFTTSTAPLVSTVTAAVTDVTVTGTNNPQQQQQQDAAGSSNRYQQQQQQVTHFGQATMTAGQGSSGNKFRGGQDDAIQGDKYNGHLVASSQQQQQQQQQQQTQYATVAYASATATSAATDALQAGTSGQQQQQQQMQQQQVTAPQELTQDLCNAILQQQVLQNTSWQTLTPGTTVADYLSHLPANTLPLSLHHFLKYSAETIKKENQQNVVLQVQTGPAIGINTLGTTTISIPQQAEQLTLQPQQQATLQVQTQAAVTATATTATATTAGGSGATSGKKKKRKKRSKDRKTKLRPGEIRLGTALDGSPLYMCPECHVAYPEPELLEVHLVGHNLEKRYVCDICQASLKRKDHLTRHKQSHNPERPYICTVCLKAFKRKEQLSLHFVIHSGEKRHQCGECGKGFYRKDHLRKHTRSHIARRVKAELNSHVRRENGTSMLQPVVTEATTAALQHANQLASAQQQLQQQQQQQQQQQQQQQQQQQHHIVITQQQATPQQQQQTSQQQQQQQQMIN

SEQ ID NO: 16459 - DNA, 4377 bp, DROSOPHILA
aataataaataaaaggctacaccaaaaaaaaaaataaattttgtttacatttgtttgtttggcgtcaattttaatatggagcattttcgtcataaatatttaaaatattaaattgaatttctagtaattttgtagtagtatagcctttacttcgttcctttcaacgaacaatatatttgttatttattgttatatttttcttcctactacactacttggacatgaaattaaatcacaacttccttatgacttggtaattcatttataagaaggtccgtcaccttatatctttatctacatatgtatgtacatatgccaaagacgctagaataagtgtctttgcattctttttgattcttttccataatgatgaagtacgatttttcaagtttcacttagtggttttattataatgggtcttatgagtgcagtaagcacattttacgcgaaaaccctaaagacaaatattgtactccaaaatggcataaattatatcaatttagaacccaaacacagtatgcaaatgaaatttcagggtctaattctttcagcccgcgatagcaacactttaaactcaagataatgaaaattgggctttgctgcatgctctcttcgtaatagtaatctccacccctcggaaccgcacacacccacacttttaaagggaaaggaagagagcaaatggcaacaacaaatgatagcagtggttatctgtcaacacatatcggcaaatgcatgtcaattaccgcttaaatgcttagcacaaaaagccggcaaaaagtgcggagtatgggtggtttgagtaggtgggtggcgatgatgatgaatgccgatagtaaacggaattaactttcacgcagcataacggcaacgaatgcagcagcggcgacttgaatgaaagaaaaagcttacgccgtcgcagggacggagctttccggcaaagcgcgcgtagtaaatgtgcgggtggtgttttgggggaggagcgcggtataagccatcgatgcgtgggtgcacactctttgttgacaataaaacatatccaagaaaatccacaaaaatactccgaaaaatgaaaatagcgaagcaaaccagtaaacacctaccattcgatcgtattgcgaagtactttgcgaaaagcaattaatgctcagaaactcgaattggcgcctgcgcgtaaacacacacctacactcactgacacacactgtggcgctcccgtgatccagtgcgtgcgtgtgtattaggtattttttgcttttattattttttattattattttatttatttttttttttattttttgattttattacactacgcggcggctacccttttttcagagtccagaaaacctggtcaattgacatgcaaacatttacgcgatgcgacgttggcccaagtcaacacttaacattaacaaatgccttactacaatactggtcggccaatttgttctttgctttttgtctggcgcttttcattattattgtttgtttggcggcgacggcggcgcccgtaaaaagccgttagaaaagcgggaagctgaattcgttggcgttggtaagtcgcgaagcaaaaaaacgtacgaaaacgcacttttattttaaataagatatgcgtgttgttttaccccgcaatgtatccgatatagaccacttccgctgtatttttcaaatattcgcagagggaaccaatagcaacgcgggtaagattcagtataaaaagaaataaatgtttgcaagagcttaaatagactcggctctcatgaaaagctccctctctaacaaaatataaggggcggataagcaatgtttagcagcttactctcttttgttgctgcgacaaattcttgctgagacaaagttgcaatgatgttgcagacacaaagcttgttaataatattaatatttttttataacatatagaaacacattttatcaaaattgaatattctaattccaagtgctgaaaaacctatagaaatcttgtaatgtttcgatgttattatttttctagcttcgatcatgttgccaaaaaatatttttaatttctcccttgcaaacccacttgctgctgagtaacgggtacctgataaaacgttctcttatgtctgcgttagctattcatagggggctataaagctaggactcttgcgttttaaaagcgattagggttttccttatcgatatctaatcgatgtttgagatatcgctcgacaatcgcacgacaaataagatgcgcaacgtccatagattcgttttgcagtaagcagatattattaatatatatgtatattattttatatattttaagttatttcgctggtgtggaaagccatcgtttcgcctcgcaagcagttgagattgtggagatctaagagtagaatagggtttctttattaaacatattcaatagtttatgtcgacactaatgataaatataatccaaatcaaaataattagtccgctttaataaatcccagaccaaaataaatactttgacaccgaatacctcgttgtttttttttatttaaatttgtttgtttattttgtttttgtaaataagtaacagcaggcaaaacggaataactccagttgcgcaatgtgaacaccatttttgatttgcgaaaaaaaaaacgatacattcgaagattctacaaatttctttggcaatcacacgtgttttcggttggccattgaattagacgcagctttaatttattcatattgggtaggaaagtgtaagcttttgtattgaaaaaatataaaaaataaacaaataaagggtttcctagctatatttgaagaaaaaatgggtaaagctgctgttatgagctttttggaacgacaaaaagtagactttctacactcgcaaaggtcgtccaatcggaacattgccaaacagataaatcgcagctccagaactgttgacagatatttgaaggatctaaaggcatatgggaataacttcaaaggaaaaaaaagcactatcaaaacaagcagaacgccaagttgttagaaatgcttcgaattctactaagtctgctgctaagatcaaggaattttccggagtaaaagcaagcttattaactgttcagcatacaatcactaattcagaacacctaaagcgtctaaaaatcaaaaaaaaaaaaaaaatccaccttgaatgaaaaacgcaaagaaaaacggcttcaattcgcgaaggaatacgaggaatgaagtggaatgtccaatctgacactcgtctaaatgattggcgttcagttgtctttgctgatgaaaaacgttttaatttagatggcccttatggatttcaatattattagcacgatttgcggaaagattagctatatttaattcgccaccatagccaagaagggtgaataataatgtggggtgctatcacattttatggaacaatttacttgatttttatcgatcaaaagattaacggcgatcgcttcaaaacaatgttggagtccgtatttccaaaattaaaagatcttcaagatcagcaagacaatgctcctattcataattgtcgagtagtaaagtcttttatttcgatattctcgatattctcgatattctcttaacgtaattgaaaatgcttggggctggctaacacggaaagtatacgaaggaggaaagcaatacgaagacaaggaagcgttaactgcagctattaaacgtgcttggagcgagatttccttgagctacatagattccttgtaacattctatgaaggaccggatttatgaagttattactgaatttatttttttttattgcaaataaatcaaatagtaacgccaactaataattcaggttgaaattcaaacacttttactataaaaattaaaaggccaacgtgcgtctattctattgaccaagaaaaaatcgccctattttgactagctttaaaaaaatgttagaaaaacacaatttgtttaaatatgtatacttatttcgatattatattaaaagtatcattaaataagaaatgtttttgcagtgcatagcgttttccatggtattcatataaaaatgaaaacaatttaaatttttaatttaaattaaattataagctttatcacaaaattatcattacaaattctaataaccatcaacgaataccgcaacaaaaagaaacgcatttaaaaaaaattgcaaaaaattccattgcaaatgcaaagagaatgggaaaaaggaaaacaaaaccgtaaattctgacaggcgcgattcaaggtatttccgatctttatggtaccaaagacactagaattctagaattataattattctagtgtctttgatcgtaccttgtaattagaattacatattaatcattggcagctggtaacgctactagatctc

SEQ ID NO: 16460 - DNA, 950 bp, DROSOPHILA
atgcgtgggtgcacactctttgttgacaataaaacatatccaagaaaatccacaaaaatactccgaaaaatgaaaatagcgaagcaaaccagtaaacacctaccattcgatcgtattgcgaagtactttgcgaaaagcaattaatgctcagaaactcgaattggcgcctgcgcgtaaacacacacctacactcactgacacacactgtggcgctcccgtgatccagtgcgtgcgtgtgtattagagtccagaaaacctggtcaattgacatgcaaacatttacgcgatgcgacgttggcccaagtcaacacttaacattaacaaatgccttactacaatactggtcggccaatttgttctttgctttttgtctggcgcttttcattattattgtttgtttggcggcgacggcggcgcccgtaaaaagccgttagaaaagcgggaagctgaattcgttggcgttgctatatttgaagaaaaaatgggtaaagctgctgttatgagctttttggaacgacaaaaagtagactttctacactcgcaaaggtcgtccaatcggaacattgccaaacagataaatcgcagctccagaactgttgacagatatttgaaggatctaaaggcatatgggaataacttcaaaggaaaaaaaagcactatcaaaacaagcagaacgccaagttgttagaaatgcttcgaattctactaagtctgctgctaagatcaaggaattttccggagtaaaagcaagcttattaactgttcagcatacaatcactaattcagaacacctaaagcgtctaaaaatcaaaaaaaatctaaatgattggcgttcagttgtctttgctgatgaaaaacgttttaatttagatggcccttatggatttcaatattattagcacgatttgcggaaagattagctatatttaattcgccaccatagccaagaa

SEQ ID NO: 16461 - protein, 133 aa, DROSOPHILA
MRRWPKSTLNINKCLTTILVGQFVLCFLSGAFHYYCLFGGDGGARKKPLEKREAEFVGVAIFEEKMGKAAVMSFLERQKVDFLHSQRSSNRNIAKQINRSSRTVDRYLKDLKAYGNNFKGKKSTIKTSRTPSC

SEQ ID NO: 16462 - DNA, 3371 bp, DROSOPHILA
aaaggacgacattaagattgggcagagcttcagtgtggtcctgaaggtgagcaacaagagcgagagtcgcacacacatggccacgggtcagatcagttgcgatgccgtgctctacacgggagtgggtgccgtggaggtgaagacactgggctttgaactggaattggagcccaagagcagcgattacgttcgcatggaggtgatcttcgaggaatactacgataagttgtcctcgcaggcggcattccagatctcggcggccgccaaggtcaaggacaccgactatgattactatgcccaggatgatttccgtgtgcgcaagccggacattaagttccagctgggtgaggctgccattgtggcccagaaggagctggacgttattctgcgactggagaacccgctgcccataccgctgcacaagggtgtgttcacagtggagggtcctggcatcgagcagcctctcaagttcaaggtgagttcagattaagtccttcaaggattttcaactaactaacataacattaaaatttttacagatcgctgaaattccagtgggtggcactgcggcggctaccttcaagtacactccgccctacgcggggcgtggcaccatgttagccaaattcacgtccaaggaactggacgatgtggatggctataggcactacgagattgagccacgaccggaggatctgctgcagccgaatggaagccaccgaagcagcaacatcatacgcaggcgcaccgatgtaatagcttaggctatttcttttgtatttcgtagttcataagttatttgttgtaaataatactattaatacgtaaacattttttatataaaaaaaattcaaaagattctgcgtgatatttttccacggcttctaaacaaactcactgattttatagcatgtgcaatgcacggtttattttatgggatatattataatattgttttgtaataaacataaactattagtatgctgtaagagaagtcggctcaattactccataaatcatcgatacccaaggcgtagctcggtttgttggccgtcttcacaaagaatattccgcgagcttctcgaggaactggatcacccattaggatcttgccgccggtgcaattttttcccttgagttcatccagtccagagcagggaacaccgtaaaatcctttgggcgagttaatagactccgcgtaatattcatatgaacgtccatgactgcaaccagctgaaaatgaaaaagaaatttcccaattctgcttgtaagaaattgaaaccaattcccaaaacttactgaaaatctgcgacagctccttgcagcctggttgcggtggtccaccgccattgggatagaaatccaccatgccgatgggtttgcgaaagcccaggtatccggcacagctgtgtatgacatccacaaagttggcgtccgtgtcgtccaagtgattctccggaccaatgcaatcctcgaaagcgggacgagctggatccaagccagtgatgcggtttaccctgtacttagtgtacgaaccagcatagcccatgatgtgcgcgcccagactgtggccaatcagatggatcctattcggatccgcatccttctcctccaccagcagatcaattagcttggccaccgcccgtcccacctgaaccgtatatcgcgccggtgttagatagtatatattatccgcctgatccttccagttgatggcgaacacgttcacctggccacgttcgatataggcaccacgaatcgattgaatcgaattgctcatggtgctggacttccagccgtgaacgagtatcttggtgtccagttccggattgaatttctccgccatctcctgccaggtgtctcgcttgtggcgctgcggaaactcaaagttattctcatctatccagaaatcagcactggaactggagtcgctggaataaaaggattcaaattgtgaccactacgaaagataactcttcaaatcaaataaaaaaaaaccacacaccttccgtacagctcgaacttgatgagctgtggcagattgatgcggttttcgggcggaggttccaccagataggccacctcaggcttaccctgtccattgggcatgtagatccaggttttgttgtaatcctcctgatttagagccacctcaccacgaatgccaactaaaatggagcagaaacttatgcttagaaggatggctaaatcgaattgaaaacattttacaaagcagcagcacgggtcgcaccacttgggcgagggcagcgaatccggtgatgagccactgcaccaccacaaatgtggtggacacctcgttgcgacacggattgatcacattacagatgcaggccagcgcattcgaggacatcttgaccagctaaacgtcgatcttgaactgatcggacgccggattccaaagatcggagctcccagctcccagtttcccagcttcccagatccaagctcattaaggcggctgacgcattagtaatcctcgaaaccggttccagcccagcaattaatttgtggcctggagcgttttaattactcagcatcagtgtgcgcgcgaatctcggtcaggtgagacaaagccacatatgtatatccgtttccccgtaactcccaactcacccatccaacaactaagggccaggccacaaagccagcaaagcgctaacatctctgtaccaaagtcgacgtcactgtgccacgggaatcgggtgtgtggattttatagcgtacgataagctagacgagggccaggtgtcaatcaagactggagttttggacggactgctggccaggttgaagcctcggtcggaagggtctcggcgttatcattccaactcagttgggcgtcccaagcgcggcgctgttaaattgggttaagcccagttcatcggtgcatactaatctaaggtgcgttgccccggtattgaaaagtggaacaatataaatatttgaaaatatgttcggtaatttagttaaataagttacaataacaattacatttttataagtgtttttatgaaaaatgctacatcttatgtacacatagattaaatattatttagattttcagcgatggctatgtaaatttttcacaaatgcaatactttaatgcactaacattataacaaatttcaaatttatagaaaactttaagtattcaaaatctaaaacggtcatgtaaaataccatacatcaaaccatgtaagcatacatcttacatgtaaaatattgctggcatttgacctaagtagattaagtagattacaaaaatatgtaatccgcaatttcaaagaaacatttttgagtgcatcttataaaactctattttttgccaatgctatgtaaaagaataatta

SEQ ID NO: 16463 - DNA, 1236 bp, DROSOPHILA
atgtcctcgaatgcgctggcctgcatctgtaatgtgatcaatccgtgtcgcaacgaggtgtccaccacatttgtggtggtgcagtggctcatcaccggattcgctgccctcgcccaagtggtgcgacccgtgctgctgctttttggcattcgtggtgaggtggctctaaatcaggaggattacaacaaaacctggatctacatgcccaatggacagggtaagcctgaggtggcctatctggtggaacctccgcccgaaaaccgcatcaatctgccacagctcatcaagttcgagctgtacggaagcgactccagttccagtgctgatttctggatagatgagaataactttgagtttccgcagcgccacaagcgagacacctggcaggagatggcggagaaattcaatccggaactggacaccaagatactcgttcacggctggaagtccagcaccatgagcaattcgattcaatcgattcgtggtgcctatatcgaacgtggccaggtgaacgtgttcgccatcaactggaaggatcaggcggataatatatactatctaacaccggcgcgatatacggttcaggtgggacgggcggtggccaagctaattgatctgctggtggaggagaaggatgcggatccgaataggatccatctgattggccacagtctgggcgcgcacatcatgggctatgctggttcgtacactaagtacagggtaaaccgcatcactggcttggatccagctcgtcccgctttcgaggattgcattggtccggagaatcacttggacgacacggacgccaactttgtggatgtcatacacagctgtgccggatacctgggctttcgcaaacccatcggcatggtggatttctatcccaatggcggtggaccaccgcaaccaggctgcaaggagctgtcgcagattttcagtaagttttgggaattggtttcaatttcttacaagcagaattgggaaatttctttttcattttcagctggttgcagtcatggacgttcatatgaatattacgcggagtctattaactcgcccaaaggattttacggtgttccctgctctggactggatgaactcaagggaaaaaattgcaccggcggcaagatcctaatgggtgatccagttcctcgagaagctcgcggaatattctttgtgaagacggccaacaaaccgagctacgccttgggtatcgatgatttatggagtaattga

SEQ ID NO: 16464 - protein, 411 aa, DROSOPHILA
MSSNALACICNVINPCRNEVSTTFVVVQWLITGFAALAQVVRPVLLLFGIRGEVALNQEDYNKTWIYMPNGQGKPEVAYLVEPPPENRINLPQLIKFELYGSDSSSSADFWIDENNFEFPQRHKRDTWQEMAEKFNPELDTKILVHGWKSSTMSNSIQSIRGAYIERGQVNVFAINWKDQADNIYYLTPARYTVQVGRAVAKLIDLLVEEKDADPNRIHLIGHSLGAHIMGYAGSYTKYRVNRITGLDPARPAFEDCIGPENHLDDTDANFVDVIHSCAGYLGFRKPIGMVDFYPNGGGPPQPGCKELSQIFSKFWELVSISYKQNWEISFSFSAGCSHGRSYEYYAESINSPKGFYGVPCSGLDELKGKNCTGGKILMGDPVPREARGIFFVKTANKPSYALGIDDLWSN

SEQ ID NO: 16465 - DNA, 3330 bp, DROSOPHILA
cgtacccagttataatcagtatatatgcatctggttacgtttgttccgcaaacattgttcatgatctagtttcagctcttcttatatatgtaggacttgggctcgctataggggattgggaattggtgtatgggatgaaacagaacgttaacacagatacagatgagagccttagaaaaaattcgcatagatgtgagtccggaatacatgtatataaatctgtacgtctaggtataggcaaggtatataggttgatctcgcctcatattgcttcgatcgtggctctaccaatctaggtctctaagtgtttgttcgagtgagtgtggagataacttgattcccttctggctggttgtgtatatctatatactcgtactcgtactcgtattagtcctataatatgggtatgccgcgattatacagttttggggatgaacagtttatatatatatatatatcagaagaccaagttaccagttataagtcgttagctttgtaggcttccatttttgtttagaacaacgatttttcatttttcatttttcgattttcatttcataattgtaatcttttatcttgtatctttttcatttttcatttggttagttgccggatcccctacaagatccatgccattgccccccgtttacactctccctggatctttggttgtctcttaggctccccgtcaagtcccacaaaaatcgtactagtagggatacaggttcttgcgcttgagctccatgtccaagtcggccagttgctgcaggaatccatcattcggccggatatcgcgcctcatccgcaccgtgcgtatcgcgtccaccgccgacatcttccggcagatcatcaggtaggccagcacacaggtggccgatcgcgacatgcccaccaggcagtggaccaggatcttgcctgcggaaggagaagcggtataagtgggaagagttataggtaataacaatctggtaaaggatccatagtaagcttgcaagaactggatatagtggatatagctttctttaacctagacacgcaaatactttttaatttcctagtcaatttgattctttctgatttgtagaacaaactactagatactagtaaaagggaaagatcttcgggtcaccttgctgcatattggggtcaccaaatgtaactttaccgagtcacaacctttccctccagttaacattgttggtggttaaatctttaaaggagttacatcgtctaaaaatattaatattctttttcaacaatcactcaattgatcttaaacatttcgagatggaaagcctctgggttaccataggcgaaaacccaagtgccatcggctcccttaggatttaagattgattctaatattccactgataacatccattgtctctgcttaccctggacccattacccattatcacttaccgccgctgctgatggcgctgtcgatgaacttggaggccacgtagaagtagcgcgagatgtctgtcgttggggcatcgaccatggggaagcccatgtacctaaaaacacaatccttatggctgcgtctattgcacaaacaaacaaacaaacacacacacacacgcagtacacacaacaaacagcaacaacaaagttgagccaaaatcgagatgataatggataacggtgatggtgatgtttttgttgcaatacaatgataatgaagtgttccacaaatatggtatttacgagggtggaaaagagattaaaaaaaaagagaaagaaaaacaggaatagtttttgaaagaaattttgaaatgtgcaggtgtgcaaaatcaaatcgaaatcaaaacaaaatatgaacaaattttgaacgaaagttggcgcaaatttgcattcctttcgattgttcatgttgttgcctcttgtcggttcagcagcaagtgggctatcccactccagatcgttggactaacctgatgctgggcatatcccggtagtagctgtgtccagtgtccacctgaccataccgacatccctcggccgcgttcagaacgtgggtgatgcccatcaatctcagatacgttttgtttttggccgccgcactggaatcaaaggtgaatatcgtaattgcggggattggcatccaactagatcgacaacttacgcatcaccaatgtagatgcccggatagacctcatcacagtcaacgtcatggatggcgcactcggcgcgtcttagtcctggaagagcccggctaggagccatcgagtagtgcaggactcgctgcagctggcggcctgtggtctgttcggaggtctccaagcggctgggcgactgcaaggcgatcgagaatatataatacatataatatatatataagatatatgtaatcaatggattcaattcatattacacacacacatctaacgaaacacatgtggattaagttttagtacatgattaagctattagtttccgcatttagctaaactcctcaaagatccatagatagctaaaatatttaaatattcacaatcccattgaaagttaatttgaagaaaggacctcaaggaaaagcagtgaagctttggccttcacaaagattccccaatacttaaaagtccttcgataattagatttcgtgaacatttttggcaggcttctgaggattccccctgccataccacatgacctcatcgttgtcccggcgacaattgccaaaagaaaaaaaaaaaatggaagaaacaaaaaaaccgggaaataaaatgcctcgccttgcagatttatggcaaaggcgaaggtcgccatttggttacaaaagatgacaaatcagacggattggcggaggtggaatcggaggattcctcagatacaaatgtacatatatatccatttatatgccgtttgtcgtctgacaatttcagggacagaaagtgaaaactttgtcttgccttttgtgatgttttatattttgttttccctattcgagaccattttgttggctatcgactgtctgagttgtcataataccatcatctgcgaaatgaggggggcgggggggggcggactcgaagggttcaaggggcattggtgttcacgtttcgaaaacttttgctttttgtcgcggcatgcgaccctgaaattgaaaataagcgaaaaacgttggcgggatcgagagagaaaatcatatggtatgagtacatatatacatatatatatcatatataaatttaaagcatctgtcgccagagttctttaacattttgccgctgatctattgtgactgatctatggcatatatagctcacggcgaatacatctttatatttaaatttatatttatacttatatatagtcagcgatt

SEQ ID NO: 16466 - DNA, 738 bp, DROSOPHILA
atgtattatatattctcgatcgccttgcagtcgcccagccgcttggagacctccgaacagaccacaggccgccagctgcagcgagtcctgcactactcgatggctcctagccgggctcttccaggactaagacgcgccgagtgcgccatccatgacgttgactgtgatgaggtctatccgggcatctacattggtgatgctgcggcggccaaaaacaaaacgtatctgagattgatgggcatcacccacgttctgaacgcggccgagggatgtcggtatggtcaggtggacactggacacagctactaccgggatatgcccagcatcaggtacatgggcttccccatggtcgatgccccaacgacagacatctcgcgctacttctacgtggcctccaagttcatcgacagcgccatcagcagcggcgaaagctatatccactatatccagttcttgcaagcttactatggatcctttaccagattgttattacctataactcttcccacttataccgcttctccttccgcaggcaagatcctggtccactgcctggtgggcatgtcgcgatcggccacctgtgtgctggcctacctgatgatctgccggaagatgtcggcggtggacgcgatacgcacggtgcggatgaggcgcgatatccggccgaatgatggattcctgcagcaactggccgacttggacatggagctcaagcgcaagaacctgtatccctactag

SEQ ID NO: 16467 - protein, 245 aa, DROSOPHILA
MYYIFSIALQSPSRLETSEQTTGRQLQRVLHYSMAPSRALPGLRRAECAIHDVDCDEVYPGIYIGDAAAAKNKTYLRLMGITHVLNAAEGCRYGQVDTGHSYYRDMPSIRYMGFPMVDAPTTDISRYFYVASKFIDSAISSGESYIHYIQFLQAYYGSFTRLLLPITLPTYTASPSAGKILVHCLVGMSRSATCVLAYLMICRKMSAVDAIRTVRMRRDIRPNDGFLQQLADLDMELKRKNLYPY

SEQ ID NO: 16468 - DNA, 4406 bp, DROSOPHILA
cagaggatagatatttttatacgctgtttagagtgcaataacacaacttatccccagttctttccgcagcaatcgaggaactacaacgtaagtcaatatggtactaaaccccacttaatagctattaaactaactaatgactagcgcgtaaggaggcggggtcgttgggcgctggtatagacaggcatagaagtcgctgagagagcacaaaagcaatatgtatatagtctagaatgagcaacagccagtcctataaggtgtagttaacccgaacgtaattcaaagtttaaaggttttcaaggtagttaagagccaaataaccaattgcagtaggtcgaattaacttttcacacactttcaagcatttccacaacactctctagtctagaactcttatcacttatcatttggctcaattcatttactttcattctatgttcgtctctcccagctccgagctaatcacccattccagtagttttgaagaaaccaacaatttactgcctttagtttaaatcacattgaagtcagtttagactcagcttcagtttcagttcgaaatcgattttaagtctcgtcttgtttttatttcgtttgtacagaagcttcaatcgaatatttgcgtgctaagttctgtcttatgtttatgctttctactttcagtaagattttaataaaagaatatattacacacttttggttttattcacacttttttggtttgtattgcttgccagtcgagcgcctgtacatcgatgtatatagaagtttgtaggcttaagcgttcgaaacgatttgggttcatcattatcatagccttaacattatcattgtcgttggagggacgcgtccggacaaacagtccggtccagtccgggcgaaacacagttgacagttaacaatatttagtgcccgtgggcgggactcccgctgggagccataacaagtccatgtctggcactagatacttagtgcagtaagctaatatctactctatactctacacactagccctaaaacatagttataggcgaggctttgagcattagaccagtaagcacaatttaggtggaaaacgggagcaattatttagaacagaagtaagcaaatactccaataaaactaggcaataaattcagagaaaaaaaactaactaaatatgtttccgttgaacgtttcactttaaagcaagcctaaggagaagtagaggaaccaatatccgcaattagcataagaaactttaaatcaaacttagtgttagcgtttacaatttaattcaactgccttagcacactgagaaaaatgataaaacgaaacgggaggagagcacgtgcttaaatttagtttagctgcactggaagaaaaacgataaccgagcgatgagcaatattaacgataatcggtgacaccaaaactgccagccacaaaaatatatacatcctttaactaggagaacagtggagcacttaccccgaaaggagctcctctctaggataacactaaaaacgaagacaccaaccgattttgaggagataacaccaccaattcaacgcagttagagttatagtacacgattccatattaaatgtgcgttatactgttaaatgtaaatccaattcaagtgttaactttgcggcttcacagattagcaactaaatttactagacaatttacgaaacgtttcgtttttggtccttagttcgtacgcatcaagttccgaataaagcatatttttgttactatctgtcggctgatatggcgttttacttacccgggcaccatgagcgaattatcccacagcaaacggagctggcgggtgaaggccgcccatacctgggccatgccttcgacgctgcctaggtgggcgtggcaggtggccagcagacaactgaggcgacagaccaacgaatcgggaacagcactcttaatccgcatggggtcgaactgaaaaatggcaaaaatgaggtaagaagtatagtttaactacaaaatgattattggactgcagactagactatcatttctcgaagcttcactcaccttatccgtaaagttctttttggcgtaggggaacaacgccatctcgggatgcatatcggggaacagatacgccaatagctcgctcaactcgctttcggtcatgggaccaggtagtcgcttggttaatcccgcctgcgagggcaactcaaagctgcgttccctacgcttggtcagcttgtgctccgtaatgcggtccaagggatttgacgcggcctcagctccgctgctagtgccggagaagtttctgcccacaaaggactccagggacctggtaacctcggccaccgattggtaatcccttaggcagcaggagagataggaagaggcctcaactgataggtagatttttcccagcggagctttggcgggcacaaagtcactcctctgttcgctatcaaaggccacgtgctcggacagctctggccaggtgtagaccaggtagatttccgtgcgggactcgggcttgtagccatgtgggagggcacagaactgctgtacttccagatgcgaaacttctccatccactacgatatcctcggagctgaggccgtggtcgaagggcacgtacatgggcatgcggatgcgcatggtgtccagagcgtaggtggtgcaaactgaaatcatggccgcctgggtgtaggaagtaggcaccttttccctgaacagggtaagcaaacccatcagaaaccgacattctggcggggctttctccagtccaatcagcctgaaattggttctcagagcaggagccagggccacgcccgtatagtagttccatttgggatcgtagatctggacgaagatgggcactaagctctgaacttcggcagacacaacggcgacggcgctcaggaagaagttgaactccgaggtggacctcatgtagttcagagttggattcacggggtgcaggacaatgaacctccttagcccgtagatcctggccagaatgtgcagctcctgtgagcttcttattggaggaccaaagctattcccagtggacatgagatcatggtggcaactggtgcgttgcaggcaggtgatctccttcgcctccgctctgacgagttcctcatcctccagtatggcctggtgatactccacctcaatgccattcctcaacatgtccagcttctcccgctccaccttccaattgcagctgaagatttcttcggatttaagatttctggtctcggaatccgacgatacgtcccatttttgaaggatttcgcccagctgggcgttgaacacctcccagtcggaatccgcactgaagttctcccggtaaaactcgttatcgtcgatttcttcggccattttacaggaatttaaaggcgtaaataaacaaaggacaacaaactaaaatcgtagacaacaatggacagcgttgccagagcgttgtgatcggccatatcagctgatggttagggctgccatcggaaagagtgttggaaaggaaccaaatttttgttatttatttaaacttaaaaataacttaaggaccacctatttatataagtagcttgaaattggtcttttaagttggcaagtgcgctccagtaattcattaattattttgaactaacggagcttagtatttttctaaacggaccgccgaatttgaaacttttcttgtcatccatccctgcttaacatcaaaagatctggcaactcacgactcgcaaccaaacagctttttgtttaccaaatttttaattttgtctttgcgaagggaaatttaattacatacgcaatgtttgcggctaagcgagtaagggcccgtgcgaagaacttcaccattgaggaggaggagatcctggagaacctgatcctggcgcatcgcgacgtgatccgcaacaagcagaaggatccggccatttggaggaagaaatcggaggcgtggaagcaaattgaggcggacttcgccattcagaccggaatagagcgttcttggcaggctctgcgagagaagtacaccaacaacctgcggatgatgcgaaagaacggaacactgagtgacgaggaggcaaagactgacaatgcatcagattcggtgcagaatttgtccatttcgggagtttcttcgctggctgcagctgctgataatgaagaaagtgagtaaaggatggcaggatcaaaagcatgaacgtggtagttgacaagatgtaccttaatagtcttaccatgataggttcttctacagcaatatttcagtgctttatctctaataaactctaaaaacatcttgcaggtagtacctatttcgaatcggaattgaaccgaaaaagcctcagaagcgcctctaccgaagtcaagctcgtgccgaataactcaagctactcagttgacagaccaaactactcagc

SEQ ID NO: 16469 - DNA, 1552 bp, DROSOPHILA
attttagtttgttgtcctttgtttatttacgcctttaaattcctgtaaaatggccgaagaaatcgacgataacgagttttaccgggagaacttcagtgcggattccgactgggaggtgttcaacgcccagctgggcgaaatccttcaaaaatgggacgtatcgtcggattccgagaccagaaatcttaaatccgaagaaatcttcagctgcaattggaaggtggagcgggagaagctggacatgttgaggaatggcattgaggtggagtatcaccaggccatactggaggatgaggaactcgtcagagcggaggcgaaggagatcacctgcctgcaacgcaccagttgccaccatgatctcatgtccactgggaatagctttggtcctccaataagaagctcacaggagctgcacattctggccaggatctacgggctaaggaggttcattgtcctgcaccccgtgaatccaactctgaactacatgaggtccacctcggagttcaacttcttcctgagcgccgtcgccgttgtgtctgccgaagttcagagcttagtgcccatcttcgtccagatctacgatcccaaatggaactactatacgggcgtggccctggctcctgctctgagaaccaatttcaggctgattggactggagaaagccccgccagaatgtcggtttctgatgggtttgcttaccctgttcagggaaaaggtgcctacttcctacacccaggcggccatgatttcagtttgcaccacctacgctctggacaccatgcgcatccgcatgcccatgtacgtgcccttcgaccacggcctcagctccgaggatatcgtagtggatggagaagtttcgcatctggaagtacagcagttctgtgccctcccacatggctacaagcccgagtcccgcacggaaatctacctggtctacacctggccagagctgtccgagcacgtggcctttgatagcgaacagaggagtgactttgtgcccgccaaagctccgctgggaaaaatctacctatcagttgaggcctcttcctatctctcctgctgcctaagggattaccaatcggtggccgaggttaccaggtccctggagtcctttgtgggcagaaacttctccggcactagcagcggagctgaggccgcgtcaaatcccttggaccgcattacggagcacaagctgaccaagcgtagggaacgcagctttgagttgccctcgcaggcgggattaaccaagcgactacctggtcccatgaccgaaagcgagttgagcgagctattggcgtatctgttccccgatatgcatcccgagatggcgttgttcccctacgccaaaaagaactttacggataagttcgaccccatgcggattaagagtgctgttcccgattcgttggtctgtcgcctcagttgtctgctggccacctgccacgcccacctaggcagcgtcgaaggcatggcccaggtatgggcggccttcacccgccagctccgtttgctgtgggataattcgctcatggtgcccggggctagtgtgtag

SEQ ID NO: 16470 - protein, 500 aa, DROSOPHILA
MAEEIDDNEFYRENFSADSDWEVFNAQLGEILQKWDVSSDSETRNLKSEEIFSCNWKVEREKLDMLRNGIEVEYHQAILEDEELVRAEAKEITCLQRTSCHHDLMSTGNSFGPPIRSSQELHILARIYGLRRFIVLHPVNPTLNYMRSTSEFNFFLSAVAVVSAEVQSLVPIFVQIYDPKWNYYTGVALAPALRTNFRLIGLEKAPPECRFLMGLLTLFREKVPTSYTQAAMISVCTTYALDTMRIRMPMYVPFDHGLSSEDIVVDGEVSHLEVQQFCALPHGYKPESRTEIYLVYTWPELSEHVAFDSEQRSDFVPAKAPLGKIYLSVEASSYLSCCLRDYQSVAEVTRSLESFVGRNFSGTSSGAEAASNPLDRITEHKLTKRRERSFELPSQAGLTKRLPGPMTESELSELLAYLFPDMHPEMALFPYAKKNFTDKFDPMRIKSAVPDSLVCRLSCLLATCHAHLGSVEGMAQVWAAFTRQLRLLWDNSLMVPGASV

SEQ ID NO: 16471 - DNA, 3235 bp, DROSOPHILA
tgccaattctgttgattccacgctcgcggagatccctgccactcagctcaaatgaacccatgaacgtgggagccaagcacttgatgaagtcctcctcgacgccgccagctgtggtcacaatgcagtcgatcatacggtgctcggccagaaagcgaatggtctctcgcagtccggacgaaaccaagttggatgtgtagcccaaaaatacggtgcacttgcttcttcgacggatgaagtcgtctgtttcatggctgtctatttggtccgcttccaatggctggtccctgcaatccagctgccagtgttaggggtttgtaacatatcgtagttatgtatttaagttactaacttaccattctgttaatttcccgaatggccaggccaagattcgtggcctgaaacccggtgttcacataggattcgaagagcttactgtagtctaagccttcgttgaaatcgtagccactaacttggggcgtgttttccgccagagcctcgctgcgcttcagcacagcatccttggccaccgatggctccgtcgacataatcagaaattgttgaaattcaaaataaacagctcaaggggagcccaatcgtaatgcattaatcaacatgtgctggttaaggcagccctggtttccgatagagatgtggtttgcaaagtagctaacaaatatttctttaaatttatctgcaaagttttacgtagttatggaacgaagtaagaaaaaccagctatcaaagacttgcgtttaatttaaataaatatatttaatatatatatttaaaaaaaaaaattatgacgatgattttcaaatatattacgacaccggttgcatgtcgaaaatttaggttttaaaattttcttcgtttcgaagtatccaaacttggcttgaatcccgctgaatccgaagtccgcttaccagcactacgcaacaactatcgagcagactgttatcgggtgcaaccatcgattaattacacatatcgctgggcagaaacaaggaaaggatagaaagcactcgaagtgattttttacatcagttctattgttaacggtaggccaaagattcagtgaaacaattgcccttaaaccactgacatttcaaacaatgcaacctgtccctcaagcagcaaaagccccccagagagccagaaactttcgagcacagccaaacgcggaagacgaaacgccagcgagacgaggacgccaagatgattaaactattcacgcttaagcagcagaagaaagacggcgagcaaaagggcagtcagcagaagaaagcgtccgccgcccagctgcgcatacagaaaggtagtctccaatccagcacctggtatgatcaactctcgcttattacttatccatcttgggctgttttcctccccccagatattaacgaactgaacctgccaaacacttgcgccacagactttcccgatcccaatgacttgctcaacttcaagcttatcatctcgcccgacgagggcttctacagagacgggcgcttcgtgttcaatttccgcgtcggatccaactatccgcacgagccgcccaaggtgaagtgcgccacccaggtgtaccatcccaatattgacctggatggcaacgtctgcctcaacattctgcgcgaggactggaatccagtgctgaacatcaactccatcgtctatggcttgcagtttctattcttggtttgtatttcgtgatttgtgttattttagaggctatacgctttgttccataagtcttgatcaacagccacagttttcaagttacaattgattttttatgtcttgttttgtgaacaattgatttctaagtgtgcttaattgaacgcccactgaaacaattcaatataaatgtttgtttataccacttaacgatcattatttctatttttgttattacccaagccaacagtattactaatccaaattaactgcttccaggaacccaatcccgaggatccgctcaacaaggaggcggccgacgtcctgcagaccaaccgccgtcagttcgagaacaatgtaaagaaggcgatgcgtggtggctgtgtgggcgagacctacttcgagtgctgtctgctcaagtgatatagggaatcgcaaggtctcttactttaagcctgtccatacacctccccctacacccgctaactgaagaagatgaagcaaaacacagacgaacatcggcgacaacaaattattgtaataaacgaaaacaaaatccactgcgtgcaaagaagaagccgagtcaagtcaccaatttctagtttttaatacaattcatttagcaatttcgcccacccgtctcttaatcataatcggcatacccaatgtggcaatcatccaaatccctcacagatgaatgctgtgcctggccatctgcatatttcgccacaggcaaagatcagacacagcggacagtcttcctgcctggattcgcagatcgtatagtctgctgatgagacccacttttatgtcgtcggtgaccaaaactttcaggagctgttgcaccaggccgttgggcagcaagcgcaggacgggagcgaccctctcaccaccgcattccaccagcagcgaaatgaactgataaacaaaaacggccttgggcgacagttcatctccactgacaaactgcaggaacactgcgaaaatgtgctgcacgctcgtctgcagtggttctcttagagtaagcggcgtagtccgcagttcagatgtggaagtggagcccaataatgctgccaggccagctccggtcgtagtgtccgtaaagtcgcttgagttgtcgctgccatcgccaatcaccttgcgcactttggctgcattggccgccagttcctcgtcatcgtgagatctcgatcgcttcttcatggccgtcaaagcggaagtgccatttcctttgcggctctccaggcaggaaataatacagtaaacacagaggcgggccagtaccagggattggggctcattaatgtcctcactagaaaaaaaaaagattgccaaattgtgagtacgagttctatcatagcagtttcaatttttacatcctttcttgctaaatcgattcgatttgtagataataaataaatgaaataatatacagaagaaaatattggtatttacccttgtcgtcgcagtatcagtggagccaccacgtactggagcaacgcctcagtggtcttctcaatgtcgagatgcattacggcaaacacaacgtccatggttcgcg

SEQ ID NO: 16472 - DNA, 823 bp, DROSOPHILA
acaaggaaaggatagaaagcactcgaagtgattttttacatcagttctattgttaacgcaaaagccccccagagagccagaaactttcgagcacagccaaacgcggaagacgaaacgccagcgagacgaggacgccaagatgattaaactattcacgcttaagcagcagaagaaagacggcgagcaaaagggcagtcagcagaagaaagcgtccgccgcccagctgcgcatacagaaagatattaacgaactgaacctgccaaacacttgcgccacagactttcccgatcccaatgacttgctcaacttcaagcttatcatctcgcccgacgagggcttctacagagacgggcgcttcgtgttcaatttccgcgtcggatccaactatccgcacgagccgcccaaggtgaagtgcgccacccaggtgtaccatcccaatattgacctggatggcaacgtctgcctcaacattctgcgcgaggactggaatccagtgctgaacatcaactccatcgtctatggcttgcagtttctattcttggaacccaatcccgaggatccgctcaacaaggaggcggccgacgtcctgcagaccaaccgccgtcagttcgagaacaatgtaaagaaggcgatgcgtggtggctgtgtgggcgagacctacttcgagtgctgtctgctcaagtgatatagggaatcgcaaggtctcttactttaagcctgtccatacacctccccctacacccgctaactgaagaagatgaagcaaaacacagacgaacatcggcgacaacaaattattgtaataaacgaaaacaaaatccac

SEQ ID NO: 16473 - protein, 181 aa, DROSOPHILA
MIKLFTLKQQKKDGEQKGSQQKKASAAQLRIQKDINELNLPNTCATDFPDPNDLLNFKLIISPDEGFYRDGRFVFNFRVGSNYPHEPPKVKCATQVYHPNIDLDGNVCLNILREDWNPVLNINSIVYGLQFLFLEPNPEDPLNKEAADVLQTNRRQFENNVKKAMRGGCVGETYFECCLLK

SEQ ID NO: 16474 - DNA, 2902 bp, DROSOPHILA
tctggaatatcagaatcgagggtgctgtacgagcagccgaatgtcgagttcaactacgagtacatattcgtgggcacaacggatcagggggagtacgaggaggaggaatccctggtcgcttgcagcagcttcagccagttcaatgagcaaatggagagttatacgaatagctgcaccaccactagatattggacagaggatgtggactacgatggcgtaacagatcgggcgcactttcagctggaactgcaggatgtgcccacgcgattggtgagcttcaatctgctggtcttctttgaagctgaactgcagcacaagtgcgatctatcgcctccgtccgtgctggcccatcagttacagcttcctctgcacgctcgcctcagaaatggacacgttcaactgaagggagagctgcagctgaagcaatacgtagagttcacctgtccatttccgggacgcaacatcaagactcagttccgacaggttcaattggatacgaactctaccaacggaaatatagatcagttcaagatggaatcgctgctagcgcaagtcaaggccaatccagcatatttccagctggccgtgcaggagacatactacagagaaacgtcagcgcgcttgcagcctggtctcatcattgacctggagctggacgtgctccaagttgccgctcgctatcatcttagcatttgggaacggcttggacagttctggctgtacttcgcctccttcttcggcatctcgttttacataatgaacaagctgaaggactttctcttcggacgccacatcgttcgctcctgggagatcataccgtggaaaaagctctactgacaccaatcgggcgccattttggagatggacaacttctcgattggcgaataacttaaaggtgactctgcttggttacccaatgcaatttcattgtcagtcaaataataaatataacaaatgtacagagaatttaagaggagagcagaagatcggaaggatccgcctacttatcccggctattggacatcagggctaggttgccaaaggaagatccagcggacgctggctcgggggtggggtcaaatgcacggttgtcctcaaggatgatggtggtgcggggatagtgatccaattgcacgaacagataacgatactccagtttaccagagtcactctgtaaaaagtgaggattagaaaaatgcggcctgggagatattcatcacacatacccttctggactccagctgcacggtggccttgttcctcaagccctgcacatagaactgcatccgcatgtggggctttccattgcgctcgtagctcgagtgcgccacatgctgtctgcgaccgcgcctggatgtctcgccgaatcccttgatgggcgcaccaattgcatcctgtacccgcggatcttcgaccacacgtcttaacgcgtccgcgtatatattgttcgggctttcgctggagaatagctctcggaatatggcaaagaacatcacgcaggtcacccctaatccggcgattataatcgccgtataactggccgtcttagtgttctccttgatcttctcgccaatggggcgcacatccgtcgacacctgggtgttatcctgcgatcgttgaagggatccgccaccatctgcatgaataatatagtaaatatttcagatgtaacctgatgagaagtttgaggcacaaaccgcgcgacgcttcctgtcgcaaatgtggactccagtgcatcgccgccgcacattttaacctggcaaagttggtgggcaacaaattttgccgctgagtgaccaaattgcgcaataaagctagccgtgacatcgttcacgacgaaatcaatggtaaaaaacaaataaacgtactttacgaaaaaaagaattctaatcagctgtttagtttttcgatacaaatagtgttgcacattttcaccaattagcgggttatcgggctattcccgctaaaatggctatagccagctagaatggcgtttttattatttcgatatttactaaaaacaagaaattgttgaaagtaaattttatatgtttagggtacacagataatattacaaataaatcatatatattacaaataaatttcgaagtcaacgtatctgttcttatttatttccctttcatacgtttcaaaatctaagctcgtagctaaaaatctattattttcattggcttgaaaatggccatgtatcagtgcgctcgaaagctggtaaccctgccatctgtgatagtaagctttttttacgtcaaaaagtcagaaaacctgataaattaggagaagtccattcccctccagaagccagttactccaaagttcgccatcacgtcgcttccaacgcttttcggtcgcatactcagacgctactgcgcggtgaatactaatcccagcaagatcatggtggtcacacacaacgtcaagggatacgatgagttcaccaaaaagatggaggaactggagaacggcgacgagccggtccacgtcctcttcagtggcggcaaggacgagaaaggagagagctggtgcccctactgcgtcaagggtgagcatgccgtgatcccaatgcggctaaccgcaacctatccgattcccaaactcatttctcacgtttgcagcggagccggtgatacacgatgcgctgaagaaggccccgggcaactcgcacttcgtgcatgtggatgtgggcgagcgggcatagtaagttaataccgccaaactgaagaaaacagctgcgattagttagataagcaggaattaatatttcatgcactgcgagactgcgaacatctgctggtttctttggttcgaaatagccaaatagtttcaaaacacaggcttagtcatttagaatgacgtacatatatgcatatatcccacgtcattc

SEQ ID NO: 16475 - DNA, 786 bp, DROSOPHILA
ctaaacagctgattagaattctttttttcgtaaagtacgtttatttgttttttaccattgatttcgtcgtgaacgatgtcacggctagctttattgcgcaatttggtcactcagcggcaaaatttgttgcccaccaactttgccaggttaaaatgtgcggcggcgatgcactggagtccacatttgcgacaggaagcgtcgcgcgatggtggcggatcccttcaacgatcgcaggataacacccaggtgtcgacggatgtgcgccccattggcgagaagatcaaggagaacactaagacggccagttatacggcgattataatcgccggattaggggtgacctgcgtgatgttctttgccatattccgagagctattctccagcgaaagcccgaacaatatatacgcggacgcgttaagacgtgtggtcgaagatccgcgggtacaggatgcaattggtgcgcccatcaagggattcggcgagacatccaggcgcggtcgcagacagcatgtggcgcactcgagctacgagcgcaatggaaagccccacatgcggatgcagttctatgtgcagggcttgaggaacaaggccaccgtgcagctggagtccagaaggagtgactctggtaaactggagtatcgttatctgttcgtgcaattggatcactatccccgcaccaccatcatccttgaggacaaccgtgcatttgaccccacccccgagccagcgtccgctggatcttcctttggcaacctagccctgatgtccaatagccgggataagtag

SEQ ID NO: 16476 - protein, 236 aa, DROSOPHILA
MSRLALLRNLVTQRQNLLPTNFARLKCAAAMHWSPHLRQEASRDGGGSLQRSQDNTQVSTDVRPIGEKIKENTKTASYTAIIIAGLGVTCVMFFAIFRELFSSESPNNIYADALRRVVEDPRVQDAIGAPIKGFGETSRRGRRQHVAHSSYERNGKPHMRMQFYVQGLRNKATVQLESRRSDSGKLEYRYLFVQLDHYPRTTIILEDNRAFDPTPEPASAGSSFGNLALMSNSRDK

SEQ ID NO: 16477 - DNA, 2664 bp, DROSOPHILA
ggttccagcccagcaattaatttgtggcctggagcgttttaattactcagcatcagtgtgcgcgcgaatctcggtcaggtgagacaaagccacatatgtatatccgtttccccgtaactcccaactcacccatccaacaactaagggccaggccacaaagccagcaaagcgctaacatctctgtaccaaagtcgacgtcactgtgccacgggaatcgggtgtgtggattttatagcgtacgataagctagacgagggccaggtgtcaatcaagactggagttttggacggactgctggccaggttgaagcctcggtcggaagggtctcggcgttatcattccaactcagttgggcgtcccaagcgcggcgctgttaaattgggttaagcccagttcatcggtgcatactaatctaaggtgcgttgccccggtattgaaaagtggaacaatataaatatttgaaaatatgttcggtaatttagttaaataagttacaataacaattacatttttataagtgtttttatgaaaaatgctacatcttatgtacacatagattaaatattatttagattttcagcgatggctatgtaaatttttcacaaatgcaatactttaatgcactaacattataacaaatttcaaatttatagaaaactttaagtattcaaaatctaaaacggtcatgtaaaataccatacatcaaaccatgtaagcatacatcttacatgtaaaatattgctggcatttgacctaagtagattaagtagattacaaaaatatgtaatccgcaatttcaaagaaacatttttgagtgcatcttataaaactctattttttgccaatgctatgtaaaagaataattaaactttgttaattgttgggtgcgcaaatgagtaaagccagaattacgtggcctattacattgcctaattttgtttagtatatctagatgtgttgttgcattttcgaaaatatcacttgctgccacactggctgtgcgtcattttcagaaacgccgcgaatattttgccattgaaatctagctaagcattggaatttcgcaacgtgcagcagcaaagcaaactacaaacatgtcgggcacatcgcagaaacacaggaacttcgttgcggagccaatgggcaacaagtcggtgacggaactggccggaattggggaaaccctcggtggacgcttgaaggacgctggattcgatatggtgcgtgtgtaaatacgatgacgccatgtgcgcaaataaacaatgccagtcaagtgctaacgatcatttccattcgttttaggcctacaccgttttgggacagtatctggtgctgaaaaaggacgaggagctgttcaaggactggatgaaggaggtgtgccacgccagctccaaacaggcatccgattgctacaactgtctcaacgattggtgcgaggagttcttgtaagaggtggacacacaagccatccgagtaattcgatcaaaaggaatctgctaaaggcatcggccaatcatttttattcgcagtcaacgaaagtggcccaatgctagctaagcatttgccgtgttcactgttagtatgtatagctgtagggtgtaatttaatgtctaatccgaataaatgtacagtcatggaaacgatcctgcatttggatctctgttctgcgaaaagtacagtaggtgtaaaacatttgttgctggccggcgaagcagcctaatgcagatttttattaatttgattaggggacaacaataagcaacactatagaaggcagatcggttggcgactatatcttctctatgttttcgattgttggcgagtaggagtctctgactcgctgaaataagcctctgtctttttgatgtttctttatcagcgggctgatgtcgcctaattttgaaatctatttctttttgtttttcggaaatgatcttttataatgatggacttagaaccttttaaatcccaatcgctgttttgtttggggattatgtgtaagcggttaatatatattttataatgaaaccccttttgtcaaaattaattgtcctcgagtaattaattagtaccgagtatttgattataaatacaactttttttaaataaaaatatatatttttaaaaacttatttttaaagtgagtggtattaaataggatttcttttccctgaagtggtatcatatggtatttatttttggtcccgtggtattttttatcgttatcggcgcggtcacgctgctaagaattacattacgcgtgaataccaatgaaaattaagagagaaattgcaaaacacagccaagcggtgcaataaatcgcaaagtaagaggcgcaaaacgcgcaaataccgtttgcgcggttaaaaaatgcaaaaacaccaaacgatagattaaacaaagtgaaattaactcggctttggcatatgcgaacaccagtgtgccagtgtgtgtgtgtttttctttgtatatagactcgcagagcgagacggccatacacgacggcagacgggacggtgcaggtgcgcgagtgcgagcgggaaaaaggctgtgcggtcactgctactctgtgtgttatttcagagttacaggccaaacattctgatgtgcggccgaatcaaatcgactttttgtgtgcatcgccccagcgttcgtcttaattaa

SEQ ID NO: 16478 - DNA, 582 bp, DROSOPHILA
gcgtcattttcagaaacgccgcgaatattttgccattgaaatctagctaagcattggaatttcgcaacgtgcagcagcaaagcaaactacaaacatgtcgggcacatcgcagaaacacaggaacttcgttgcggagccaatgggcaacaagtcggtgacggaactggccggaattggggaaaccctcggtggacgcttgaaggacgctggattcgatatggcctacaccgttttgggacagtatctggtgctgaaaaaggacgaggagctgttcaaggactggatgaaggaggtgtgccacgccagctccaaacaggcatccgattgctacaactgtctcaacgattggtgcgaggagttcttgtaagaggtggacacacaagccatccgagtaattcgatcaaaaggaatctgctaaaggcatcggccaatcatttttattcgcagtcaacgaaagtggcccaatgctagctaagcatttgccgtgttcactgttagtatgtatagctgtagggtgtaatttaatgtctaatccgaataaatgtacagtcatggaaacgatcctgcatttggatctctgtt

SEQ ID NO: 16479 - protein, 90 aa, DROSOPHILA
MSGTSQKHRNFVAEPMGNKSVTELAGIGETLGGRLKDAGFDMAYTVLGQYLVLKKDEELFKDWMKEVCHASSKQASDCYNCLNDWCEEFL

SEQ ID NO: 16480 - DNA, 3851 bp, DROSOPHILA
aaggtcaagacgatccgcaggaagaaaaaccgcagcggttaaacatctttagattacctcaaacacacttgcaattaacctgaactccgaaccccgaagacaactaccatatcattaagattactatatttattattgagcaaagaaacgtacttcttacttaatatataattaaattcaaaaattgatatttcaatattttattatttcaacgaggactggttaaagatttacttcatctagtcctatgcacaaaatgttaatttcaaaaagcaatgtgaaaaatagtaagcaacacatatggttttgcgtttttaaaggatccaaactgatagtaaaccatttcttatttctatgactattttaactaagcaacaaagtttcttgagtatcctcaagtgtggatatgattttcgtaagaaattcccatctcttatattattaaaaaaaattgtaaaataattaaagtcagtagtttttacgacagtggaagaataatttttgtttataactatgtcgatacttggcagtatagacgtaatctatggtcttcctgcttttgtgttgccaaaatctctacatagtttttaattgtacgcgttaaagtttgcttaaaattatataagcaaaaattgttatattattattaatattattataaattattataaaattattattgtacaagctatcgcttgtaaaagttagcttaagagtataaaatttatacatttttattttaaaaatatataaataaatatagtttacactgcaatagctattaagtgaaatgctaattgaattcaaggagttagagttcgtaacaagtgcaaatctattaaatagtaaaatattgaaatacattttctgaatttaatagttgaacttgttggtttgcggagcaataaatatattgtagtattcttaatgatatggcagttgtcttcggaggtcggagttcatgttagttggaagcgggtttgaggaaatctaaagatgtttaaccgctgcggttcttcttcctgcggatcgtcttgaccttcttggggcggtgcaccttgcgcttgtagtggatcacgtgcttcttcttggaggaggagggcgatgccgtggtggtggtcgtggtgtccgaggacgatgctgtggtggtggtggtgtccgaggacgaggcggtggtcgttgtggtggtggcatctgtgcttgtggtcgtggtactgccactggacaggctcaccaggaaacaggcgacagtggccaaaaggagcaaaacacaggagtacttcatgttgttgtgtggtaattgaatatgatcaactgatgctaaactgatctaaatcgtgctatatttatatcccttgggggataaattaaacacctgacggatctgtgcttgtttgcattagcgtgagaactttacgcatattgccatctgaaccagaactttaggcctatcttaaaatccaggtcaatttaataataatttgcacatttctatgcctaccacaaacagttgggcaaacattaaagatattttaggaagttcaatttagatggaaacacattgacgttgcttcagagtttcagctgtttatatttatactttctaaatatattattatatcaggggcaaataaagcgtgcagtaaagtacataatgtaccatatataagctcatatgtacataagaactagaatctacatttattctagatatatatatgtatttatgcatatatagttaccattcgtattcatttaaaaaatttcagtattgggttagggcaaaaaataaaaaagtaaataacatctacatatgttggtcaatgttaatttgtatcaattttatagatacacatacatatatacataccatgtgggaagaaaaagcacaccattgcatgtgaatttcgtattaggtagaaccagtttcaaaccgtttagctaatactgtggaatcaaaacagtaataacgcagtaataataataacatcagtaataactgatgtcatacatcgacggcaaagccaaaacgtcttattttgataacttcgagatccgttgaaaggcgcaacaaaataaggccaataggtcattcgagtacccacatctttgttccatggcctatagaataggtcataagcaagagaacaggttcccaccttttcacttctccacctgtgacgcgtgcttcatacgggcccccttacacaccagcatacactcacacacatatttacttagtagctaaataccaaacaaccgctttttatgccgccaataaatggtgtttaattgtaatgttgttattcttttttttttgcagactccgtttggagacaatcactcaagggagagaaacagagagagagaagaaaccggcagagattttttacatgcacatacagtgttgcaggtttggacttaatccagccaataaaaggtggttatttatagttaaaaaaatatatccaatgtttaatatattttaaaataagtaactaatttttagagtttatttttaacctcgtctttaatattacaataatcttgatttcttcagaaatcttattatagatgcgcattggtttttatgtttaacatgttctatataaatataattttgggtttattatctgtgacaacataggcttttattttgaaggtttaactttttactattaaaccttttaaaaaagattatatacggccttataatctagctttatccattttcaatacagcatcactgagcttgacagacaaaacgggaaatgggttaagaatcaaggcgtccgaggacgcggacaaagaagttggggaaagagacagggccccagcagccgaaccgcattccatgcgcaggcagcgcagtcgtacagtgggccaatttttaaaaatgcgctgcaaaaatggtttgcaaacatgctctgcttctgaaaataaaccctatttttaatttcccttttattttgtaataaacgaataatactataatacgtagctcaatttacttgtttccgtaatatgcgagcatttgctcaagcatatatcataaataaatttaacttcatcaagtcactttactttctaatttgcagtgagttttgcgaagtcaacccactgtgcacggagggcagcggcagcgcatgcgcagaagaaagagagccatcgcggatcttttcagtccaagtccattcagattcagtcaagtcagtgcgtcgcgagatctttaccgtgcaggttgcgattttagccgagaagtggtcggccgggaaaagatagttattttacttccgtgagagtgtgtttgtgggaataattcggcatcgaaactttcttcaacagctggccatcgtttgtatgtaaatgcaaatcgaccaagaaggctgcaaggcgaagagccagcgagacaagtggagtgtagaaagtgcaaaaccagtttttttgttagcaggaaaacgtggcaaaataaaaaatttacataacaaaaagtgaaacaactaatcgctggtttgattatctcatgtttaacgaatgctaattgatcagtgaaagtgggtaagaaaaacaatgcgaggaagaaatgcccgctaaattccgcaaagcaaatcgcaccttaaaaaaataacaaaaactacgaagccgttatgtctgccacctacaccaatacaattacacagcgccgcaagacggccaaagtgaggcagcaacaacaacaccaatggacaggcagcgatttgagcggcgagtcaaacgaaagacttcactttcgcagccgttcaacaaactcgatgcaacaacacacagcaatcagcaactcaccttcaccactgtgctgtaacggcgctcgt

SEQ ID NO: 16481 - DNA, 303 bp, DROSOPHILA
atgcggttcggctgctggggcccttactcctgtgttttgctccttttggccactgtcgcctgtttcctggtgagcctgtccagtggcagtaccacgaccacaagcacagatgccaccaccacaacgaccaccgcctcgtcctcggacaccaccaccaccacagcatcgtcctcggacaccacgaccaccaccacggcatcgccctcctcctccaagaagaagcacgtgatccactacaagcgcaaggtgcaccgccccaagaaggtcaagacgatccgcaggaagaagaaccgcagcggttaa

SEQ ID NO: 16482 - protein, 100 aa, DROSOPHILA
MRFGCWGPYSCVLLLLATVACFLVSLSSGSTTTTSTDATTTTTTASSSDTTTTTASSSDTTTTTTASPSSSKKKHVIHYKRKVHRPKKVKTIRRKKNRSG

SEQ ID NO: 16483 - DNA, 8956 bp, DROSOPHILA
cacatagacatacacgtatatatgtacacatagcactattaacgataacatcagtgaaataacatccgatttacatattgatttccgttcgcagttatacaagtttaattcgaaaacgcttatctacatattaaatgctaagttttcttgtttctatctttgtaagaataatgtagaatttgtattagatattttcgattggtttctgtttagttttgattttgtacttcactgtatcaaaaatgaatgtatatcatctgtattcggatctatgattgcctttaaagagctccattcatttgattagtttcaatttgcatagattagaaataacatctaaaatggttcttataaagacagagagtcggcctcgaaatcgattggttggattgttcagatgctaaagagtttcgaaattcttctgctttttgtatcgttgtttcggtttgcgatcaggtgaaaatttcgtttatttttaccttgacaatgttcaagtttgagagattcttggctaaaacatgaagtaaaatcaacctaaatcacacaacgaaatgaatgctgaataaaatttggcaatttgttgcataatatagttagtttcagttgtaaattgtttgtttgtttgtttccattcgttcgttttccatgtttttttgttttgtttgtttaactaaagaaaatcagccttttcttgctatacacattaaatacatatatcgtttaccataacctaatgtatgatggttttcaagaggggccgtcaaaatctacagagatttaactataatgcaaaatgcaaaactgccgatgatcaatggcattcccattaaaatctctatagatttcttcggcactctcgtttttgtgtgtgttggggtgttggtttgatttgaaagtatgtatacgtattttaaaaaaatggttagatcttaacatagctatgggccgaggctttctgggtgtgcttagcagccttcgatcgaatgggctgttgtccttgttacagccgcggcggcttgaagctcagcgtggtgctgcactccatgcccacgtccattgcatccggcgtcgagatgccgcactcggcaatggagttccgcacggagggcggctgctcggcacccggcagtaggccgaccatcagtaggggtttgtttagcaccggaacaccgacggccgatcctgcagctgctccagcatttccggtcaactgatcactgcccaggctattgctactgttgctctgactattgccgccgatctgcttctccttgttgcgccgcagcgaggatcgatactggcgcggcacattgatgagcagacgcctggtggtgggattgtgggtgctggtggtgttgatggtggtaatggcgccgccgaggctgggattgagaccaagactggcgaccggtcgtcgggctgcatactgaatggactcggcgctgttactcaaacggatgttgccaactaaaatcgggttcggacataaggttgggataaaaagaaaaaaaaagaggagaaataatattgctgatgagttcatttgtttcattcgtaggtctgggagaagtagagcaagtaaatgttggtgttgttttgtggttgaggcgctttcttgatgtgttatatatggcttactactctggtttgctgtggttgttgctgctgctgaccgtctctgtgggcgttccgaccacaacaactcacaaaaacgttaacaattagtgtacaaaatgtggacgaaacacacaaaactcggggttagtaggcaaaatcaaacaacaacaagtacaacacacgttattatgcatgtatcacatgtagtatcaagtgtgtgtgtcgagtgtagaaaacacacaaaaaacaacacaaaaagctttcaacatatttcgatttcggttatacacagtataaataaataaaaatgtttattgttacaaagcaaaaatcataaatggacaaatggaaggcaaagtacacaatacgaataaataactaaattatctgatagataaatcaaaaataatacaaattaaaagatacacttaacaaaattccgatggtttggcggtgggcaacacggaaatcttggcctatcatgctgggttaggaaaattaaaattaagttgcgtattccgcttcgattccatctaaatacttaggcatgataaacactgagttccttttcaacaacacgaaaataaatgaatatcttaaacgtattaaacgtaagtatgttttagcattagttggacataagcaaaattcatgtttggatgcaattggtatctacaaaacacaagacatttcattccgattgttctcagctcgcgaatttgttcactgctttcatttttttcttatcaaaacaaaaagtccaaaacattgaaaatgactgtggcaaagttgttgttgtggtgatggttattgttgctattattgtggccgctcctgttgtggtcgttgccgtggctcagatcggcggaggtcacgtcaaaggattggtacaaggacgaggccatgctgctgcgatgttgctgctgcggtgtcgagtgtcgcagcagcaacatggccgcctgcctgggctccacatgatgctgcaactcgtgggcctgcagggtgtgcaaaacaccgccgtccagagagtcgccatcgccatcgctatcggtgacctccgtcagctgctgatcctcgcgcacaacgacaacaggtggcagccggttcaagcactggctggaggaataatagcatgtgttgctgagcggttcgtgtagatagttggccagatcgtcgccgaaatgagtgttgttggtggtgagcgtagttagtccagcgttataactacccgaattgacatccagcagcaggcgacgttgctgctgctgctgttgatgctgatgttgcatcggcggtggtcttagtagacccttggaatgtatgtgttgctgttgctgctcctgctgctgctgctgctgatgctgttgctccttctgctgtccgtagctatcctccgtgtccatcatatcgtcatagtgttgctcctgctgttgctgttgctgctgctgctgcctgcggtaaaagtgatagagcaaggccgcctgattccgctcgccttccgtttgagcctgtcgcatgtccctggtgctgccgccacccaaatatccagcggctgcggcaagacagcaattgctgcacgtgtccgccggcaattgcaacgtgaccaccgcatcccggggacccaggaaccactcggagcgggtgcgcatgcgtgcggtttggcgttcatggacctaacacattttccaatttcgtatatgtttcgacatggcaattatttgtttgttggttgatgttgttgtcgtgtggttgtagttgttggtggaaagacgaggggggattcaaaattatcgcattagagttttttttggcaattgaaatttgagtttaagctagctgtaacttttgcttgattaacttatttcgaaaaaaaaattgaaaagccaaattaaaatctttgaaaaaacaaaaacaaaagttcacaaaagaaaatgggttaacaatattatgtgatatataaaatgcagcaaaatcagcgcagtggaaaaagtgcaagactatacaaaatgatggatagaatattgcagggtattcaccgcaaaataaagatgaagaaagagaatccttaatccagcttaactttaccacgaataccccaaatactcgaaacaagaacatttgaattaggtatagtaacattcagtgaaaaaaccgccaacaagcgctttgattgcttattttgaggtggaagtaacaacatttaaattcctacaaaagtaagattaattacaaatgcaattttgggtttttttcggctcgtgttttgtagtattcgcatgatgatcttttcgtattcgtattctcgtgtcttctcgttctgcttaacaactaaatgttagttggttaagaattaactaccaactattaatgcaaggtgcagccaaaacatacaaacaaaacaggcaagacaaaagcaggcatctacgctacatagaccagatagccaagcgacaacgaatcaaaatggtgcacagttaacaatattcttcgggtagcttaggggtctactaaaatatagtacaaattaacgattacaacaaaatcaaaggaaatcataacggtagcttatgatacattatacattgttctagttatttctgatatgccaccttcgctttgaacatcaaatgataagagtgagaacataacacaaaaataataactaagtgtacatggtgctctacatctatagatagctacgtttatatatggtgtcaagagtttttgaaaaggctaggatacttattccaagttctttttgtccataaaagatttttcgtgaagagaatttacggttccaaaatattacttttattatttagccacctaatagctgaatattttctaaagccaatctattgtaataaaaataggcccagaatattgaatttcatattcatgagatcgaatttttgaaaacttttgaactgctgtcactaattttatccttagtatttacaactccattagaacgaacttatatccaattgctataaacttctcttattgcattcatatttgtcagtcccaatttttgtaattattaaatacgcaatttggtgtttagttttattttgttgcaacattgtatagcactcgttttttatttagtgaaaataggtctttgggcatagaaaatgtatttatataatgtttttatgttttggtttttcacattttgttgttttcgttttttgacgtttttttttttgttttgttttgcttggtttttctttgtaagagaagtttgaacaaaaataaaaatggcaaaattaaattaaaatataaacatacaatgtaaaatgaaaagttttcaatcaattttgctccgttgtagtccttttttacagagttttggtgaagtatgttgatttcttttttttttttttgttttttgtacttttttgtacagtttggggggtgtaaagggtgtgagggagcttagattcttcaaattcttaagtcttaatgtgttgttgattgttgtttttgtgtaagtagttgttgagtttcgttggcaggcgcaaatcgttttgttagattatgaaaatattagaaaaaactaggcaatcatttccaaaatgaaacaaacttgagcaatttgctgtgtgattcgagttaagagatagagagagtcaaagtagaagtgaatgatagaaagattagagggtataacatttccaattgacaaaattcaaacacaagaaacaaaagatattaaattaagttattacaataggattcaattacaataaatcaaaaattcgcaacagaaaatggaagaaaataaaaagagaaaacttaaatactaatatattcttggttcttgattctttttcatttcctggaaaaaagaaaccaaaacttaaaagaaattcgagcatttgcaaacggggttagacctaggatctatataatagatggtacgttctacacaactatcgcaagttctcaaacggaaatgcgtgagcccagcaagaaatcgtccctcacctgtggcagatacgagaggctcttggtgctctccgcatatcggttgacggccctcagctcctccatggtcatgccgccctcggcccctcctccgtttccggctccggagcctccgttgccgcctcctccgctattcgagccagttgctccggcggaattggagctgcacgagctactgtgccgaatgcctcgattgcagcggctgcacgttcgctgcttgagcttgggaggcgtcggattgccaactgccgagcctgaagcacctcctcctgatccgcccgctgctcccgatcccgtgcgcctctcccctccgccatcgagactcttggtgccagtgcgcaatcgcctctgatgatggctgctgctcggcggcgccggcttctttttgttctgtcgataccggcgcttaataaacgtcatctcatcctcatcatcgtcgtcgtcctcgtcgtagtcccgctggtgctgaggcggcacctgctgctgctgctgctgttgttggtagtggtgtggctgctgctgggctcgctgcttgtggcgatagatgccacgacttccctgcggcggagctatgctactgatctccaattcggcaccaaagtcgtgaacgccgtccagctcatcgttgtcctcatcatcgtcggcatagtcatcatagtcgtagtccgtggcatttccgttgccattgccattccgcttcgccggcaacggcgacgaagtcatggcatagatgccaggtccctccagcgaaactgagagacgggcgcagctctcgatgaacgagtgttcgggggaaacgcccagcgacaggacactgttctccaatgcggaactggagctggtcagcagggcgggcgtcgagcgggactcctcctgggccactaaatcaggtcggcagggggttataacaaatgcattggatgactcgtcagaatgagagggggtgcaaacaactactgggcatgcggcacaaagctatagaatgggtggtgcagtgcggttggggctagaagcttatcttttcgggacaccagatgaccaaagatgagctaataaggtatcaaatacattctcccctcccacacacacacacacacacagacagaagttagatcggacagtgtgtagagtaaatagaggtggagattccagaagcaaagcacaatagagtatgattctagatatatctacgtataggtaaacacttttcaggtactcacgtaagccccaacgctcgcattggcactgcagccatgtcttctccgcctccaaagaatgttgcactgtgggttgaagcgataaaaacgtattagcaagcgaatatgtgtggaattttcattgcttcaacagacgactgaacttgaagttatttaaccaatcaataaatcgattaaggacgcgcttaattattaacatcttaataattcatcgacaaattagtttgttaagttatctatctagtaggaagcaagttattaaagtgacttattcataaacgtcatcattttcagatttattttaaattcctatctaatgaatatagccccttttctttattcatatgcattgtaaacatacattgatagcaatgttattccaagggactactcataatccacaacttattttgaaattccaacttacatgcgtatttttgttgagccaacttgccacgtggcggtggtggatactgaaagctgcatatccactcgtcctgcaccttgagaatgcgtcctgtgacgcgggcgtagtactcatagttgtcgcgcccgaagatgtcgtgcgtggcaaacttatcaattatattctgcataatcttcgtagagacctgtaaatcaaaaaacagattttagaaaggtttttttttttttgtaaagaaaagagtttactgaactcaccttgaacttgagcacatcctccatgcgggcggttttgccatcgctgacgcaggattgaaagaaactgggggccacggaaacgcccagcgcctcgctggtcattccggtggaggcgtgggccgcattgctcgcgataacccggaatgtgccgaacagtagaactaatagatgctgtgtgtatttcggcagcgaaccgaagagtctgcaagggggaaaagagaaaggttctttagaagaagaatgtcggcgcatttatcttagagataccagaaagtgcgcactgtgagaaagagtttcttatatttctgtgcttctttttggttttcaaaccattctaagagttttgtgatgaataatcatccttctcttgttaacccaatcatctatctcctcacgccttttttgattgcttgaacatctgagcctgacatttattctcattcggcattgtaatttaattgtcttacagcgtgacaaactttttctctacatgtgtgggctacattgtagattgcagatttcataaatatttgttgagatctgttatcatagcgaaataaatcgttgtcagctctttgagctggcatagcatttgtttgttactcatgctatttgtttttattgccattacagaagtgcaatgactcattctcaggtgagctcctccacttttgctggccgcctgttacccatcaaaatcatcgcctggccaagcggagccggcaaagaaagtcagagcagctcaaactcagctcagttaagttcagctcagagctcccctgttcacactttcattttggcgtgcctaatgatttttcgaaacaaatggttaagccaagtctgcgggcccccagctgcagcccggtgactttggccggggaagaagaaaaactggttggcagcctcctaagcgtccacattacacaactcgatagaggtagctaaccaaaaccaaaaacaaaataaaaaaaaaaaaataaaataaatgaaagaaagaccaagccagcaccaaaagccaacacaagacaagccaggccaggccagctttaggatggagaaaaaagaaagatatataaaactcaactcaatcaattaatgctttttaaaagcaacactcgcagcacaacacaacatctctccccagctggcgcttaaaaagtgaaaacttcaagatccaacaataaattcaggagtcgatggggggagggggggtgaagtgggggctaagatcgcttgacaatgaactatactataatgcgatggctgtctggctctattttcattttcagatgtggtgtaaattgccccgcgaagaaagactgaaaaacagactaacgagtgaaaacgacagcttaggccgatcgataagtgagcgttgcatttagaatgaatgtctcggttcgaaaagggagtgcagcgatagggttttttttttttttttaagaaat

SEQ ID NO: 16484 - DNA, 2295 bp, DROSOPHILA
atgccgaatgagaataaatgtcaggctcagatgttcaagcaatcaaaaaaggcactcttcggttcgctgccgaaatacacacagcatctattagttctactgttcggcacattccgggttatcgcgagcaatgcggcccacgcctccaccggaatgaccagcgaggcgctgggcgtttccgtggcccccagtttctttcaatcctgcgtcagcgatggcaaaaccgcccgcatggaggatgtgctcaagttcaaggtctctacgaagattatgcagaatataattgataagtttgccacgcacgacatcttcgggcgcgacaactatgagtactacgcccgcgtcacaggacgcattctcaaggtgcaggacgagtggatatgcagctttcagtatccaccaccgccacgtggcaagttggctcaacaaaaatacgcattgcaacattctttggaggcggagaagacatggctgcagtgccaatgcgagcgttggggcttactggcccaggaggagtcccgctcgacgcccgccctgctgaccagctccagttccgcattggagaacagtgtcctgtcgctgggcgtttcccccgaacactcgttcatcgagagctgcgcccgtctctcagtttcgctggagggacctggcatctatgccatgacttcgtcgccgttgccggcgaagcggaatggcaatggcaacggaaatgccacggactacgactatgatgactatgccgacgatgatgaggacaacgatgagctggacggcgttcacgactttggtgccgaattggagatcagtagcatagctccgccgcagggaagtcgtggcatctatcgccacaagcagcgagcccagcagcagccacaccactaccaacaacagcagcagcagcagcaggtgccgcctcagcaccagcgggactacgacgaggacgacgacgatgatgaggatgagatgacgtttattaagcgccggtatcgacagaacaaaaagaagccggcgccgccgagcagcagccatcatcagaggcgattgcgcactggcaccaagagtctcgatggcggaggggagaggcgcacgggatcgggagcagcgggcggatcaggaggaggtgcttcaggctcggcagttggcaatccgacgcctcccaagctcaagcagcgaacgtgcagccgctgcaatcgaggcattcggcacagtagctcgtgcagctccaattccgccggagcaactggctcgaatagcggaggaggcggcaacggaggctccggagccggaaacggaggaggggccgagggcggcatgaccatggaggagctgagggccgtcaaccgatatgcggagagcaccaagagcctctcgtatctgccacaggtccatgaacgccaaaccgcacgcatgcgcacccgctccgagtggttcctgggtccccgggatgcggtggtcacgttgcaattgccggcggacacgtgcagcaattgctgtcttgccgcagccgctggatatttgggtggcggcagcaccagggacatgcgacaggctcaaacggaaggcgagcggaatcaggcggccttgctctatcacttttaccgcaggcagcagcagcagcaacagcaacagcaggagcaacactatgacgatatgatggacacggaggatagctacggacagcagaaggagcaacagcatcagcagcagcagcagcaggagcagcaacagcaacacatacattccaagggtctactaagaccaccgccgatgcaacatcagcatcaacagcagcagcagcaacgtcgcctgctgctggatgtcaattcggttggcaacatccgtttgagtaacagcgccgagtccattcagtatgcagcccgacgaccggtcgccagtcttggtctcaatcccagcctcggcggcgccattaccaccatcaacaccaccagcacccacaatcccaccaccaggcgtctgctcatcaatgtgccgcgccagtatcgatcctcgctgcggcgcaacaaggagaagcagatcggcggcaatagtcagagcaacagtagcaatagcctgggcagtgatcagttgaccggaaatgctggagcagctgcaggatcggccgtcggtgttccggtgctaaacaaacccctactgatggtcggcctactgccgggtgccgagcagccgccctccgtgcggaactccattgccgagtgcggcatctcgacgccggatgcaatggacgtgggcatggagtgcagcaccacgctgagcttcaagccgccgcggctgtaa

SEQ ID NO: 16485 - protein, 764 aa, DROSOPHILA
MPNENKCQAQMFKQSKKALFGSLPKYTQHLLVLLFGTFRVIASNAAHASTGMTSEALGVSVAPSFFQSCVSDGKTARMEDVLKFKVSTKIMQNIIDKFATHDIFGRDNYEYYARVTGRILKVQDEWICSFQYPPPPRGKLAQQKYALQHSLEAEKTWLQCQCERWGLLAQEESRSTPALLTSSSSALENSVLSLGVSPEHSFIESCARLSVSLEGPGIYAMTSSPLPAKRNGNGNGNATDYDYDDYADDDEDNDELDGVHDFGAELEISSIAPPQGSRGIYRHKQRAQQQPHHYQQQQQQQQVPPQHQRDYDEDDDDDEDEMTFIKRRYRQNKKKPAPPSSSHHQRRLRTGTKSLDGGGERRTGSGAAGGSGGGASGSAVGNPTPPKLKQRTCSRCNRGIRHSSSCSSNSAGATGSNSGGGGNGGSGAGNGGGAEGGMTMEELRAVNRYAESTKSLSYLPQVHERQTARMRTRSEWFLGPRDAVVTLQLPADTCSNCCLAAAAGYLGGGSTRDMRQAQTEGERNQAALLYHFYRRQQQQQQQQQEQHYDDMMDTEDSYGQQKEQQHQQQQQQEQQQQHIHSKGLLRPPPMQHQHQQQQQQRRLLLDVNSVGNIRLSNSAESIQYAARRPVASLGLNPSLGGAITTINTTSTHNPTTRRLLINVPRQYRSSLRRNKEKQIGGNSQSNSSNSLGSDQLTGNAGAAAGSAVGVPVLNKPLLMVGLLPGAEQPPSVRNSIAECGISTPDAMDVGMECSTTLSFKPPRL

SEQ ID NO: 16486 - DNA, 7947 bp, DROSOPHILA
ttgcccgacagatccagctcgccgagcgactgacagagcttagtgccccgcagccagcaccagtcattctgagtacccagtaagttgttgcccaggtgcagcgaggtgagcggaagacgacccagctccgagggaatctaaaaggcagaattaagcttaactcagtggtctaaaatgataactaattagtcaatccaccttggtcagcttgttaccgctgacatccagctttgtgaggttgcgcagggtgcatatctcgaagctcagcttcactagctggctgttgttgatggtcagcgatttgagggtgcgcggaaatcccttgatgggatactcgctccgcttgctgattaccatgcgcacctggggctgtgccttctgcggaattgccgtagcggcgtttatgttcagtctcaaattgatggcgtccttgccatccatgcccagcttgagggtctgcaggaatcctttcagctggataggatcgcacttaataagcaggttatctggcggctgtatgaaaccaatggtggtcttcccatccagcacaaacttggtgtgcacgacatgaatgttatccttgaccttgtagcgatttccagtcttgttttgtccactaaagagcaccatttccagctccttcttggtgtttccattcgcatccctggcgctttgcttgtagccaatggccagtgtggatttcacgggacgtggcgttttgttcgtctgggtggcgcgattcaccacctgaacttcgcacaaaatcttcatggcgaggcagtgattagacaataaacaaaaaaaaaacccgctaaataaaactaaacatttgttttggcctcaagagttgccacctgatggttgggacagctgatgatatcgagcagccattcgatagttagtggtggaccacataccgatgttttggattttaggaactagtttctaagagcagcatcaaaagctctcgaaaaaaaaacaattggcgcaggacaagttacaaaaccaaaacaagcaacggcaattgtttaaaaactgcaaagttactcccatttaaataccggaaaatgttatttcgcaaggctcgccgacactttctgccgttctacatgttcaatggattcttgtgacagcgcaacgaacgatatcagcgtttgcgttacaatagctcaaatattggtcatccgaggcatgagcttacagtaagtaatgtgtgcaacatatggagcaagacagtggtcatgcaatacaaagaacactcaaattttaaaaactgaaataaaatgcaaaaatgtttctgcagcacaacagcctgttggacaactatgcgaacagcaatgtgataataaacattgacaactgcgcgctctacagcaccaatgtaagaatttaaatctcaaaacccatttcgaatactaacgatcttattttcttttcgctgatctggcaacgccaagcggccagctgatcgaaagtcgataaccgacggctcgcacgatcgacagcgacgtcgccgccagcggtttttagtcatttttcggtttttctgcgcaacggtcgctttcggtttggcaatcgcctgcgtcatctacacgctccacacaatgggctggatttttgctgtgctcgtcgcactggtggctctgctactgacgaaacccggctggcgctggttctacatagcgggtgcgaccgctagtcgcgatctaacgtgagtgctgctcttgtacagggagggcatactgtacccaagaccaagtccagtgataagtttacaataccgcccccgtgcggtttgcatttcaatacacaacaacatcttgggggcttttcttttgtgaatcgattgagaacataagcgaactgaaaaatcagccgagtgcgaggttcacttcgtagccgaaagtcagaaaccacagtggaaaaaactcgttttccatctatttgggtcgccaacagcagcattcatttccagttgggaaaaccataaaagagaaaacttaactggcgaaatgatccatgcgacattgtgacgaatagtcaacgcaaattattagtttttgccactcgattacgagcagtttattgacttcttcaggttcaaggtcgcacagcccaaaaaaaaaaaaaaacctacgagaaaccaaaacaaaactcgcttttatttaccattgacttcatacgatcgtcgcccagcgaaaccctccgcgcatactaatcgatccgaatgcgatcgagtgcgtcaggcggaagaccactggcacactaaccgatctgttcttgaaaacgtacgccaaagagccaaagcttgggtcattatgatggcggaagtgtcgcctgcgtcttggaattttcgtttttccagggttgccagggctacttacattttgaaattttgcagaaaggttattaagtattcagaatttttaagcagctctttacttttaaaattgttatagttaagaatgtctaggacttggatatcaaagtaagtttgctaacctcataaatagtataaatttaaagaaattacaataatattataaaccacatagatttttaatttttaagtgattcacttttttatggctacagtggaagtgttaagattccagggttgccacggcaagccaaactataccaattgtagaccaagcaataagcgaacgaaaagcttgtcaaaattatgtatgtctcatcaatatactttgtgtcgtctgtcgttacgataattaaaaaagcggaagtgtcgccttttgacttgtgtatgtattttgaagacggctatagatattgctttttagcacaggtattgttagtaatatacatttttacaaccaaaaccatctaaccaaacaccttaactaataggagcaaaatctttacacttcattttaactaagtattttaagattcaattaagtttgaattgagctatagccttcgcaaatattcacacattgcaacgcattttacaaaattatgtttgaccataaataaggttaaatacgtaaagttatagctattaaaatagcaagtattctcagcagcatttaatttgctcggcagttttcgcttaatgagtcaaactcggcagatcaagttccatgccaaggccaacactggtttcccatttacccagctcgtctatatggccattcgtatatttcgcgctcacaacagattcttaagatcaacttcaagtctggccggtcaaccttggccacgtatcgaagttttttgctcggccaccaagtagacgaatccaatctgcgggcaaacatgtgcagcaactccaaaaggagccaagcaaacaaagcactcgatgggggtcataaggcctgattaaaaaccctataaatacgcggctaatgtgcgttaagcgctaagctaagttaactagctgttaccggcaatcttatcgacacttcactgccccgttgacggtgcaaagtacgcacgggtgcaaagcgaattcaaattgagatcgtcgttgtggtcgagtcccaagtcgagtgtaggttttttttcccccttttctaatacagttcccatcgaactattgtatttgcgatttggattagttctacctcacactctttcctatcgtatcaaatctctgtggatcttaagtgcttgcaaatgcctttcagaccgtagcatcagctcttctagaacttgtagaggaaactattagtattacagaggcagctctttatagtttatacaaattaataccgtgtaacaacttgaaggcatctatctttataagaaatacacatgattacaaaaaaatcaaatttctaaactcacatttgtcaatacaagtgcaatttatttcaaccgctagtcaatgataaacattatctgccttcgttcagtgtgcaggtttatttattttgccgatagcttcttcaatattgataaacatgggccaaacaacagttacagtttaagtataaaactcttaatcctcataagtgataagatactaagatgtgtaagagttctgttccaatgattatacgattgcaaatgaaaatataaacgtcagatttagatatctgtagctattggttaagctttctcccggaaaattcaaaagcccttgaaactggctaaacaaatacgattttatctcaaccttcccgtgaactttgcattactcagctcgaaattagcagcgtcattaagttgtggctcgcatggtcggactaggttaccacgttcggattgaattgcaaccacttcgagcgggtttatctctgggtttatcgcatcacggctgttgcgcttgtcgagcttcgatttctgttggctatttatacagaccccaaccactaaccataaaacacacgcgattgatggcaaagataatgccggtacggctactatcctcgactagccgctaatcaaacactttccctccaaaactgagtaacatatcaatatccgttggttatacacgttatttgtggattttccattgcaaagaagatacgctatcttcaaaaatattgtctagtcaacacacttttatatagcactaactaatttagcattgttcgtttgaagattcctcgatttatcaggtttgatatttaatttactaatcaaatttccccttaacagagctctctgggcctatatcaagctgctgaggtacacgaagcgccatgagcggctcaactacacggtggcggacgtcttcgaacgaaatgttcaggcccatccggacaaggtggctgtggtcagtgagacgcaacgctggaccttccgtcaggtgaacgagcatgcgaacaaggtggccaatgtgctgcaggctcagggctacaaaaagggcgatgtggtggccctgttgctggagaaccgcgccgagtacgtggccacctggctgggtctctccaagatcggtgtgatcacaccgctgatcaacacgaatctgcgcggtccctccctgctgcacagcatcacggtggcccattgctcggctctcatttacggcgaggacttcctggaagctgtcaccgacgtggccaaggatctgccagcgaacctcacactcttccagttcaacaacgagaacaacaacagcgagacggaaaagaacataccgcaggccaagaatctgaacgcgctgctgaccacggccagctatgagaagcctaacaagacgcaggttaaccaccacgacaagctggtctacatctacacctccggcaccacaggattgccaaaggctgcggttatctctcactcccggtgagtgcaatagcttttctgaactaagtttaaatggaaaggttctaaacaaatttgtactttagttatctgtttatcgctgctggcatccactacaccatgggtttccaggaggaggacatcttctacacgcccttgcctttgtaccacaccgctggtggcattatgtgcatgggtcagtcggtgctctttggctccacggtctccattcgcaagaagttctcggcatccaactatttcgccgactgcgccaagtataatgcaactgtaagtgagatttatggcctaactaaatcactctctaatttggcttttgtgatttccagattggtcagtatatcggtgagatggctcgctacattctagctacgaaaccctcggaatacgaccagaaacaccgagtgcgtctggtctttggaaacggactgcgaccgcagatttggccacagtttgtgcagcgcttcaacattgccaaggttggcgagttctacggcgccaccgagggtaatgcgaacatcatgaatcatgacaacacggtgggcgccatcggctttgtgtcgcgcatcctgcccaagatctacccaatctcgatcattcgcgccgatccggacaccggagagcccattagagataggaatggcctatgccaactgtgcgctcccaacgagccaggcgtattcatcggcaagatcgtcaaaggaaatccttctcgcgaattcctcggatacgtcgatgaaaaggcctccgcgaagaagattgttaaggatgtgttcaagcatggcgatatggctttcatctccggagatctgctggttgccgacgagaagggttatctgtacttcaaggatcgcaccggtgacaccttccgctggaagggcgagaatgtttccaccagcgaggtggaggcgcaagtcagcaatgtggccggttacaaggataccgtcgtttacggcgtaaccattccgcacaccgagggaagggccggcatggccgccatctatgatccggagcgagaattggacctcgacgtcttcgccgctagcttggccaaggtgctgcccgcgtacgctcgtccccagatcattcgattgctcaccaaggtggacctgactggaacctttaagctgcgcaaggtagacctgcagaaggagggctacgatccgaacgcgatcaaggacgcgctgtactaccagacttccaagggtcggtacgagctgctcacgccccaggtttacgaccaggtgcagcgcaacgaaatccgcttctaagagctgcaatagagttgtgtctgaaccttgccttttgcccaatatgctgttaattagtttgtaaggctaagtgtagtagaggaaaatcgggggaaatcggcagcaaagatcattcagcctaggagagatgcatccgaagcacatttccatgtcaacaatgcacttttgtatatcgtaagcatatatatatcgtatatcgtaaacgtagttgtatctgcatttgtgtagatgatagcctcctatacgcatttcaattgtttttagcgtgctaaagaaccttgttaaatgcaatttcagctattgtttagtcagttttagtggcatttacacttccattctcgttgcgtttcgtttttgcctgtacatatgagaagctctgatgtttttgtatcaaataaagtttattccttcaccacggaccacgtatttaaattcgcagtctatcgtgcggcagaatgacaccattccacctgcatacaaatgattatgtgcgattcgctcctcgactctccgatctatagaaatgcatagagatatacttacactcatacccatgctgtgagtattcaattaaccaaacttgaaccttgtcgacgttcaagtgcatgaaattaacgagaatttttaatagcattatataataatctgtgaatcagctaacgacaataacgtttaatagaagatgcgcccttaatttaattatggttctactccgctttctgtgatttttgaaaagttgagaatataactactcactgcttgcttactctttcattatcgcactattagagatacccatttaatggacagcaattaaggggtaattatattctagcagttagcttgtttaagccagtgctagtattggtagcatcattcaatcagaaaacgtttcaaatctttttgatattttagaagaataatgtaacacaatgagtctttctttcaaagaaaaaccaaataaagtacttacacatccacttttaagagaacttaaagaatatctcaatttctttggaacatgcttactatatctggatattaggatgatagttcctaatagttcagagctattccatttgatattaaactttgcaatggaaaattcaaatcagttggagggcgggcgaaagaaaaagctctttccctcgcagatcctaaatatgaccaagtgggtgagtcttccgggtgactggcagatcggtaggaagcagcagctagtcgagaaccgttatcagtggcggcaataacaagcgaggcttcaattcgcttccagtgcaaagaagattattgcagttgcattgccgggtgcgatccgcccagttgtccacgtgtgagtacggatgattgtcgatcgctcgatcgatttcatacaaagtgtgtgaggtgtttacctcgagtccagaaagtcaagacc

SEQ ID NO: 16487 - DNA, 2681 bp, DROSOPHILA
caaaaccaaaacaagcaacggcaattgtttaaaaactgcaaagttactcccatttaaataccggaaaatgttatttcgcaaggctcgccgacactttctgccgttctacatgttcaatggattcttgtgacagcgcaacgaacgatatcagcgtttgcgttacaatagctcaaatattggtcatccgaggcatgagcttacacctgttggacaactatgcgaacagcaatgtgataataaacattgacaactgcgcgctctacagcaccaatcggccagctgatcgaaagtcgataaccgacggctcgcacgatcgacagcgacgtcgccgccagcggtttttagtcatttttcggtttttctgcgcaacggtcgctttcggtttggcaatcgcctgcgtcatctacacgctccacacaatgggctggatttttgctgtgctcgtcgcactggtggctctgctactgacgaaacccggctggcgctggttctacatagcgggtgcgaccgctagtcgcgatctaacagctctctgggcctatatcaagctgctgaggtacacgaagcgccatgagcggctcaactacacggtggcggacgtcttcgaacgaaatgttcaggcccatccggacaaggtggctgtggtcagtgagacgcaacgctggaccttccgtcaggtgaacgagcatgcgaacaaggtggccaatgtgctgcaggctcagggctacaaaaagggcgatgtggtggccctgttgctggagaaccgcgccgagtacgtggccacctggctgggtctctccaagatcggtgtgatcacaccgctgatcaacacgaatctgcgcggtccctccctgctgcacagcatcacggtggcccattgctcggctctcatttacggcgaggacttcctggaagctgtcaccgacgtggccaaggatctgccagcgaacctcacactcttccagttcaacaacgagaacaacaacagcgagacggaaaagaacataccgcaggccaagaatctgaacgcgctgctgaccacggccagctatgagaagcctaacaagacgcaggttaaccaccacgacaagctggtctacatctacacctccggcaccacaggattgccaaaggctgcggttatctctcactcccgttatctgtttatcgctgctggcatccactacaccatgggtttccaggaggaggacatcttctacacgcccttgcctttgtaccacaccgctggtggcattatgtgcatgggtcagtcggtgctctttggctccacggtctccattcgcaagaagttctcggcatccaactatttcgccgactgcgccaagtataatgcaactgtaactacgaaaccctcggaatacgaccagaaacaccgagtgcgtctggtctttggaaacggactgcgaccgcagatttggccacagtttgtgcagcgcttcaacattgccaaggttggcgagttctacggcgccaccgagggtaatgcgaacatcatgaatcatgacaacacggtgggcgccatcggctttgtgtcgcgcatcctgcccaagatctacccaatctcgatcattcgcgccgatccggacaccggagagcccattagagataggaatggcctatgccaactgtgcgctcccaacgagccaggcgtattcatcggcaagatcgtcaaaggaaatccttctcgcgaattcctcggatacgtcgatgaaaaggcctccgcgaagaagattgttaaggatgtgttcaagcatggcgatatggctttcatctccggagatctgctggttgccgacgagaagggttatctgtacttcaaggatcgcaccggtgacaccttccgctggaagggcgagaatgtttccaccagcgaggtggaggcgcaagtcagcaatgtggccggttacaaggataccgtcgtttacggcgtaaccattccgcacaccgagggaagggccggcatggccgccatctatgatccggagcgagaattggacctcgacgtcttcgccgctagcttggccaaggtgctgcccgcgtacgctcgtccccagatcattcgattgctcaccaaggtggacctgactggaacctttaagctgcgcaaggtagacctgcagaaggagggctacgatccgaacgcgatcaaggacgcgctgtactaccagacttccaagggtcggtacgagctgctcacgccccaggtttacgaccaggtgcagcgcaacgaaatccgcttctaagagctgcaatagagttgtgtctgaaccttgccttttgcccaatatgctgttaattagtttgtaaggctaagtgtagtagaggaaaatcgggggaaatcggcagcaaagatcattcagcctaggagagatgcatccgaagcacatttccatgtcaacaatgcacttttgtatatcgtaagcatatatatatcgtatatcgtaaacgtagttgtatctgcatttgtgtagatgatagcctcctatacgcatttcaattgtttttagcgtgctaaagaaccttgttaaatgcaatttcagctattgtttagtcagttttagtggcatttacacttccattctcgttgcgtttcgtttttgcctgtacatatgagaagctctgatgtttttgtatcaaataaagtttattccttcaccacg

SEQ ID NO: 16488 - protein, 690 aa, DROSOPHILA
MSLHLLDNYANSNVIINIDNCALYSTNRPADRKSITDGSHDRQRRRRQRFLVIFRFFCATVAFGLAIACVIYTLHTMGWIFAVLVALVALLLTKPGWRWFYIAGATASRDLTALWAYIKLLRYTKRHERLNYTVADVFERNVQAHPDKVAVVSETQRWTFRQVNEHANKVANVLQAQGYKKGDVVALLLENRAEYVATWLGLSKIGVITPLINTNLRGPSLLHSITVAHCSALIYGEDFLEAVTDVAKDLPANLTLFQFNNENNNSETEKNIPQAKNLNALLTTASYEKPNKTQVNHHDKLVYIYTSGTTGLPKAAVISHSRYLFIAAGIHYTMGFQEEDIFYTPLPLYHTAGGIMCMGQSVLFGSTVSIRKKFSASNYFADCAKYNATVTTKPSEYDQKHRVRLVFGNGLRPQIWPQFVQRFNIAKVGEFYGATEGNANIMNHDNTVGAIGFVSRILPKIYPISIIRADPDTGEPIRDRNGLCQLCAPNEPGVFIGKIVKGNPSREFLGYVDEKASAKKIVKDVFKHGDMAFISGDLLVADEKGYLYFKDRTGDTFRWKGENVSTSEVEAQVSNVAGYKDTVVYGVTIPHTEGRAGMAAIYDPERELDLDVFAASLAKVLPAYARPQIIRLLTKVDLTGTFKLRKVDLQKEGYDPNAIKDALYYQTSKGRYELLTPQVYDQVQRNEIRF

SEQ ID NO: 16489 - DNA, 2970 bp, DROSOPHILA
aagattttctagccactgtctagttacatttcacatacaatcaatattgtgccctctttcgattgaggcgatatatatttgaatcgatttattgcaatttatttgaaatggtttgattttgtaagccaatcgctagttttttttattgtattgtgctcattcataatagtaaaatttccgcctagagctcatttaacttgtaattatgggggatttgactatctcgcaagtggaaaaagagataagataaaatggaacaaattttgtgctgaaatgaaggatttacattgatggtaaaaatagattttattgctaatgaatacacactaaaagttgcaatgaaaatcgttagtttattataatgaaatagatgatttgctattttatcgagattagattagaatttttaaaatcttccacagaactttaaacgcacaacaaatacaatctattaagtacgagtcccctagaacatttgacgtatcaacttggtatctgtttgcccaattaagtagtaatatctccctggtactttactagatgtttttaaaaaataaactattgcaatttcattttaatctgaatcgtttgccctacaaaaataacaccaagggagtatagcgctgctatatatcaatttcataaaaatctattggtttttttggagtggttctcacttatctggcatggaaccagggattgcttcacatccctcaaggtcaaagactatatattttctggttttatattgtacataagtgtttatttatttcgttaaatgaatcttatcatcaaaatgcatcatgaaatgtgatgttcctaaatgatttgattgcaatcttagaattaaagatatgcccttcacagagcttcggcacatttttagatatttggaaactagtaaatgccaaaaataagagaaaaaccaactgcattagttcagtatacaagtaaatgtttgattatttaattaaatgctattatacaagtagtctataatctagatcttcaaattaacgccggcgtaacccttggcattgagcccagtgacctggaaggtggtaccagctggttttggctggtcgaacttgttggcggttgtcacatacaaaatatccaaattgggacctccaaaagccaccgaggtgatttgggtggttggaattttgatctccagcagaattttaccggtgctgaattaaaaagataatgtttagtattgaactagaatgggaaattaaagaaacctaccttggattgaccttgaagacggtgccaccattgaaggtggccacgtagatattgccatcggtgtctacggtcatgccatcagggaacaatggtccttcgggccgaatcttcctcagatcgaagatgacctttgggttgcttacggcgccggtgctctgattgtagtcataggccaatacctcgtggttgttggtgtcgatgaagtagaacttcttggccttgacatcccaggccaggccattggatatgcccaccttgctacggatagcgttgggctgtccaccggcctgccagctgtagagctcacccttccattgggtgaatatgtcgccactgtcggccatggtgccaccgtaaaaacggccattgggatcggttttggcatcattaaggcggttttccttcaggtccggctgcacctcgaacagggtgcgagtgaccttggccactgcggagactccatcccactggacgatgaccgtacgaagaccgcatcctacggcaaactcctgcggtttgttctcaaccggcagaatgaacgatgcaaatatctcgccctcgattttagccctgtacactttgttctgcttgaaatcataacgattaatgccggcggattcgaggtccacgtagtacagactctggcgatcaacatcccagtggggtccctcgcccagggcggcgtaggaatcgggaacagcttcaaccttgtatgacatctgaaatggggaacattgttattacggttttttttcacacttaaaaatttgcgattaaatgaacaatgatcgcaacgtattatatagtaattaagtttccatatataaatttaattgaacatgtaacactctctcttttttttatcaccttaaagaaaccgttgaatacttctcggtcagctaacgtttgcaaactgaattgaatccggttagtttagatgtttttatagacattctcacacctacacatagcaaattgataagcaataattcaagtttgtacacaactgttatcaacttatgacaccaacacacaaaaacaccagctacattaattattaaggtagaaactttaatctatgatggtgcacattttcagcaacactcgaataagccagagagatagagacaaatcgacaacaacattatttattcataaatatttaaaaggtataaaacaatcaacactgattattgttctgattttaaatattagaataattttctttgaatataaaagctgaaatcatttatggtacacgatggacattctcaaatatctcagttgtgttaatgaaatgttgtggctccatgaaaataataccattcgcaatctcacacacattttaaagaatttctcaaatatgcaaagcttttttcctttcacataattaaggattggtttgctttttttttgatatttcctattggtagccatggcaaggtacttaaagtgtatggaaattaaaggtcgtaaaaccatacgatttgtcttatcaatttccataaataaccaactcaaactcaagttgtttttctcttgagagcgcgagcaagcgagcgggtcattgattaaacctttcgcagtggttccatggcaacttggtcttggtgtgttatgcccttcatgtgtcccactagcaccccaatgaagtggagtggagtggagtggagtggattggagtctcttctactacgtacatgcatggtatgatattag

SEQ ID NO: 16490 - DNA, 912 bp, DROSOPHILA
atgtcatacaaggttgaagctgttcccgattcctacgccgccctgggcgagggaccccactgggatgttgatcgccagagtctgtactacgtggacctcgaatccgccggcattaatcgttatgatttcaagcagaacaaagtgtacagggctaaaatcgagggcgagatatttgcatcgttcattctgccggttgagaacaaaccgcaggagtttgccgtaggatgcggtcttcgtacggtcatcgtccagtgggatggagtctccgcagtggccaaggtcactcgcaccctgttcgaggtgcagccggacctgaaggaaaaccgccttaatgatgccaaaaccgatcccaatggccgtttttacggtggcaccatggccgacagtggcgacatattcacccaatggaagggtgagctctacagctggcaggccggtggacagcccaacgctatccgtagcaaggtgggcatatccaatggcctggcctgggatgtcaaggccaagaagttctacttcatcgacaccaacaaccacgaggtattggcctatgactacaatcagagcaccggcgccgtaagcaacccaaaggtcatcttcgatctgaggaagattcggcccgaaggaccattgttccctgatggcatgaccgtagacaccgatggcaatatctacgtggccaccttcaatggtggcaccgtcttcaaggtcaatccaagcaccggtaaaattctgctggagatcaaaattccaaccacccaaatcacctcggtggcttttggaggtcccaatttggatattttgtatgtgacaaccgccaacaagttcgaccagccaaaaccagctggtaccaccttccaggtcactgggctcaatgccaagggttacgccggcgttaatttgaagatctag

SEQ ID NO: 16491 - protein, 303 aa, DROSOPHILA
MSYKVEAVPDSYAALGEGPHWDVDRQSLYYVDLESAGINRYDFKQNKVYRAKIEGEIFASFILPVENKPQEFAVGCGLRTVIVQWDGVSAVAKVTRTLFEVQPDLKENRLNDAKTDPNGRFYGGTMADSGDIFTQWKGELYSWQAGGQPNAIRSKVGISNGLAWDVKAKKFYFIDTNNHEVLAYDYNQSTGAVSNPKVIFDLRKIRPEGPLFPDGMTVDTDGNIYVATFNGGTVFKVNPSTGKILLEIKIPTTQITSVAFGGPNLDILYVTTANKFDQPKPAGTTFQVTGLNAKGYAGVNLKI

SEQ ID NO: 16492 - DNA, 11143 bp, DROSOPHILA
atccgacaaagattcacataaaaatatttaaatatacgaaagactagggaggcgaacttgttttctccattttgcaggtcaagccacaaataacctctgatgttttcttggtttctcccaatgtttgtttacactgatcgccgggcattaagtgcccacctccttgccacattagtcgtccaatacgagttcaattggatgcacatgcacaacgaagcaaaccagggccaacactctcgcggccaatacactcaaatgataacagtaccgtgtgtagagtcaaacgggggtaaaaagacatcagccaacagccaaccgcatcgacacagtattcaatggaaacgaacgaaacgcttggagatcgtgccggtgccaacagccaaccacagttcagctctcagaagatgcgacgctttaacatttacggagagcggagagtcgcgaaccgagctggaaacgtacagcaaacatgttcgaagcgaggtcggtagcagggtgcacttggagaaaaatgttagcactcttaatatacataaatgcgttttgacttatttcagttagcgttgtagaaacaaaaaactgcattttttcagggtactaacttgtcaataatatctttaatatattatttaataatatatatttaatataattgttttaaaattctcccgaaaataacaaatcttgtttcgttaacagttcagtcaacagatcttaccgccataacattgctgttaaaccggcagaacggagcacgcgcaccattcgccacagcagctgtttgccaaacaggatttcctgcagcgacggccgccgattaacagttaagtttcgccgtgccctgccactgttgcaaacgcacgcacacaatctagcgacgcgtgcgctttgttgtcttgttgccgctgctgttgctgttagtgctgctgttcgtgctgccgcgctgcagatgctgctgctgctggggtaagatgatctttgaggccagggccgcgctgccagttcgagtctgtttggcgctcagaacgacggcgacgatttagtctcggatggacgctacgctgccaagcaccgtcagtcaggctttcgctgttctctcgctctcgcaatcgcattatatccgaccgatcgcgaagtttttcggcactatgtgcgccacgtgattgctgaaatctccttcgaaagccgtcgctatatcatcagcgataattcggatttaaggtgtcatgtgaagagtgtgtttgatataatcagttgattttcattcaaacgtatcccagtgtgtgaagttaaaaaaaaaactggaaaaattaacatctaaagaggaaaaaataaataaatagtgagttggtaaaaacatcgaatttatgctgttgtggaaatatatgatctggaaaaggtaagattttgttgtatatgagcttatgctattaaaaaatggctaagtctccctgctgacaaacaaaacatattaagagaataaataaaacatttattcattgaattaatgagacaacaacaagttgagatgctggacacataattcaaacgctaaaacaatagataaatacaagcaatatatatattaaaggcttaattgaataaaaaccattttgcataatttccataaatttgtcggatggttgttgtaagtcaaaataaatcgcaaataaaagattaataccgaaaacaattgcattataaaaaccaaaccaattaaagactgaaattatacaatttaataatatttttagcaataattgaaatacttagtacaaactattaaaatcaaaacaaaaaaccaacaataaaaagacaaatctgttgcgaagaaatggcccaactatccccagctatcaaggaccaagcttaactcccatgagttcgtactcacaccactaaggaggaccaaggagaaccagaaaaagtgtaatggtgaagacaaaagaagctcattgacatgctcattaataatgttattgccttttgtgcgataagtgtcaagaaatttctacaataggggctgcgaatggacaaagatgggagatattcaaacatttaattgtccaactgctgtcggcaatcaagcagaaaagggccaggggcagcctgaagcgactggatcgtggatcctcgatcgcgaaggaagaaggatcaaggatggaggatggaggatggaggatggaggatggaggatggaggatggaggatggaggatggaggatcgcagatcaagaattgcggaagcagacaattcaaactagagcgtgtgactgctgagtggatttgcatactgcgaatgtccgtctccagtggttggcagggctaataataaagcatattaccggcaattgtgcgcgagatggaaggcgattcgggtgtaggaagggtttgggcttgggtttgggtttgggttagggcttggacttggatttggattgcagattgtgtcaatgctccggggttcggttcagtgggctgtgttcttgattcttgttctattttgtagcggcttcaaaatatttgagacaatcgtggtttgcttgtttgaacaccttttctccctctgttgcctttatcagatttggcattgtccatcattttgtttgctttaaaggacacatttttttgggaccttgtttattattcctattgagagaagtccaacgttctgcccactttttttcagctctgtcaacagcgagttgatgagcttgttgagaatgtggcagcgaccaactgatctggttcttattgtctaagccgctctgaacttgtccccatcgagttcatctgcagatctccatagattagatccgaacaatctcctccacttggcttgcgatcaatatacagttgtagtttctgtagcagtttaggtttctaattaattgtctgtttctgcccaatgtgtaacattaatcttggcttaatcgataagtctgacagccaagatcgttcctatatctggtctgatctgttcggttcgatatacactcagaaatgaacaatggggattctgtttttaaatttgaaaggaacctgcagagtcaaatatttcgaattggcacaaccaaagacactagaatgtctttggcacaactctcgtctactcattgttttcccacaaatcgaactggccatcggacctaagcattgcattcaccttaaatttgggctcggcttgaggacttgtaattagctcgaagcatgggaattatgtactcctccatgacatctactacttctatgcgctgacttaaaggggtcctaaagatgccccaagaacaagactctcaaatatgcgcccggttacgtggatcagtggccttggtcgttgtcgtcgtgataaagccaaaaagattgagatgccgcctgcggatagggatctgcaagtttatagctcgagcgtgccgctcaattggatttcaatcgggtttctcaataaggatcgaaatgatttttgactttttggttctttatctacgaagttcaggtacggcgagatgtattgcaatttacagcacttctatgcatattaagtgcataaatatttagttttatgagtgcttatttatgaaagcagtgcagcagtaatataggttgttcccaatgtcgaaggtaaatgcacctatttgatgtaattatactcatttttcggctaacacgatgcttatgaatccatttccccaaaactcctccattcagagatcttctttctagctgagtgcaatctggcttaccactccagctccaccacgaactgcggttctgagtctttgggacccagagatggaagatctcctcgatgattttcctgctttctgaaaaagtgcaccgctgtgccgaaaattgtcacggtttcgcggtcgatggctcgcttgctgtgaaggtgcaaatttaatgtttgccaatttagcagcgctctgctgtcacctttggtgtccattagcgagcgtttatatgcaaagtgccgagcattggcaggccagctccggatctggcagccggcgggctttggacggggccaaccattatcacagaagcagcatcacgttgtggccacaccacctgctgggcgcatttcgcggagcagctccctgccacttgcatccctggtccggaaaatatccagactgggaaaactctggggagcacttaagcttgctagctggctgtcattggagggagtcagggcgttctgtggcagttctggttctcaaaagggccaacgagaattacgaagatcctgatggttacagagccgcacgtaaatacttgatttttatttatgataacaatacttaaaataataaaaatattaattattcttattataatattaataaaaataatgataataataataatattaataataacaataataattataataataataataataataataagaacaataataataataataataatatttataatattaatattatattatataatatataatatataatattatattaataataatattaatgataataataataataataataataataataataataattataataataaccataataataataataataataataataataataataataataataataataataataataataataataataataataataataataataataataataataacagtaccaatactaaaaagaataatcagatttaatcaaaaatgtatccgttttactttttttttttaaataaatgtttctctctttaaaaaggttctgtataaatgtaattaattatttaaaatttcccttctgacgactaacaagtaaaagttaaatttcattatcctaccatttgtttttgaattgcttgatcacatagttcatataattttattatccttgtattggacttcacgatttatttattatatatattatctcttaaacagtttatatgtttctgtttcttcatcataaaataatatactatactatattataatataataaactatacaagttatggacgaagaagtctggccatttgtggcccgtatttccccaaaagtggcagctaaggcctccatggaatacattattagcgcacaaatgtgtttaagaatttatattgtatatccatgacaaaattgatccctccctcggattcttcatgctctttaagtagttgacgcaagattttcgcagatattttatttgcgcttcgccgtatcttttctcgcttgaccttaggctttatgggctagcaaaacaagtcactgtagtacattgcattagatgtgtgaaagagtcttcccgggaaaagggagaggggttctcgggcgaacgagaagggaagacgaggtgcatggtcttctgacattgccgcgaccgaaactttgatggtgcaagcccaaaccggtcgctgcatacctcaatttctatccacgacctgtagcgaaataaaaaggcaaaattgcgaaaaaagaataaaataaagagaaacgcagtgggtcatcggttatgcatgctgctgctttaccgctggacttccccttcctcctctggtctgatgcttcttggcgtggtttcatggctcttcttatggacatggccgtggcctcgtctcgatctcagctgagcttgtccgatgatggccaatggttcctcctagcctccttgctggaacacaacccaaagaaagtgcctttggaaataggcaccatcaataacaaggacaatcgagaagaggtcgccagaagtggacttttcaactaggcgcgcattgcaacgcattggatgggatagtagccacatattgctcaaactaataatgtgaaattcacctaaattttgatatttacttaaattgtgagttgagagtgcaccttacaaaatgacaaacaatttctgggatttcgtagctaagcccatacccaaaacattcatacattttaaagacaccattaacattcgttaggcccgatcctctcgtagattaagaggatagggccatgtccgtctttccgtccgtatgaccgccacgattcccagatactataaaagatagaaagttgagattaatcatgcagattccagagacatagactgatgttgttacgcctactccaatgcccacaaaccgcccataaacacgcccacacttttgaaagatgttttaatattttttaatattattatatgtctttccaattgtcttttgtatcgatttgcgaaacaaagttgaactttgtcgtttgcactcctacaagctaagtatcgggtatctaatagtcgagagactcgactctcttgccttgtgttgtacaatgtattttataagttaactgtttgtttatatctgcaacatttttgatgacagtaaaaagctataaagctattaaatctgatggtatcgaatatgaagcaatgattataatgatattttaaatcagacatctcgttgttccaatagaaatattcgaaaaatatataaaaaaaataatttcgttgtttttgatcttaaagtgttttaattcggaatgtacggaatttttgacaatgtacaacatcggttttaatttgatcaaaatcaaacgaatatagctacacaaggacagtcggaaaatgaattgaatacgaaatttatttccttcgttattctagattattcaaatgcagttctctgtaatcctcttaatgatgacgaaccaaaccatacataacattaaaccctttaataatctgagactctttcattcattcaaaaggacgaacatataaatacataacaatatcagatacacttttaaaaatgagacccagaacatgtaaatccagtcgaaattgaaagttatttaaaatgttgtacacgatatgaaatgttttaatttataagcacattttggttcatttaatatcaaatggattattaacttatgatctttttgttgcagatgaaccagctgtgcaaagtgtgcggcgagccggcggctggttttcattttggggcatttacatgtgaaggctgcaaggtgagttcgttactatgtcggaacggcaacccaaatcgatattttatataattcatttgtgacaattgtgagaaactgtagagatgcgatttcgcacatttcgtagacaagatgtgcaaaaaatgatctcgattttgggctttacttttacacaaagcgaaatcgaaaacattattactgtaattaaaattcaattcgaaaaaataatcgatttttaattgactataagtagatacgtgtgcgcagagggcacaatacacggctacccttcaagtagcatgggaaaaagtgcaaaattcagagcagtccgcaggggaagggtgatggatccgtatatagagctaggtaagccccaaggcgcacacaattgtgaactgcagtcaatcaaataagaattacatgcatattagatgagtcagcgcaataggaacaaaaggcccagacacccatcaaacaccactcaaagttgaacttcaaaatcaactgggggcaagttttccagctccaaggtgagttggcacggctccaaaacaaaggcagccagctgttttacgttaaatggagcacgaagagcagtttatttttcttatcttcacaatacgcgctgtctcgcaagtagttggccaaattattgacgcatattttgtaacttcagcaagttcaatgggtggagcactacatcgacaggtgcaaataggagaaaacaatggagtaatgaataaccaattgtgagaagtgctaagtgaattatttgatatagactttcttcagttttggaaaaacgttctcacttggatttacaaccgaaaaatgagatatttcttgacattatttaatttgattttagtaagggcattattgggtgaataacgagttatccaaaacatatattttaaaaatttaaaacgccaaataaaaatgaacaaattaatcgagagagatctcagactgcctcgggactttcgactatcagatacccgttactcgtgtagtagaagagcgtgggagaaatttcaaaattctgattccatatcgttagaaattgaccagtaaaatatgaagtaaaagcctttttaaatatggtggtcgtgtgtgtgcgcttttgagggcgcacaatttttttggcatatggataaaagttggcaaaaatgaaaacatttttcaaaaatatgggtgtgacagttttaatcggtttttgagagtttaaatgggcgtaggaatcttctgaatcaaccttaagctgcgcctacgcctccaaatagatcttataacttgaggttgatagggtcagattgactcgtctagggatccttatgatatatatacaaatttaataaatagcgtaacgattcaacttttcttcctgttatcataaagaaaataagttactcatgttctccaaaaaatgttttcctccgcagtcctttttcggtcgtacttacaacaacatagcggcgattgcaggatgtaagcacaacggagattgcgtgatcaacaagaagaaccgcacggcctgcaaggcgtgccgcctgcgcaagtgcctcctggtcgggatgtccaagagtggctcccgctacggtcgccggtccaactggttcaagatccattgtctgttgcaggagcagcagacgacgtcgggcctcggtggagggagctccgtgggaagcggatcaggaggcggagtgagcagtgcgagtctggagcagctggcgcgattacagcaggccagtaaccaggcgcggcaaacctatcaggacaagaccaatccctgcatcaagtcagccacggccacgacatcacccagaatcgagggtgcggcagtgggcacgggaatcggtggcggcgcctctccgtcattcctgcaagcggcaaagctccaccaccagcggcagttaaagctcgattcccgcctcagcaacactcccagcgattcaggagcatcttcggcgggagatcccaacgaagatggtgtcaccagcgtcctcggtggccagatcgcaacaccatcatccaccaacgccaccagcctgcccaagctggatctgcggcatccgaactttccggccacctcggagccggatgctgatatgcagcggcagcgccaccaggagctgctcgagatctttcgcagtcactcggagccgctgtacagttcatttgccccattcagccacctgccacctgtgctgctcgccgccggagttccacagctgcccattttcaaggatcagtttaaggctgagctgctgtttccgacgaccagcagtcctgagctcgaagagcccatcgatctgtcctttagatcccgagcagaccctgccagtccgatggcccacaactccaatagtccgagtttaagtgagcctgctgcggcgagccactgtttgggggaatcgacaaacttcgtccgaaagtccacgccccttgatctcaccctggtgaggtcacaaacgttgacaggctaagattatctcgtgattgccggagaattcgctcgcgtgccaaaacaatttcgaaaaccataggctaaggtttgtaaaaagtatttaatcaacttgggagatgggttagatgggtttcattatgatttccggtgacattacttctgctgactagtaaatgtatgattacttttgggaaatcaacgttactgttacaaacatacatagcaaaccagtaaatcagtaaatatttaaaaattgttgtaatttcccacctacttgaaacaaaactacaacaagcataagcgaacccatcaattcaaaaacaataaatattttaaaatgccgaaagacattaaacattttggtgccagtaaaaatgatgtacaaatatccatattattatttataactacagctcaatgaccttaagcaaccctaaaataattatgtttattaacttaatatatgtatcatataataattagcccaatttactttgattatattttcattgttttcttaacttatatataggaattctttaagactaagatagagaatattaatttagagtgttgttctcgtattgaccttttgtttgttttattatttttaaattatttattttcttagaaagttaagaatattaaaatgtaaatgaggaatcaaataaaaatgtgtagaaaaaaacaaaattttattgcttcttcttagcttcagtagtcggtcttctgtgttgttttaacctacaaaattgcaatgaaaagtcggtacatttcttcctctggagcctgacgtaaaaagcttcattccattgacacatgagcaaacttttcctgcccatctgaagcaaaaatttgttcagcatacaagtacatttcaatatatatatatatatgtacgttcaattcaactgtcactccgtctgtgtttatgtgtatatccatcaagatggagcagaaagtcctggccagtcaatgctttattcattgcgtaacagtgcgggctaacatattcccaaatgtcaggctacctagatgttgactatataaatgtaattatgacaggccaagacagatgacacaagtttatatcagcgcaacaggagggtttcggctggaacgggaaatagagtccaaaacaaatgaattaggaaacgaacgcgcggggatttcataacgaaaaaacagtgcatgtaagtatatcaacaaacgagtgaatcaactacgttattaaatggcaaaaaaatacaaataaaacaaagtcttatttaaaatgcaatagcaatgaaatacattgggaacaagcaaatagaagcccaacaattgactaaggaaacgtagtcgaatcaacaaatgagataaaaattgcgctgttcactcaaggttgatgtcatattgattatataccacccttttaagcgagacataccacgaaaaggccatctcatatcggcggccgtctacccatctttgctgatttatgcaccttaaacacttcattccacttacgcttggccatcactcacactccgaggcgtgcatatatacgaagacataactcttgattggctgtgaaactctcgaatggcaattcacacgtctatccgataggtgtacgtctacatcggtgtgttcgggagagtatctttgggaacacgccccccgagagcagcgcacaa

SEQ ID NO: 16493 - DNA, 2181 bp, DROSOPHILA
agttcgagtctgtttggcgctcagaacgacggcgacgatttagtctcggatggacgctacgctgccaagcaccgtcagtcaggctttcgctgttctctcgctctcgcaatcgcattatatccgaccgatcgcgaagtttttcggcactatgtgcgccacgtgattgctgaaatctccttcgaaagccgtcgctatatcatcagcgataattcggatttaaggtgtcatgtgaagagtgtgtttgatataatcagttgattttcattcaaacgtatcccagtgtgtgaagttaaaaaaaaaactggaaaaattaacatctaaagaggaaaaaataaataaatagtgagttggtaaaaacatcgaatttatgctgttgtggaaatatatgatctggaaaagatgaaccagctgtgcaaagtgtgcggcgagccggcggctggttttcattttggggcatttacatgtgaaggctgcaagtcctttttcggtcgtacttacaacaacatagcggcgattgcaggatgtaagcacaacggagattgcgtgatcaacaagaagaaccgcacggcctgcaaggcgtgccgcctgcgcaagtgcctcctggtcgggatgtccaagagtggctcccgctacggtcgccggtccaactggttcaagatccattgtctgttgcaggagcagcagacgacgtcgggcctcggtggagggagctccgtgggaagcggatcaggaggcggagtgagcagtgcgagtctggagcagctggcgcgattacagcaggccagtaaccaggcgcggcaaacctatcaggacaagaccaatccctgcatcaagtcagccacggccacgacatcacccagaatcgagggtgcggcagtgggcacgggaatcggtggcggcgcctctccgtcattcctgcaagcggcaaagctccaccaccagcggcagttaaagctcgattcccgcctcagcaacactcccagcgattcaggagcatcttcggcgggagatcccaacgaagatggtgtcaccagcgtcctcggtggccagatcgcaacaccatcatccaccaacgccaccagcctgcccaagctggatctgcggcatccgaactttccggccacctcggagccggatgctgatatgcagcggcagcgccaccaggagctgctcgagatctttcgcagtcactcggagccgctgtacagttcatttgccccattcagccacctgccacctgtgctgctcgccgccggagttccacagctgcccattttcaaggatcagtttaaggctgagctgctgtttccgacgaccagcagtcctgagctcgaagagcccatcgatctgtcctttagatcccgagcagaccctgccagtccgatggcccacaactccaatagtccgagtttaagtgagcctgctgcggcgagccactgtttgggggaatcgacaaacttcgtccgaaagtccacgccccttgatctcaccctggtgaggtcacaaacgttgacaggctaagattatctcgtgattgccggagaattcgctcgcgtgccaaaacaatttcgaaaaccataggctaaggtttgtaaaaagtatttaatcaacttgggagatgggttagatgggtttcattatgatttccggtgacattacttctgctgactagtaaatgtatgattacttttgggaaatcaacgttactgttacaaacatacatagcaaaccagtaaatcagtaaatatttaaaaattgttgtaatttcccacctacttgaaacaaaactacaacaagcataagcgaacccatcaattcaaaaacaataaatattttaaaatgccgaaagacattaaacattttggtgccagtaaaaatgatgtacaaatatccatattattatttataactacagctcaatgaccttaagcaaccctaaaataattatgtttattaacttaatatatgtatcatataataattagcccaatttactttgattatattttcattgttttcttaacttatatataggaattctttaagactaagatagagaatattaatttagagtgttgttctcgtattgaccttttgtttgttttattatttttaaattatttattttcttagaaagttaagaatattaaaatgtaaatgaggaatcaaataaaaatgtgt

SEQ ID NO: 16494 - protein, 373 aa, DROSOPHILA
MNQLCKVCGEPAAGFHFGAFTCEGCKSFFGRTYNNIAAIAGCKHNGDCVINKKNRTACKACRLRKCLLVGMSKSGSRYGRRSNWFKIHCLLQEQQTTSGLGGGSSVGSGSGGGVSSASLEQLARLQQASNQARQTYQDKTNPCIKSATATTSPRIEGAAVGTGIGGGASPSFLQAAKLHHQRQLKLDSRLSNTPSDSGASSAGDPNEDGVTSVLGGQIATPSSTNATSLPKLDLRHPNFPATSEPDADMQRQRHQELLEIFRSHSEPLYSSFAPFSHLPPVLLAAGVPQLPIFKDQFKAELLFPTTSSPELEEPIDLSFRSRADPASPMAHNSNSPSLSEPAAASHCLGESTNFVRKSTPLDLTLVRSQTLTG

SEQ ID NO: 16495 - DNA, 4363 bp, DROSOPHILA
catttgtgtagatgatagcctcctatacgcatttcaattgtttttagcgtgctaaagaaccttgttaaatgcaatttcagctattgtttagtcagttttagtggcatttacacttccattctcgttgcgtttcgtttttgcctgtacatatgagaagctctgatgtttttgtatcaaataaagtttattccttcaccacggaccacgtatttaaattcgcagtctatcgtgcggcagaatgacaccattccacctgcatacaaatgattatgtgcgattcgctcctcgactctccgatctatagaaatgcatagagatatacttacactcatacccatgctgtgagtattcaattaaccaaacttgaaccttgtcgacgttcaagtgcatgaaattaacgagaatttttaatagcattatataataatctgtgaatcagctaacgacaataacgtttaatagaagatgcgcccttaatttaattatggttctactccgctttctgtgatttttgaaaagttgagaatataactactcactgcttgcttactctttcattatcgcactattagagatacccatttaatggacagcaattaaggggtaattatattctagcagttagcttgtttaagccagtgctagtattggtagcatcattcaatcagaaaacgtttcaaatctttttgatattttagaagaataatgtaacacaatgagtctttctttcaaagaaaaaccaaataaagtacttacacatccacttttaagagaacttaaagaatatctcaatttctttggaacatgcttactatatctggatattaggatgatagttcctaatagttcagagctattccatttgatattaaactttgcaatggaaaattcaaatcagttggagggcgggcgaaagaaaaagctctttccctcgcagatcctaaatatgaccaagtgggtgagtcttccgggtgactggcagatcggtaggaagcagcagctagtcgagaaccgttatcagtggcggcaataacaagcgaggcttcaattcgcttccagtgcaaagaagattattgcagttgcattgccgggtgcgatccgcccagttgtccacgtgtgagtacggatgattgtcgatcgctcgatcgatttcatacaaagtgtgtgaggtgtttacctcgagtccagaaagtcaagaccaaaacgcaacgatgacgggaacagcggcagtgcgactcagcattacgatacccacgaaggcggaggaggagcgcctgaagaaggtgtacgtccaggtggtcaatggagaggtcgccacgcccatgggtaccgccagcagaacctcaaccattgaaagcttatcgaccattcggatcggggaatccccggaacggcagagccacaaagtcctaaataccttgccaaagattgaaattcagacgtgccacgatcagctgcttgatatcccactggacacggaccaggagcaggtggtgcgccagatcctgcacagatttcacatacccaatgccgtttggctgcccagtctagagggtaatgcttaccacatcagcttctccatggactttgacgaacgctacgagaatctctatgaggcgctgcaggaattcggcatcggtgatcgtgagggatctacagtatccgtggtcagctgcctggcccacagatcctacgttcagcgtgaggatacggaggagcaggaggaccaaccatcgagcacagagtaagtcaaatgaaaatggaaaagttcaagctacttcagttcacaggatccatcatctacagacacatcaatgcccagaagcagggtatctgggatcggttcatgaactcggtgcgatcccgattgaatgtggcacagatcgtaagggatgtgcgccaggatgcggctattaccttcgacttttgcatactcctagtttcggcggcgtaagaagtcacttttaatataaatattatagaattggaatttggaaaagtgcctagtaaaaaacgattttccaagattttcattacctaattaaatggaactaagcttgtaatacaatcttgtttctggaaatgatctagaaattttcgaaatccaatattctatatcttcaagttgtaggataacacctgtgataacacctattcccttacagagttctggcgagctttggcctggtggagaatagcacgattttcctggcctccagcatgctcatttccccactgatgggtcccataatagcggccatctttggaactgtgatccaggatcgatcgctccgcaggctgggcatgctgaacgaactgattggtatactgaccgccacactggtgggtttcctattcggtctggttgtgtgcaccacggatcgcaagtatggcattggtgagggactgacggaggagatgctatcccgctgcgatctgcactccctcgtcgttggggtattcacggccataccgtcgggagcggcggctgccatcggaatcctgggcgggaatattggttctctggttggcgtggccatatcggcatcgctgctaccgcctgcggttaactccggtctgctgtgggcggtggcctgcatttacaagatattcgagaacgacgattcgctctacgtggatgtgattaaatcgcgccgctactcggacaaccaggccactgaattggccgtgctcggcggcatcagcatgtgcctaactttgtccaacgttctgtgcgtctatctcatgggcatcctggtgctgaaggtaaaggagattgccccggtgattgggcgcaaaaaccgacagttctggaagcacgacataaagctggcgcgtaatggcaaagtggaaacggagtcggagatactcaacgagctaatagccaatctggccaccgaagacaagcacgcactgggctccatcaatcgtcagttcctgcgccatctggacgaatcaaactaccagcacacttggtcgccgctcagcaaccgacatagtttctcaatgccacaaccgcctggcgccggcatctccaccatccatcgcctggaacaattgtatgcgtcgagaatagggtttaatccaccagcagtagaacgacgccaacgccacagcgtagtaagcagaccatcgcaacggagccacgaggtctccgttcagctgagtcctccacagccagtaagtagcacacaaagctgtcttgtctatcccgagtgctcatttcgtgtattccagcgtccacgattcgcgagcatgccatcgcaagtgggaaaggacgagccagctagggatgcggccatccaagtcgcgagctccaagagatttacggtaacaccagctcgagtggacgagcagacctagaatgttgtcaagtccatttgggtttccactctcacagatctttgtataatatttaaataatgtaagtgtcaattttgtaaagttaattagttgttatactccagcagggggtatgtccgtacagaatctgtgatagtgctaacctgcaatggcgtccatagcatagttaagcgtatatgtgtaatgtgcatctttgtataacaatttccaataaaaaactacaagtctaatccgctcggtccctgccgatccgctttgacttgggcgcgaccacgtttcagttgtagacgttcgcggaccgctcgctcctggcgcctgcgcagcttctccagtgtctcctcgctgggtggcgcaggtgccacagcctcctgggagcgtatgatggtgcgcagcttctccagcgcatcggccaggttcatttgctgggagcgcgtaagatcactcttgatgtaaaagtagccgtctttggtaatccggtttgccagcaccttgagcagcttctggcgcgtctgctcgggtatccagtccgcttgtgccaccttgaagcgtacatccaccttggtattcaccgtgttcacgtgctgaccaccgggtccggagctcctgctgtaggtgatctccagtcggtccatgggaatgaagccgctgaacttgtcgctgccactgggctgggtgggggatgtatacatatatcaatagatgggatccctgaaggcactgcatccacttaccggcgggggcggcgtgtagatttgcagtcgggcgccgggatagatcttgtccagggataaatcgctcttgtaggagagctgacgacccagaaggttgcctgtgccgcctgaggagctgctctggcgcagaactcttatgaaggcactcgtaattttattcattttatgccaaaatttcaatgagttaagctaaattaaatgttacgagaacgacgtttgtgttcaccacagaacagctgttcgaggtgagttgcgtgcagtgtgaccga

SEQ ID NO: 16496 - DNA, 2086 bp, DROSOPHILA
ctagtcgagaaccgttatcagtggcggcaataacaagcgaggcttcaattcgcttccagtgcaaagaagattattgcagttgcattgccgggtgcgatccgcccagttgtccacgtgtgagtacggatgattgtcgatcgctcgatcgatttcatacaaagtgtgtgaggtgtttacctcgagtccagaaagtcaagaccaaaacgcaacgatgacgggaacagcggcagtgcgactcagcattacgatacccacgaaggcggaggaggagcgcctgaagaaggtgtacgtccaggtggtcaatggagaggtcgccacgcccatgggtaccgccagcagaacctcaaccattgaaagcttatcgaccattcggatcggggaatccccggaacggcagagccacaaagtcctaaataccttgccaaagattgaaattcagacgtgccacgatcagctgcttgatatcccactggacacggaccaggagcaggtggtgcgccagatcctgcacagatttcacatacccaatgccgtttggctgcccagtctagagggtaatgcttaccacatcagcttctccatggactttgacgaacgctacgagaatctctatgaggcgctgcaggaattcggcatcggtgatcgtgagggatctacagtatccgtggtcagctgcctggcccacagatcctacgttcagcgtgaggatacggaggagcaggaggaccaaccatcgagcacagaacacatcaatgcccagaagcagggtatctgggatcggttcatgaactcggtgcgatcccgattgaatgtggcacagatcgtaagggatgtgcgccaggatgcggctattaccttcgacttttgcatactcctagtttcggcggcagttctggcgagctttggcctggtggagaatagcacgattttcctggcctccagcatgctcatttccccactgatgggtcccataatagcggccatctttggaactgtgatccaggatcgatcgctccgcaggctgggcatgctgaacgaactgattggtatactgaccgccacactggtgggtttcctattcggtctggttgtgtgcaccacggatcgcaagtatggcattggtgagggactgacggaggagatgctatcccgctgcgatctgcactccctcgtcgttggggtattcacggccataccgtcgggagcggcggctgccatcggaatcctgggcgggaatattggttctctggttggcgtggccatatcggcatcgctgctaccgcctgcggttaactccggtctgctgtgggcggtggcctgcatttacaagatattcgagaacgacgattcgctctacgtggatgtgattaaatcgcgccgctactcggacaaccaggccactgaattggccgtgctcggcggcatcagcatgtgcctaactttgtccaacgttctgtgcgtctatctcatgggcatcctggtgctgaaggtaaaggagattgccccggtgattgggcgcaaaaaccgacagttctggaagcacgacataaagctggcgcgtaatggcaaagtggaaacggagtcggagatactcaacgagctaatagccaatctggccaccgaagacaagcacgcactgggctccatcaatcgtcagttcctgcgccatctggacgaatcaaactaccagcacacttggtcgccgctcagcaaccgacatagtttctcaatgccacaaccgcctggcgccggcatctccaccatccatcgcctggaacaattgtatgcgtcgagaatagggtttaatccaccagcagtagaacgacgccaacgccacagcgtagtaagcagaccatcgcaacggagccacgaggtctccgttcagctgagtcctccacagccagtaagtagcacacaaagctgtcttgtctatcccgagtgctcatttcgtgtattccagcgtccacgattcgcgagcatgccatcgcaagtgggaaaggacgagccagctagggatgcggccatccaagtcgcgagctccaagagatttacggtaacaccagctcgagtggacgagcagacctag

SEQ ID NO: 16497 - protein, 624 aa, DROSOPHILA
MTGTAAVRLSITIPTKAEEERLKKVYVQVVNGEVATPMGTASRTSTIESLSTIRIGESPERQSHKVLNTLPKIEIQTCHDQLLDIPLDTDQEQVVRQILHRFHIPNAVWLPSLEGNAYHISFSMDFDERYENLYEALQEFGIGDREGSTVSVVSCLAHRSYVQREDTEEQEDQPSSTEHINAQKQGIWDRFMNSVRSRLNVAQIVRDVRQDAAITFDFCILLVSAAVLASFGLVENSTIFLASSMLISPLMGPIIAAIFGTVIQDRSLRRLGMLNELIGILTATLVGFLFGLVVCTTDRKYGIGEGLTEEMLSRCDLHSLVVGVFTAIPSGAAAAIGILGGNIGSLVGVAISASLLPPAVNSGLLWAVACIYKIFENDDSLYVDVIKSRRYSDNQATELAVLGGISMCLTLSNVLCVYLMGILVLKVKEIAPVIGRKNRQFWKHDIKLARNGKVETESEILNELIANLATEDKHALGSINRQFLRHLDESNYQHTWSPLSNRHSFSMPQPPGAGISTIHRLEQLYASRIGFNPPAVERRQRHSVVSRPSQRSHEVSVQLSPPQPVSSTQSCLVYPECSFRVFQRPRFASMPSQVGKDEPARDAAIQVASSKRFTVTPARVDEQT

SEQ ID NO: 16498 - DNA, 3917 bp, DROSOPHILA
acactcgttgcggccattgcggccgctgtcgtggccattttgaattttcctaacggtaaaggtatatccgggggatcgtttgagatcctgtgtatgtttgtgtgcgtgcctgcctactgagggagtatatctttgaaaaattgggtacgaaaagaaactgtagctccgtggcacttaaagcaaggcgatctggtttcgtactcaaaacgggcgtcgattgaactttaatttgcgcatttacataatgtttgcaaaaattattctgcacacaaagcaccgcactcacacagacgcgccagcacacacacactcactcgcacacacacatacacacgcacgcacagagcgcagcttgagtttttgtcaatgaacaaatacgtatggaaaaaactcgtgcaaaaaacgttcgggcgaaaagcgtcacgacccggaccttcgatgttctgccaacgagcgaccgattgaaactaaaccagcttgcgccaactgaccgccttctgttaccggcccatgttaagctttaaaattagctttatgtccatggtcgacgagggagtactctaccttaaaattatatttttaacgtataactaagtatttactgaagtggatgatattaccacattattcacgagtttatggtttcatataagttcattttttgctttaattaatgcatttttaatttaaatatttcttattctcaaaggtgtgataataaagaatacatacatagaactctccaaataatattgaaagtatttaaattgtaatataatcttaaaaactttaatcaaaattgcatataaaaatctaattattattattgtttgtgacgatcatgtactctgtcaaccaaactgcgcagaagctttgtgaattgatccgctgcctcgatggactctgatttttgtaggggacaccctaaagccaaccatgttaacgcataaacgagcagcagctgattggaaatcggacccatttgcggttatcgatagccaagacagcgttgttgtccaatcagaaaaggtgtaggcgcagcggaatagcataaataaaatccgagagatgtaagttgcaacttatttgtgcagatacaaatgaatctgggcaggaatacccgaaattagctacgttttcccgtaatacccggtacgattactcatttccagcaatgttgaggccgcgaagtgtggaacagagataactaatcccacaagcaagaagaagaactgcccaaaaaaagagccagcggattaataacattatagcaccgcacctgagcgtacagaacatcccaacgaaatgtcgcgcaaaatggccaaattctacaagctggacatcaatcgcaccgagtgggaaatcccggaaacataccagaacctgcaacccgtgggtcagggtgcctacggccaggtctgcaaggccgtggtccgcggaaccagcacgaaggtggccatcaagaagcttgccaggcccttccagtcggcggtccatgcgaagcgcacctatcgggaactgcggctgctgaagcacatggatcacgagaacgttattggtctgctggatgtctttcatccaggacagcccgccgattcgctggatcagttccagcaagtgtacatggtgacccacttgatggacgccgatctgaacaacataatacgcacgcagaaactgtctgatgatcatgtccagtttctggtctaccaaatcctgcgcggtctgaagtacatccacagcgctggggtcatccatcgtgatctaaagccatcgaacattgcggtaaacgaggactgtgagcttcgcatcctggatttcggtttggcccgtcccgcagaaagcgagatgaccggatacgtcgcaacgcgatggtaccgggcgcctgagatcatgctcaactggatgcactacaaccagacggcggacatctggtcggtgggctgcatcatggctgagctgctgactgggcgcacgctgttccctggaaccgatcacatccatcagctgaacctcatcatggaagtgctgggcacgccagctgatgagttcatgagccgcatctcctcggagagcgctagaaactatattcgttcactgccggtgatgccgcgccgcaatttccgcgacatcttccgcggtgccaatccgctggccatcgatttgctggagaagatgctggaacttgacgccgacaagcgcataaccgccgagcaggcgctggcccatccgtacatggagaagtaccacgatccaaccgatgagcagaccgccgcgctctacgaccagagcttcgaggagaacgagctgccggtggagaagtggcgggagatggtcttcagcgaggtgacggccttcaagcccacagccgccttcgctgagctcctgcccaaagagcagtaatcccggccgccatccctctccgttcaatgatgctatatacaattagaacagtcttttctacacctagttcaagcggatgcgctcagtcgtgatttctctactcgtcgagtgtaaacaatcggggatatttattctagagcgatttatatttagaaactcttcagtggctggatttcaacaatttgttttgaccacaaacgtaaggtgaaatagtattgtattttcgaaccttcgatttgcattcgatggatatagaaatagcgattgaactaggtgcatgcctgaaatgtagccattcggaaatgtttccaaaaatcaatcagagtcacagccttaatgtccagttcaactttagatttggtgtcggttttaacacgcagttcttgtgaataatcctgtaaatgtgagtgtacatgtacatcgtagttcgtaagcgaacgcatctagcggccagtaactataaaaaagagcactagtgtctacgttgaatccaaataaatgtgctatgtattttaaaaaatgagatcctctagatatcgctcgaattcctgctctctggaggcttgctctcggcttatatcgggttgttgttgccagatctgttcgtctgccgtggtggcatcctttgagtctgtgggctccttgctggcttctggatgggattcggatgctggttcgacaggctcctcctcctcttcgccagaactttcgtgaccaacatcgagttttcgacgcttacgtttcttttcagcgcgccgttcctccttttccctgcgtctccgcttcttgcattctctcttcttggtgcggtagttcagctgatccgtgtgggtgggacacagccgcacctatggaattcccattagtgacacaatcgcggaaacccatttggaacccaccttgaccagcgcatttaggggctcacccttttcgatatacctaaagtttacctcccagctgcgcagattatcccgctccccgcaatgccggctgccgcactggaactgcccggttccggtgaccacctcctgctccgttcgccagcgcagcgctatcttgttctccttgtagcgggacaggtccgcgatgcagtactccttaaatagcttcctgtagtatcgcagggccaagcgctgctcccagcttagggtgtcgctatccaactcgtcgtcctcccacaggaagcggtgattctctcggattacatcgatgtctcgcttgtgccgacgtgattccgtctcattcggtaggttaagcacgtaattactaagtatatagttgtgtcgctccttggcactcaggttgttcagattcactgggaataattgcgagccgctcattatgataaaaaatttataataaacagacttcgatttcagggcactgcctatcgatatatcgaagactgtggtcctactctggctatttttacgctatatattaaacgataaataaaatgaagctgcaaaatttaatcacaaattgaaattattccaactgaatataataaataa

SEQ ID NO: 16499 - DNA, 1815 bp, DROSOPHILA
aagacagcgttgttgtccaatcagaaaaggtgtaggcgcagcggaatagcataaataaaatccgagagatcaatgttgaggccgcgaagtgtggaacagagataactaatcccacaagcaagaagaagaactgcccaaaaaaagagccagcggattaataacattatagcaccgcacctgagcgtacagaacatcccaacgaaatgtcgcgcaaaatggccaaattctacaagctggacatcaatcgcaccgagtgggaaatcccggaaacataccagaacctgcaacccgtgggtcagggtgcctacggccaggtctgcaaggccgtggtccgcggaaccagcacgaaggtggccatcaagaagcttgccaggcccttccagtcggcggtccatgcgaagcgcacctatcgggaactgcggctgctgaagcacatggatcacgagaacgttattggtctgctggatgtctttcatccaggacagcccgccgattcgctggatcagttccagcaagtgtacatggtgacccacttgatggacgccgatctgaacaacataatacgcacgcagaaactgtctgatgatcatgtccagtttctggtctaccaaatcctgcgcggtctgaagtacatccacagcgctggggtcatccatcgtgatctaaagccatcgaacattgcggtaaacgaggactgtgagcttcgcatcctggatttcggtttggcccgtcccgcagaaagcgagatgaccggatacgtcgcaacgcgatggtaccgggcgcctgagatcatgctcaactggatgcactacaaccagacggcggacatctggtcggtgggctgcatcatggctgagctgctgactgggcgcacgctgttccctggaaccgatcacatccatcagctgaacctcatcatggaagtgctgggcacgccagctgatgagttcatgagccgcatctcctcggagagcgctagaaactatattcgttcactgccggtgatgccgcgccgcaatttccgcgacatcttccgcggtgccaatccgctggccatcgatttgctggagaagatgctggaacttgacgccgacaagcgcataaccgccgagcaggcgctggcccatccgtacatggagaagtaccacgatccaaccgatgagcagaccgccgcgctctacgaccagagcttcgaggagaacgagctgccggtggagaagtggcgggagatggtcttcagcgaggtgacggccttcaagcccacagccgccttcgctgagctcctgcccaaagagcagtaatcccggccgccatccctctccgttcaatgatgctatatacaattagaacagtcttttctacacctagttcaagcggatgcgctcagtcgtgatttctctactcgtcgagtgtaaacaatcggggatatttattctagagcgatttatatttagaaactcttcagtggctggatttcaacaatttgttttgaccacaaacgtaaggtgaaatagtattgtattttcgaaccttcgatttgcattcgatggatatagaaatagcgattgaactaggtgcatgcctgaaatgtagccattcggaaatgtttccaaaaatcaatcagagtcacagccttaatgtccagttcaactttagatttggtgtcggttttaacacgcagttcttgtgaataatcctgtaaatgtgagtgtacatgtacatcgtagttcgtaagcgaacgcatctagcggccagtaactataaaaaagagcactagtgtctacgttgaatccaaataaatgtgctatgtatttt

SEQ ID NO: 16500 - protein, 365 aa, DROSOPHILA
MSRKMAKFYKLDINRTEWEIPETYQNLQPVGQGAYGQVCKAVVRGTSTKVAIKKLARPFQSAVHAKRTYRELRLLKHMDHENVIGLLDVFHPGQPADSLDQFQQVYMVTHLMDADLNNIIRTQKLSDDHVQFLVYQILRGLKYIHSAGVIHRDLKPSNIAVNEDCELRILDFGLARPAESEMTGYVATRWYRAPEIMLNWMHYNQTADIWSVGCIMAELLTGRTLFPGTDHIHQLNLIMEVLGTPADEFMSRISSESARNYIRSLPVMPRRNFRDIFRGANPLAIDLLEKMLELDADKRITAEQALAHPYMEKYHDPTDEQTAALYDQSFEENELPVEKWREMVFSEVTAFKPTAAFAELLPKEQ

SEQ ID NO: 16501 - DNA, 4047 bp, DROSOPHILA
acgtgcggaacctgccgtacaaaatcacctcggacgagatgtacgacatattcggcaaatttggagccattcgacagatacgcgtgtaagattgaagatgataatgctattcgccgtgaatcctctcaatcaatttgtgtatcttttgcagaggcaacactccggaaacgcgtggcaccgcctttgtcgtctacgaggacattttcgatgccaagaacgcctgtgaccatttatcgggttttaatgtgtgcaatcgctatctggtggtgctctactaccaatccaacaaggccttcaagcgcgtggacatggacaagaaacaggaggaactgaacaacattaaggccaagtacaatctgaagacgcctgaagctccttagaacccacacttggtgcggcaggcggtgatggggcatagccagacattgggccccaccagatgacgcccccacttccatcgaccattttccattgtttagggaacttcttgctctgcttatgtgtataccaaatttttgctatctacttgtagatttttttgatcgcattttgtatcatttgaatctaatcattatcatccatccatcactccatctatcatataaacggccggatatcgcggaacgcagacatttgcgcccggttccgactgtttgcaatcatttgacgacattaagacactctctcatcaaaataacaagcaagtgaaagtaaaaataaaaaaaaattgaaaaactagaatcgtttgtttcgatttatgaccaattttttttaaaactagttttagtccaaaaccatttgtagttattctaaagtgtgtcatttgggtcaagtttatttaacaacttagaaataggataacaagtaatagttaaatattaaccaacaataaaaattcccactattatgggaagtcttttgccctatgtaatcgtaaactattctgcgattagggttcctccttaaggtcaggaccagtttggctagctgccgctgcctattacttttcgtatgtgtcttgctgcttctccagtgccagttggttcttcaaatccttgagctccttcttggcgaccttcgcaatttcctgccgtagtgcctcaaccttttgtttacggtcatttctctcccccagaggcttcgccggcttttcgtcatggactttttggtgtcggatgagcgccgctacctggcgaaagcgattgccacacgtcttacactcgaagggcttttcgccagtgtgtatccactcgtgttgcttcacggattgcgagttggcaaagcgacgggagcagaaacggcactcaaagtccttgactttttcgtggacgctcttgtagtggcgcttcatgttgcctatgctcttgaatccctgactgcagctgggacacaagtacataccctccttttgcacaaactgaatctcgtctgtgggattcactgcggtccctgccaatagggccacatcaacttgctctacgcggcggggattcttaggaatgctggctacggattcggcgtaaaccttcagcagctgatgtgagtccacttgagtgtcactggcatcgccatttacttgcacctgtttataagtttccagagccctttccacgctcttctcatgaatcttcagatgattgttgagactctccgaatgcaggaactttttgtcacaaacctgcaaggcgaaaatatatcagactttggtaacaagggtataatggtaattcccttaccttgcattcgcagcgcttctcaccagtgtgcgccatctcgtgtattttgcaggcgtatgctttcccgaacgtctttccacagtactggcaagcaaaattccggattttctcatgtacgatcttaacatggctctctagcacccgcttcgtgtgggtggcatagtcgcagatgcggcacttaaactggttccgttgggtgtggatcagaatgtgcttactccattcctggcgggtggtctttcgcactccgcagtactgacacacgtagttcttgatgccagcatgccggagaagatgattctttagggcactattgatgtaaaagcccttgccgcaaatggtacacggatagggaagctcttcgcccgtgtgcgtgtacatgtgcttcttcatagccaccgggcaacgaaacaccacgccgcattccttgcaagactgttcaccccgcggagcaataaccctcgcctggttgtgaacctttttcaagtgaatggtcagcagccggagacgggaaaaaaccaattgacagccctccacggtgcagggaaccgtatcctccttcttggagtgcgcatagtccacgtgcaaacgcagtgcaccggctgtggtgaagccctttcggcagctttcctcctgacactgaaacggcaacaggtcattgtggtgcttcatgtgctcctcgaactttgattgctttttgaacttttgctggcagatggaacagctcataaggcgaaacagtttacgcttgtcgttcgcaatccgtcgctgccccatggcctgctcatcgtcgctgttgaacccttccgactcctttttctcctcctccagtccgttgtgctctgcactggagaagtgctcctcgctttggtcccttgaatgctcctctagttccttgtcaactttttccagcaacttgaacacatcctcctcgttgtcaatcatctctagtttgttattcagcagcggatcgaaactggccggctcctctggcctttcaggtgcctcagaatcatcagctatagattcgaatacacccatgggcatattcctctggctggtcatcatttcctttagacgtttaatagattctgcgcacagttcgcggaagtcatgcaggtcgttcagcttggtgaaacattgggtgcacaggtttctcgggaaaccgtcgttttgatccgcatcaaacgaagtgcacgccctgagcttctggaacagatctggaaccacgaagagatcgtgtccagcaccatgcttcaggtggacaaggcaggtgagacaaagcgattggacggagtacttgagctccatagtgcccatttccctcaattctcgggcagataacaatcgaagcttctaaacaaatttgttccagtgtgacaggcagtctgaccgtttcgctatgccattaacccattacggtgtagtggggtggcaagtaaacagcatacttggattcttatttttatattaacttgttttaatgtaagtgctttttagcaagaccatgcatgcgtctagttaaaatacatttatttattatttatttttgactttatttcgatacagaaatcttgtacgttcattttcgtatcaaattttcttgatgcccagtttgtatattttcaaatgtcgttgcttattattaaaagcaatttgttttacatgtttatatatacatactaatacaaaaaaatttgttttatattttttctatatatacataccattatctatatattgtaagttcagtttcgtttttgttactatggtgctcagtttgcaaaatatttttaaaaaaccctgaaatactatttgaagtatacaagcaatatctatttaattaaattagttgtatatatatatattttttttttttgtatattgcaacctaattagaattgcaaataagaaggtaagaaaaaacattgattgtccagccctgaaacgcaaaacaactacgcactcggacgagtaactcgctggcagaagtacttgcttattgcccactcgcccgattgccagtcgacgagtatacaattttttctgtgtcaatattattttattgcttactgaccggagagagacgcaaaaagctatagaaaaccgccccgatccgcagtgccgattgcgattgaaagcaagatgaacgagggcaggcagtactcgatccacagcctgtgcaggatctgtctgaaccacctgcagaacgacgccgcctacgatttgtatctggttccaggactttcgaagaagctatgcttctgcacatccctgtccgtggagcaaaacgacggattcccgaagaacc

SEQ ID NO: 16502 - DNA, 1989 bp, DROSOPHILA
atggagctcaagtactccgtccaatcgctttgtctcacctgccttgtccacctgaagcatggtgctggacacgatctcttcgtggttccagatctgttccagaagctcagggcgtgcacttcgtttgatgcggatcaaaacgacggtttcccgagaaacctgtgcacccaatgtttcaccaagctgaacgacctgcatgacttccgcgaactgtgcgcagaatctattaaacgtctaaaggaaatgatgaccagccagaggaatatgcccatgggtgtattcgaatctatagctgatgattctgaggcacctgaaaggccagaggagccggccagtttcgatccgctgctgaataacaaactagagatgattgacaacgaggaggatgtgttcaagttgctggaaaaagttgacaaggaactagaggagcattcaagggaccaaagcgaggagcacttctccagtgcagagcacaacggactggaggaggagaaaaaggagtcggaagggttcaacagcgacgatgagcaggccatggggcagcgacggattgcgaacgacaagcgtaaactgtttcgccttatgagctgttccatctgccagcaaaagttcaaaaagcaatcaaagttcgaggagcacatgaagcaccacaatgacctgttgccgtttcagtgtcaggaggaaagctgccgaaagggcttcaccacagccggtgcactgcgtttgcacgtggactatgcgcactccaagaaggaggatacggttccctgcaccgtggagggctgtcaattggttttttcccgtctccggctgctgaccattcacttgaaaaaggttcacaaccaggcgagggttattgctccgcggggtgaacagtcttgcaaggaatgcggcgtggtgtttcgttgcccggtggctatgaagaagcacatgtacacgcacacgggcgaagagcttccctatccgtgtaccatttgcggcaagggcttttacatcaatagtgccctaaagaatcatcttctccggcatgctggcatcaagaactacgtgtgtcagtactgcggagtgcgaaagaccacccgccaggaatggagtaagcacattctgatccacacccaacggaaccagtttaagtgccgcatctgcgactatgccacccacacgaagcgggtgctagagagccatgttaagatcgtacatgagaaaatccggaattttgcttgccagtactgtggaaagacgttcgggaaagcatacgcctgcaaaatacacgagatggcgcacactggtgagaagcgctgcgaatgcaaggtttgtgacaaaaagttcctgcattcggagagtctcaacaatcatctgaagattcatgagaagagcgtggaaagggctctggaaacttataaacaggtgcaagtaaatggcgatgccagtgacactcaagtggactcacatcagctgctgaaggtttacgccgaatccgtagccagcattcctaagaatccccgccgcgtagagcaagttgatgtggccctattggcagggaccgcagtgaatcccacagacgagattcagtttgtgcaaaaggagggtatgtacttgtgtcccagctgcagtcagggattcaagagcataggcaacatgaagcgccactacaagagcgtccacgaaaaagtcaaggactttgagtgccgtttctgctcccgtcgctttgccaactcgcaatccgtgaagcaacacgagtggatacacactggcgaaaagcccttcgagtgtaagacgtgtggcaatcgctttcgccaggtagcggcgctcatccgacaccaaaaagtccatgacgaaaagccggcgaagcctctgggggagagaaatgaccgtaaacaaaaggttgaggcactacggcaggaaattgcgaaggtcgccaagaaggagctcaaggatttgaagaaccaactggcactggagaagcagcaagacacatacgaaaagtaa

SEQ ID NO: 16503 - protein, 662 aa, DROSOPHILA
MELKYSVQSLCLTCLVHLKHGAGHDLFVVPDLFQKLRACTSFDADQNDGFPRNLCTQCFTKLNDLHDFRELCAESIKRLKEMMTSQRNMPMGVFESIADDSEAPERPEEPASFDPLLNNKLEMIDNEEDVFKLLEKVDKELEEHSRDQSEEHFSSAEHNGLEEEKKESEGFNSDDEQAMGQRRIANDKRKLFRLMSCSICQQKFKKQSKFEEHMKHHNDLLPFQCQEESCRKGFTTAGALRLHVDYAHSKKEDTVPCTVEGCQLVFSRLRLLTIHLKKVHNQARVIAPRGEQSCKECGVVFRCPVAMKKHMYTHTGEELPYPCTICGKGFYINSALKNHLLRHAGIKNYVCQYCGVRKTTRQEWSKHILIHTQRNQFKCRICDYATHTKRVLESHVKIVHEKIRNFACQYCGKTFGKAYACKIHEMAHTGEKRCECKVCDKKFLHSESLNNHLKIHEKSVERALETYKQVQVNGDASDTQVDSHQLLKVYAESVASIPKNPRRVEQVDVALLAGTAVNPTDEIQFVQKEGMYLCPSCSQGFKSIGNMKRHYKSVHEKVKDFECRFCSRRFANSQSVKQHEWIHTGEKPFECKTCGNRFRQVAALIRHQKVHDEKPAKPLGERNDRKQKVEALRQEIAKVAKKELKDLKNQLALEKQQDTYEK

SEQ ID NO: 16504 - DNA, 2316 bp, DROSOPHILA
tggtgcgtgtgtaaatacgatgacgccatgtgcgcaaataaacaatgccagtcaagtgctaacgatcatttccattcgttttaggcctacaccgttttgggacagtatctggtgctgaaaaaggacgaggagctgttcaaggactggatgaaggaggtgtgccacgccagctccaaacaggcatccgattgctacaactgtctcaacgattggtgcgaggagttcttgtaagaggtggacacacaagccatccgagtaattcgatcaaaaggaatctgctaaaggcatcggccaatcatttttattcgcagtcaacgaaagtggcccaatgctagctaagcatttgccgtgttcactgttagtatgtatagctgtagggtgtaatttaatgtctaatccgaataaatgtacagtcatggaaacgatcctgcatttggatctctgttctgcgaaaagtacagtaggtgtaaaacatttgttgctggccggcgaagcagcctaatgcagatttttattaatttgattaggggacaacaataagcaacactatagaaggcagatcggttggcgactatatcttctctatgttttcgattgttggcgagtaggagtctctgactcgctgaaataagcctctgtctttttgatgtttctttatcagcgggctgatgtcgcctaattttgaaatctatttctttttgtttttcggaaatgatcttttataatgatggacttagaaccttttaaatcccaatcgctgttttgtttggggattatgtgtaagcggttaatatatattttataatgaaaccccttttgtcaaaattaattgtcctcgagtaattaattagtaccgagtatttgattataaatacaactttttttaaataaaaatatatatttttaaaaacttatttttaaagtgagtggtattaaataggatttcttttccctgaagtggtatcatatggtatttatttttggtcccgtggtattttttatcgttatcggcgcggtcacgctgctaagaattacattacgcgtgaataccaatgaaaattaagagagaaattgcaaaacacagccaagcggtgcaataaatcgcaaagtaagaggcgcaaaacgcgcaaataccgtttgcgcggttaaaaaatgcaaaaacaccaaacgatagattaaacaaagtgaaattaactcggctttggcatatgcgaacaccagtgtgccagtgtgtgtgtgtttttctttgtatatagactcgcagagcgagacggccatacacgacggcagacgggacggtgcagctaaaaaaaaaaaaaaaaaaacacacaaacaaaacaaaaaaaattaaataaattcaaaatgagaaacggcatttcgagcagagcaaacagagtcaagtaaatgtaacagacgagagtcgcgtaatctagtaacgtaattctaaagcaatgcataataatacggcaaataaccacaaataagtgcaacccacggacattatgtatttgttcaaaataacaacgtagcaatgaaaaagtttgatcttgtcgtggatctttattttgcccaccagttggcgggatcaacccaagatcgatcctcttttcggttctagttttaatagcacttgcacagcgattgttcttaaccaagtcggcctatataaatcagtcagacttcctgtacattttatatacatacacaaaccacacatatatatatattgaaacttattctatgcccatggcaaatcttgaatgtggagcatctgacataggcactctcgctgtgcaagtgccaggatacacacgtatccttcgctgctggcgaaggaaagtgtattgaaacatttacgtaacgattaaaacgatgtagacgatcaaattctgtagactaagcaagggcatatacatacatataaccaaacaatataacccgaccccatattagcgaaagagcgagaaaaaattgtaaattaacattaattagaggacagtcgaggtgagactttgatgaacggcggccgggtttatatacgcaggtagcaagtcaaaacacacacacacacgcgaaaattgtatttaacaattggtacatgcagaatgcttatataatttcaattgtcattaccaaggggagtacgcaatgcttgatggattaaccacgaccatgtgaggatgagatataaataataactgcaggcaagctataaacgtatgctaagctatttatttaatttatgcctagtattaacgaatgaaagaaagttacaaacaaacaaaacaaacaaaatgttggcgccaatcgctgatc

SEQ ID NO: 16505 - DNA, 2966 bp, DROSOPHILA
atcgttatcggcgcggtcacgctgctaagaattacattacgcgtgaataccaatgaaaattaagagagaaattgcaaaacacagccaagcggtgcaataaatcgcaaagtaagaggcgcaaaacgcgcaaataccgtttgcgcggttaaaaaatgcaaaaacaccaaacgatagattaaacaaagtgaaattaactcggctttggcatatgcgaacaccagtgtgccagtgtgtgtgtgtttttctttgtatatagactcgcagagcgagacggccatacacgacggcagacgggacggtgcaggatatagcgtaggaccagtgaacaaacaagtccgagagagcgacaaacaaaggaccgtgcactgggcacctgaaggcagacagctggcaacgaatcaggagaggatcaggagagcaggatcagcgggcacaaggatcaccggagcaggcaaaggaaacacctggcacacagcacagccactgagagcgacgtgaaccaatgggcaccaattcgggagccaccgctggcataaacaacaagccggttggcggtgcaacaggagccggcgtccttgtaggcggcggtgtgggcggtgccaattcctcgatcggcggtgtcctgtcgaacagcctgggcggtggcggcagcggcggtctgagcatcagcggcctcaacgctggtggacagaacgccaatgtgggcggaatgggcaacgttggcggcgacgacggcggaaacgggatggtgggcggcggtgtaaataaccagcaggccacaacgccccaatacacaataccgggcatcttgcacttcatccagcacgagtggtcgcgcttcgagctggagcgatcacagtgggacgtggacagggccgaattgcaggtgacctcgcaggctcgcattgctatgctgcttggagagcgcaagtgcttggaaagcctcaaatcggatttgacgcgccgcatcaagatgctggagtacgcactgcgccaggagcgtgcgaaattctatcgtttaaaatacggcaccgatccgccgcagctcaatgagttcaagccatcgaacgaggatgccggactggccggtgaggtggccactgactcggaggtgccctacagcagtgtctcgaacactacgtggcggcaggggcgtcagatgctgcgacagtatctggccgagattggctacacagacaacatcatcgatgtgcgttcaaatcgggtgcgttcgatccttggcctaaacaataatgccgagcacgacggcagcggcggaggactgggtggtggacttggcggcggcaccggcggcgagaaccttagcccaaacatcaatggaaacgagagcaacaaacgcgcatcggagacggaaggccgtcatactcccgctaaaaaagtgcaacaatcgatcgatgaaataatcgtggacaccgaggcagctgtgatggcgaactttgagttcctgggcgccaccgagatgtccgacgacgacgagatatctgacgatctggaaatggtggccaccgacaatgacgacacagacgtaaagctggccaagcgcgccaagtctggcaaggatatgctcaccgaggaggtggacggctcgttgggactgggtgagcttgcccagctgacggtgaataacgaatctgatggcgcctacgatgcgaactccaaggatggaactggcggcagtgccggcggtgctggttaccgcaaaacctggaacgccaagtacacgcttcgctcgcactttgacggagtacgatcacttatctttcacccagaggagccggtgctgatcacggcttccgaggatcatacgcttaagctgtggaaccttcagaagacggtgcaggccaaaaagtcggccagcttggatgtggaaccgctgtatacgttcagggcccatacgggtccagttctgtgcctgggcatgtcgtccagcggcgagacatgctattcgggcgggctggacggtaacattgaatgctggcaattgccgtcgccgaatatcgatccgtacgattgctatgatccgaacgtgcattccggcacgctcgaggggcatacggatgccgtgtggggccttaccaccatgcaaagcaacattgtgtcatgctcagcggatggaacggttaagctgtggtcgccatacaataaggaaccgctgctgcgcacatacacagcctccgaggcagagggtgtaccctcatccgttgactttgttcgcaatgaggttgaccatatcgtggtggcctacaacagtgcccactgcatcgtgtacgatacggagacgggcaagcaggtggtgcgtctggaggcggcgcaggagatgtctggcaacacggggaagttcattaacaaggtggtgtcacacccaacgctacccattacgataaccgcgcacgaggatcgtcacatccgcttctgggacaacacatccggcacgctggtacactccatggtggcgcatttagagccggtcacctcgctggccgtcgatgctcatggcctgtatttgctatccggctcgcacgactgctcgatacggctgtggaacctggacaataagacgtgcgtgcaggagatcacagcgcatcgcaagaagtttgacgagagcatattcgatgtggccttccatgccacaaagccgtacattgctagtgccggggccgatggcctcgccaaggtctttgtctaaaagaggcgagacgagacgagacgagacagacagacccacatctccctggccgcgtcggatcgaacgaattcagaattcggaatccagagtgcatatgcagagtgcagagtgcagaatccacagccagtaactcacagctaagcgattgcgagttcgagttaaataattatacatacattataaatatactatacatataaatctaattatacttcaaccgagaacaacaaccaattatatgcatacactaaaaaaaaaa

SEQ ID NO: 16506 - protein, 734 aa, DROSOPHILA
MGTNSGATAGINNKPVGGATGAGVLVGGGVGGANSSIGGVLSNSLGGGGSGGLSISGLNAGGQNANVGGMGNVGGDDGGNGMVGGGVNNQQATTPQYTIPGILHFIQHEWSRFELERSQWDVDRAELQVTSQARIAMLLGERKCLESLKSDLTRRIKMLEYALRQERAKFYRLKYGTDPPQLNEFKPSNEDAGLAGEVATDSEVPYSSVSNTTWRQGRQMLRQYLAEIGYTDNIIDVRSNRVRSILGLNNNAEHDGSGGGLGGGLGGGTGGENLSPNINGNESNKRASETEGRHTPAKKVQQSIDEIIVDTEAAVMANFEFLGATEMSDDDEISDDLEMVATDNDDTDVKLAKRAKSGKDMLTEEVDGSLGLGELAQLTVNNESDGAYDANSKDGTGGSAGGAGYRKTWNAKYTLRSHFDGVRSLIFHPEEPVLITASEDHTLKLWNLQKTVQAKKSASLDVEPLYTFRAHTGPVLCLGMSSSGETCYSGGLDGNIECWQLPSPNIDPYDCYDPNVHSGTLEGHTDAVWGLTTMQSNIVSCSADGTVKLWSPYNKEPLLRTYTASEAEGVPSSVDFVRNEVDHIVVAYNSAHCIVYDTETGKQVVRLEAAQEMSGNTGKFINKVVSHPTLPITITAHEDRHIRFWDNTSGTLVHSMVAHLEPVTSLAVDAHGLYLLSGSHDCSIRLWNLDNKTCVQEITAHRKKFDESIFDVAFHATKPYIASAGADGLAKVFV

SEQ ID NO: 16507 - DNA, 2107 bp, DROSOPHILA
aatacgatgacgccatgtgcgcaaataaacaatgccagtcaagtgctaacgatcatttccattcgttttaggcctacaccgttttgggacagtatctggtgctgaaaaaggacgaggagctgttcaaggactggatgaaggaggtgtgccacgccagctccaaacaggcatccgattgctacaactgtctcaacgattggtgcgaggagttcttgtaagaggtggacacacaagccatccgagtaattcgatcaaaaggaatctgctaaaggcatcggccaatcatttttattcgcagtcaacgaaagtggcccaatgctagctaagcatttgccgtgttcactgttagtatgtatagctgtagggtgtaatttaatgtctaatccgaataaatgtacagtcatggaaacgatcctgcatttggatctctgttctgcgaaaagtacagtaggtgtaaaacatttgttgctggccggcgaagcagcctaatgcagatttttattaatttgattaggggacaacaataagcaacactatagaaggcagatcggttggcgactatatcttctctatgttttcgattgttggcgagtaggagtctctgactcgctgaaataagcctctgtctttttgatgtttctttatcagcgggctgatgtcgcctaattttgaaatctatttctttttgtttttcggaaatgatcttttataatgatggacttagaaccttttaaatcccaatcgctgttttgtttggggattatgtgtaagcggttaatatatattttataatgaaaccccttttgtcaaaattaattgtcctcgagtaattaattagtaccgagtatttgattataaatacaactttttttaaataaaaatatatatttttaaaaacttatttttaaagtgagtggtattaaataggatttcttttccctgaagtggtatcatatggtatttatttttggtcccgtggtattttttatcgttatcggcgcggtcacgctgctaagaattacattacgcgtgaataccaatgaaaattaagagagaaattgcaaaacacagccaagcggtgcaataaatcgcaaactaaaaaaaaaaaaaaaaaaacacacaaacaaaacaaaaaaaattaaataaattcaaaatgagaaacggcatttcgagcagagcaaacagagtcaagtaaatgtaacagacgagagtcgcgtaatctagtaacgtaattctaaagcaatgcataataatacggcaaataaccacaaataagtgcaacccacggacattatgtatttgttcaaaataacaacgtagcaatgaaaaagtttgatcttgtcgtggatctttattttgcccaccagttggcgggatcaacccaagatcgatcctcttttcggttctagttttaatagcacttgcacagcgattgttcttaaccaagtcggcctatataaatcagtcagacttcctgtacattttatatacatacacaaaccacacatatatatatattgaaacttattctatgcccatggcaaatcttgaatgtggagcatctgacataggcactctcgctgtgcaagtgccaggatacacacgtatccttcgctgctggcgaaggaaagtgtattgaaacatttacgtaacgattaaaacgatgtagacgatcaaattctgtagactaagcaagggcatatacatacatataaccaaacaatataacccgaccccatattagcgaaagagcgagaaaaaattgtaaattaacattaattagaggacagtcgaggtgagactttgatgaacggcggccgggtttatatacgcaggtagcaagtcaaaacacacacacacacgcgaaaattgtatttaacaattggtacatgcagaatgcttatataatttcaattgtcattaccaaggggagtacgcaatgcttgatggattaaccacgaccatgtgaggatgagatataaataataactgcaggcaagctataaacgtatgctaagctatttatttaatttatgcctagtattaacgaatgaaagaaagttacaaacaaacaaaacaaacaaaatgttggcgccaatcgctgatc

SEQ ID NO: 16508 - DNA, 2757 bp, DROSOPHILA
cggtcacgctgctaagaattacattacgcgtgaataccaatgaaaattaagagagaaattgcaaaacacagccaagcggtgcaataaatcgcaaagatatagcgtaggaccagtgaacaaacaagtccgagagagcgacaaacaaaggaccgtgcactgggcacctgaaggcagacagctggcaacgaatcaggagaggatcaggagagcaggatcagcgggcacaaggatcaccggagcaggcaaaggaaacacctggcacacagcacagccactgagagcgacgtgaaccaatgggcaccaattcgggagccaccgctggcataaacaacaagccggttggcggtgcaacaggagccggcgtccttgtaggcggcggtgtgggcggtgccaattcctcgatcggcggtgtcctgtcgaacagcctgggcggtggcggcagcggcggtctgagcatcagcggcctcaacgctggtggacagaacgccaatgtgggcggaatgggcaacgttggcggcgacgacggcggaaacgggatggtgggcggcggtgtaaataaccagcaggccacaacgccccaatacacaataccgggcatcttgcacttcatccagcacgagtggtcgcgcttcgagctggagcgatcacagtgggacgtggacagggccgaattgcaggtgacctcgcaggctcgcattgctatgctgcttggagagcgcaagtgcttggaaagcctcaaatcggatttgacgcgccgcatcaagatgctggagtacgcactgcgccaggagcgtgcgaaattctatcgtttaaaatacggcaccgatccgccgcagctcaatgagttcaagccatcgaacgaggatgccggactggccggtgaggtggccactgactcggaggtgccctacagcagtgtctcgaacactacgtggcggcaggggcgtcagatgctgcgacagtatctggccgagattggctacacagacaacatcatcgatgtgcgttcaaatcgggtgcgttcgatccttggcctaaacaataatgccgagcacgacggcagcggcggaggactgggtggtggacttggcggcggcaccggcggcgagaaccttagcccaaacatcaatggaaacgagagcaacaaacgcgcatcggagacggaaggccgtcatactcccgctaaaaaagtgcaacaatcgatcgatgaaataatcgtggacaccgaggcagctgtgatggcgaactttgagttcctgggcgccaccgagatgtccgacgacgacgagatatctgacgatctggaaatggtggccaccgacaatgacgacacagacgtaaagctggccaagcgcgccaagtctggcaaggatatgctcaccgaggaggtggacggctcgttgggactgggtgagcttgcccagctgacggtgaataacgaatctgatggcgcctacgatgcgaactccaaggatggaactggcggcagtgccggcggtgctggttaccgcaaaacctggaacgccaagtacacgcttcgctcgcactttgacggagtacgatcacttatctttcacccagaggagccggtgctgatcacggcttccgaggatcatacgcttaagctgtggaaccttcagaagacggtgcaggccaaaaagtcggccagcttggatgtggaaccgctgtatacgttcagggcccatacgggtccagttctgtgcctgggcatgtcgtccagcggcgagacatgctattcgggcgggctggacggtaacattgaatgctggcaattgccgtcgccgaatatcgatccgtacgattgctatgatccgaacgtgcattccggcacgctcgaggggcatacggatgccgtgtggggccttaccaccatgcaaagcaacattgtgtcatgctcagcggatggaacggttaagctgtggtcgccatacaataaggaaccgctgctgcgcacatacacagcctccgaggcagagggtgtaccctcatccgttgactttgttcgcaatgaggttgaccatatcgtggtggcctacaacagtgcccactgcatcgtgtacgatacggagacgggcaagcaggtggtgcgtctggaggcggcgcaggagatgtctggcaacacggggaagttcattaacaaggtggtgtcacacccaacgctacccattacgataaccgcgcacgaggatcgtcacatccgcttctgggacaacacatccggcacgctggtacactccatggtggcgcatttagagccggtcacctcgctggccgtcgatgctcatggcctgtatttgctatccggctcgcacgactgctcgatacggctgtggaacctggacaataagacgtgcgtgcaggagatcacagcgcatcgcaagaagtttgacgagagcatattcgatgtggccttccatgccacaaagccgtacattgctagtgccggggccgatggcctcgccaaggtctttgtctaaaagaggcgagacgagacgagacgagacagacagacccacatctccctggccgcgtcggatcgaacgaattcagaattcggaatccagagtgcatatgcagagtgcagagtgcagaatccacagccagtaactcacagctaagcgattgcgagttcgagttaaataattatacatacattataaatatactatacatataaatctaattatacttcaaccgagaacaacaaccaattatatgcatacactaaaaaaaaaa

SEQ ID NO: 16509 - protein, 734 aa, DROSOPHILA; identical to SEQ ID NO: 16506

SEQ ID NO: 16510 - DNA, 3521 bp, DROSOPHILA
cggatgatttcgtagaagagccgtgtattggagtatttctttaatcgttgcagcatctgcaactcagccacgtagtagctggtgtccttgcacggattgagaagcacttccaccgccagtaagggttgcacgcagcacgagatcttctcgagtgttgacggcggattaagtggttgcatttcaagatgcttggcttctataaaggccaactgctgcaattgctgctccacttgtggtgcatttagcgtaaagtttgagttcgtcaacgatcccttgatggtagcgtacttatcccgaatccgtccacatatttcgagctcttcgtgacagcccacgtacagcatagacagcaggaactgctgctggctaagccgatctatcaccacgcaggtctggtccagcatgtatgattgctcagcactaatctcaccatacagttcatagtgctgcacagttctggcgaagatttgaagcagccagtacaccaagtggacgacggaactcggtaaaaccgcttcctcagattttattctggaaatagaaatgaacaattatttttactcctgctttttaacgacttataaaactaaaaggacttaccggcaggtaacgccatccacgatgctggccaggaattcaaggagcgctgtaatgcaataaacgcgctctaatttgtcatatttggcaatgcaccgaataacagcagcgtgagaaacgagatgggcgcacagtgaatgcttcaggtagttaagaaccaactgaaaagcatagattacaatttagaaaacaatctaaatactcagatcaactactcaccggattagccgtggaaccaatgagtgcctgctgcatcagacagtcagccagattgtatacatctccactgactcctctcggcagcacctgaaatagtaatcaagggaaagacaataatgaaacattttcttttcctgtcaaactttaacacaatatctgggtcacaaccccataaaataaacagaaacagaaccacttaaaaatctagttaggatttccacttatatagttagcacacatagttgcatatttcgttacgcgataaaaaatgtttcgtttaaaattatttcgcagtcctggagacgtattaagcactttaattagcggagctgcaacggattgctgcaggaagacgtcacattgtttggagttggatcgcgctcccgctgtcgctgcctgctggatctgtatgcggatgatcagtcaatatcagttcaggaccacgaaaccagcctactatccagatcgccagcgggaggcgaagcgaacgtcagcgggagccacgcctcaacaggtgtcatctccggctgttaagtacccgcaaagccgaggcatgcccaaggactactactacaaagtgttaggcgtcaacaggcacgccaccatccagcaaatcagatcggctttctatgcgctggccaagcgctatcatcccgactcgacgcactcggaacaaaagctgaagcacttccaggagctgtccaacgcctacaacatcctaaccgacgagacgaagcgcttggagtacgatcagctgggcgggattaaggatgagcgcgcttttcttgaacaggcgggcaatcccctaaatgtgggcctcgaggaggccaagaagttcgattcggataagacgacaaatgatggtaagcagacggattttagatacatcaaacaccatttcacttttcactatatcacgatatgaacacgatccttgaatcgccttctagagatcaacaaactgaagagcaacgagttcgatctgccacttgacttccttgaggcgacagtgggatgcaagaagcggatagagctgcgctacttgcggaaatgcgagacctgcaagggcaagtcacaattgatggcgcatcgggatgtgggcaaggaaccctgtcggcgatgcaatggaactggaaaggtcatgaccaaaacgccaaccttctcatcggtgaacacatgcacgcagtgcaagggcaagcgattcacaaatcgcaacgactgcgaaacatgttcgaatcgcggcttcgtggtgtccaatgtggatgtgatggtatcggtgccttccggatcccgggacggtgatgtggtgaacattataaatccggaaacgaagcagcaggtcacctaccgcttgtcggtgccgtctagcgactatttccgacgcgttggcaatgacattctaaccgacaagcacctaaacatctcggaggccattctgggcggatcctttcagatacggggtctgtacgaaagcgtggagctgcgtgtggagccgggcacccaatcccacacccaggtggtgctcaatggcaagggggtgcgctccagggagggcgtgggcaaccacatcgtcacgctgaaggtgcgtataccccggaatctctccgtaaagcaacgccaactggttttggcactgtcccaggcagaggatccggttttcgagcccaagactaagagcacggaggcgggcaatttgagtcactaaaattctcaatgtaccggcctcattgcgtttacaatatattggtaaacacgaacattgattgtttggtgtgttgatttgcttgggttgccttgccttttttatgttgatgccccactgggagtccgtccagcgctcgcgccacgccacatagatgagttggaggatcttgttgttctccttcatctctcgcgtccgtggaagtaatataacttttacttttctcgtatttcacgcaatttattttatttaaacctaatatattttttagcagcgctcagtgtgaccgaggtatcttttattaatcataccaaaagagtaccataattttcccatcctacagtgttgaaaaacacacaatcttaaaatttgtcgccaattttaaatattttgaaaattttgtttttgcaacgaggaatttagccaaataaaggaaataatattaaaatatattttaagacaccgaaaaggcacccacaaacaaattttaattcaaataatttattgaatacaataaagtagcgtatgagtttcatttgtaaactgttttcattttaaacattatgttctaaaatatttgactttgtacaaaatatattctatttatatatgccgaaaattgttcctccattgcacgctccgattttttgaatttcatttcactcatcgtgtcgctagctgaatgttaaattttaaattgaatatataatatatatatataggtgtggtgtatgtgcttaatccgagatatttcgatatgattaaacaatagctaggcgagaactttacatacaaatcgagttcggtggattgtcaagggaagatgcgcgaggactggaaaaataaaaaaattaaaaactaatttgcaaaggccgtttattttgtataaaaagctggcaactcaaatatcaaagcgaatctgtaaatccgtctaaattattaattaacaactaacttaggagtgtatgacaaaagcatttcacattccaatggcagcgccagg

SEQ ID NO: 16511 - DNA, 1434 bp, DROSOPHILA
aaacagaaccacttaaaaatctagttaggatttccacttatatagttagcacacatagttgcatatttcgttacgcgataaaaaatgtttcgtttaaaattatttcgcagtcctggagacgtattaagcactttaattagcggagctgcaacggattgctgcaggaagacgtcacattgtttggagttggatcgcgctcccgctgtcgctgcctgctggatctgtatgcggatgatcagtcaatatcagttcaggaccacgaaaccagcctactatccagatcgccagcgggaggcgaagcgaacgtcagcgggagccacgcctcaacaggtgtcatctccggctgttaagtacccgcaaagccgaggcatgcccaaggactactactacaaagtgttaggcgtcaacaggcacgccaccatccagcaaatcagatcggctttctatgcgctggccaagcgctatcatcccgactcgacgcactcggaacaaaagctgaagcacttccaggagctgtccaacgcctacaacatcctaaccgacgagacgaagcgcttggagtacgatcagctgggcgggattaaggatgagcgcgcttttcttgaacaggcgggcaatcccctaaatgtgggcctcgaggaggccaagaagttcgattcggataagacgacaaatgatgagatcaacaaactgaagagcaacgagttcgatctgccacttgacttccttgaggcgacagtgggatgcaagaagcggatagagctgcgctacttgcggaaatgcgagacctgcaagggcaagtcacaattgatggcgcatcgggatgtgggcaaggaaccctgtcggcgatgcaatggaactggaaaggtcatgaccaaaacgccaaccttctcatcggtgaacacatgcacgcagtgcaagggcaagcgattcacaaatcgcaacgactgcgaaacatgttcgaatcgcggcttcgtggtgtccaatgtggatgtgatggtatcggtgccttccggatcccgggacggtgatgtggtgaacattataaatccggaaacgaagcagcaggtcacctaccgcttgtcggtgccgtctagcgactatttccgacgcgttggcaatgacattctaaccgacaagcacctaaacatctcggaggccattctgggcggatcctttcagatacggggtctgtacgaaagcgtggagctgcgtgtggagccgggcacccaatcccacacccaggtggtgctcaatggcaagggggtgcgctccagggagggcgtgggcaaccacatcgtcacgctgaaggtgcgtataccccggaatctctccgtaaagcaacgccaactggttttggcactgtcccaggcagaggatccggttttcgagcccaagactaagagcacggaggcgggcaatttgagtcactaa

SEQ ID NO: 16512 - protein, 400 aa, DROSOPHILA
MISQYQFRTTKPAYYPDRQREAKRTSAGATPQQVSSPAVKYPQSRGMPKDYYYKVLGVNRHATIQQIRSAFYALAKRYHPDSTHSEQKLKHFQELSNAYNILTDETKRLEYDQLGGIKDERAFLEQAGNPLNVGLEEAKKFDSDKTTNDEINKLKSNEFDLPLDFLEATVGCKKRIELRYLRKCETCKGKSQLMAHRDVGKEPCRRCNGTGKVMTKTPTFSSVNTCTQCKGKRFTNRNDCETCSNRGFVVSNVDVMVSVPSGSRDGDVVNIINPETKQQVTYRLSVPSSDYFRRVGNDILTDKHLNISEAILGGSFQIRGLYESVELRVEPGTQSHTQVVLNGKGVRSREGVGNHIVTLKVRIPRNLSVKQRQLVLALSQAEDPVFEPKTKSTEAGNLSH

SEQ ID NO: 16513 - DNA, 13066 bp, DROSOPHILA
ctgcagtttaatgtcgataaatatgcggcttttgaaaagcttacaaaagttcccttgtcggttgaccttttctttctaaatcctaactcatttctgttcagttaaataaatatttacaaaatgtacacggttttccattacaattaataatatctagtttcagttgatgcgacgttgcttaaagtcttttcttatctagtatcgataataaattaattgctgccagcagcatttttgctaaatagaatagttcctcaaatctttttacaattccttaggataagttaccgtagactaaagcgaaattcagttgcagaattcagatatgtatctctggagctggagctgtctatgttctcatggtgagcgtttggccgactgtcatgatagaatccaggagtgtataatacctgcacatcgaagatgatcaattaatccagttgggcaattatttatttatctacttacgattttcgcccggcgatagcgttatatgtatgtcctcacggctcagaacaggggctaaaagtaaacatttggccaaagcccagacacatgtatttttgctttttaccaataaaacgtgtaaagcaacaacttgcgaagcttgtgtaaatatttaaataacgttctttatttacttttgagcgggctaaaaataataaactctgtttctcgttggcttaatgctagtttaacggttagaggatattgttaaattaaacggcctgaggctgaggcgattgcatttaatgtacatacataaatcgaatatgttaaaataatttaaaaaggccgcgcttaagcaattcgtttccgttcgctgttgttttcgtttcgcacatgtctttcaggtggagccatgcagtggataatgaacctgccgcctactagtttaaatgctatcacagtttcaaagtcgagcatgcaagaacaacagtcaggagctagctcatgcacgataagagaactttgttatcgtttggtgcagctttttgggttatgtatgcagagcgtacggctgctgggacggctgctgttgctgctcaatgctgccgggtggcgtggcagcagcagcagcggccccgcctccactgggaacaatgcgtatcatacccggctggatcctaacgttctcacaggcctcacaaatatttagctgtggatggttgcggaatgtacacatgttgcaggcccacgagtccagcgtctcctcctcctcatccacatcggagtcggacaggaattcttcctcctgttgtggctgcggctgctgttgctgctgcatctggtgttgtagctgctgttgctgctgcatctgctgttgtaactgctgctgtcgctgctgctgcagatattgctggaactgatagtactgggcgtacgtcggtggcggctcctgctgcagctgtaacagttgctgttgactctgcatctggggcgttaaacaggccgaggtgggagcactgctgtggtgctgcccaaagtcctgcaccggctgggagatgggtgctgccggcaccgagtgcagacgtagtgaactgggcggcgcctggacgcgagcactttgacgctgacgcgggaatggctgtggctgttgctgcggctgctgctgtgaagcattgctggctggtaacaggtgctggcggttcgtgggattggccgccggaccagggccattcgcctgcggttctgtggatataagaggggcagagtcagcatagaaaaaccgatatactttgcaatcatccttaccatttaagcagtcaagcagccgattacagtcctcagtcagttgcttgatatctctatccagtctttcagattcccccaccggcaccggctcagtcaggatgttgatctcctgctccaggacgagcaggcgcttcttgttgtccctcagtgcattggccagcttgtcgcgacgctgcttctgacgctcgatagtggcggcacgagctgaagtagatagagagaagaaaagctgatcaatcgatttgctgactgtggaatgtgtagctccgttggcctggcaacaaatgattgccttgcggcatttcgaatttccaaatattcctccccgcggctagatttatttttctgtctaacgcctcccattttattactctgttttgttgctaaaaatatttaccccaccaaacgcctgtctgccgcagagtgaaaggggttcataaacagaatttatatttaaatagataaatttagttaaaatgcgcaagcaagcacaaccaaaaatcaatctaataataatttattcctacgaaaaaaaaggtaaaaataaatgaatacaaaaaacacacagacaaagtctttcgatgcattttgtgtttggctttgggcgactgttcatgtgaatatttttagacgcttgatagatttccaacggaaatagccaacagggcagtgggccaagggatctctgaatatgtcacatcattatgtgcgattcgctggcatcttaattgataaattatttcgttaatggctctagcttttctaaattccaatttgtgttctatacaccgatggaaaattctccaacaatatgaacgacatttaaagtggtttctcgtgatagcgtcgcgtgattaaatgtcaaagtgtaagtgccttttgggcccacgctgcgtatgcttaataccttagctaatcaaacggagagattttcctgttcgctttcttctctttttctttgtttcttctctggttttaccaaccacccacacgaatcgccctgaacttgaacgacttgcggcgaaaacaaattgaaaacgtcgcagaaagagcggcaaaagcaacagacgtataaataatgtgaaaagtgagatggatggggggtacgaaatcgggaaaaacatggccaaagccagaagccagacaaaaaacaaaagacagcatttttaaactcgtgggcggtcgatatggttaatgttttaaacgaaatataattaattaataatataaatcgtgtacaatatgcttgtttatctatcgctttcttctacaacgctgagctatgacggttctcaatcatattaagtatataaaaaccattcaatacggcatcagctgctgattttcctttctcgtgatctcacttactatcgcctactgataactgccccatcccgtagttaatgacgtcaagatgtatctccatctataacatgttcgcttttgttttataattaaacctatttcacaatcattgatcgctggttgtgatcccatatcttgaacacaagccgcatcgattatgacaccggctaacccctgcattgtggcactttgaacccatccccagcaatccgttaaagcaaattaaaccctgccaaaaatgttcgaagtttgcgaaacataagacagtccagttcccgctaattctatttcagggcgtaattcaatttcgttatcaagtgtaaacaatattgggcgaatctgtccgctgataacaaaacttcggagccccactacgacgtcgtctggtcgataagcattggaatccaacgggcattggaactcaataaaaacaagaatgtaggtttgaagcaatagaaacacttgtcagttgattatagaatccactctcgtttaaaatttagcacacttttggaatatcattaacttatgacgattgatggcaattatccaacgatggactatatttcaaaatgctttttccatcttctgctaaaactacgttactagagtataaccgtgaaaaatgtcaatataaagcaacttggccgggcacgtgtgcccctaggttccagctatatgtatgcaccccaattttgataatgggtaacccaccttcgcgatcgcattcctccatgacaccttcgtaaaggggcatggtgggactactgtccgtgctattgctgatcccaatgttgttattgtcgctgacggcatggttgttactatagttggatgccacaatgtgattctgctcctgcgtgggatatgggaaaacgtccgacgtcatatcagcgtcccccagaccatctgccaccactgctgcgggcggaggaggctgctggtttgccggaacacttgtcaccggctcacagggcgttgcgtacaaggtccttgggcgaacgctgcccgcactgaagacactgccctcgtccgtcacagtcagctggaaattcttctgcgtcccacgacgtgcgtcaaaactaacgctggagtaggtgatcccactgccctgcccactgggcgccggaccggcggtgatgtcaatggccgattgtgccgagcccgtcggctggcgcagggtgagattgagcgaggtgaagctcttgcgtccaccaggcgcacttggtgacgctgccgaactgggcgagggtagccgcggcgtacacgcggtcgtcggcggaaagtcaatgctgcgaaagtcgcgcgcgtacggcggctctggctgtagcgttatgactgaacgatgtcgcaccggcgagggttgttgttgcgttgatgcgattgctgctgacgccgcagcagcagtagccgccgccgacgttggtgacgataaggggaccgcgttgagcgaaagctccgattcgctggagctcatgggactggtgagacacgaggaatcgttggagaagctgccgggcttcggtttgggtggcggcggaagtggcggtgcccggcgtagcggcttgctcaaggaagtgggcgtcagctgggctggctggtgatccctctgctgtcgctgctggcgctgcataatcttttgctgcagctgagtgctaaactgacgttgcagattgagcgtcgtgggtcgcggcctgggctgcgtatcaggatgtgggctaccaacacctggcggcgtagccactccattgctcagcacagcttccggctgcggtggtgctatccgtgacggcttgagcggcgtgggaggcttggcctgcctattctggtggtgttgctgctgctgttgctgcagcacctttgccggatagctctgcactgggataggatgaagcgcgagctccttcctcaacatctggatacagttttcgcgctgatggcaattctcattgacgcattgcgtcactatggcatcgggtatcgtggggaactcctgcttcatctcatgaaacaggtgcataatactaatgttggtgcaatggcagctcggcttggccttgccactgctggcttcctgttgttgctgtggatgcgttgcgtgatccagcagctccagctgctcatagctcccgctgcggctggcgggactgttgggattcgggtttggactggggttgggactctggtgctgattctgtttcttccgctgaaagtgctgattgatcgcctcagctagggggttccccttgccgactgttttgccattcaattgatgggtgtttgatccgggcggcattggtggtgtagccgccattttaggccatcatttgtcacagctggagacctggaaaatgcaagagaacacattagtcaggtgcttggctataattcaattactaagaggaaaggaaatcgatttctcggttcacccattcgggattataccattgcccgatttagaacgtttactaagcatgtttgcgagcactttctctagttctttttttttatacatttttcaaaataataaaaaagctgcggataagcagggacggagagagatctcggccaaaatgacatgggatatttaaaaatatttatgacacaacgtagccgtgccatattgtctatatctctcgctttgattgaccaaaagaatgggccattgtcaaggatagcacaaataagtggtaatatctggtagatactatctattgccggaatagataagttagatatggcaaactatacacgatagtaaatcgtgtatgcggataaagttatatttataataaaacttgttttgtatgcaaaagttaaacaacactttaaataaagaccaaacttaaatttaggctttttttaattttcattttaacttacattgtatataaatgaattgtattttgttatcaattgccagtgatttaactcagttatagcactatgaaatcttttaaaaacttgtaatttcataaaattttctttatcatttatgaaagtattttatttatgtagccaaaatgtatcacacaatttaaaaaatttaaaaaatttctttgccgtgattaacacagcttgttttaaaaatgaggtgtttactatttagttgtttcggagaaatgacaattgttttgtttaatattgtttttcctccaacgcaacttttaatcataagtgcgaaaacctcacgaagttcgcgttagaaaagtctttgcaatttccgtttgcttcgaacgcgtttgaacgctttaaatgccagcgaagaactgaagtacaaatatcgcacattttgagaactaaaggcctacaaatcgaaaagatcacgatgagcaccaaagaggcacacattcggcttatgtgtgtgtgtggaaaatgtttgagagagcgtaaacaaaaggtataatatgtgtacttattcccgagaaaattgtagaaattcgaactaaaacacagagttaacaataaacacacaataaaaaacaaaacattccgttgcgaagtttgtgaagttcacaatgggaatacttgaataaaatggcgcatatcaagcatacgcaatgtggaacaagtaggttgttacgctgggaaattcgcaataaatgtgagaaaaataatagatcccgtaacgaatcaattaaatcattcaatatttttgccacaccaataccactttgtaacagaaatttggatctttctcttagccgctctcttttataaaaataaatttttgtgtgggtgtttttcacaccaacactacgaagctaagaaaattgaatgaaatattcgaaaaaaggcaacaacaacaagaagcatgtacatataaaacaaaacaaaaaaaaaaacgcaaaaaaatcaaggcacaaaattaatgatatgcttgctaaggtgaaagagttgaagacgcaggaaattaatattaaaaagcgaaaacccatcaaatgggataagcatttaattgctgtccatcaacgaccaaatgaaaagcgcctaaattagttagcggcttagccaagtattagaaccgccctcgcagtcccacttttatactaacaaaataaataaaaacaaataataaaccgaagcaaaaccatgtcagcgagacaaaatctatacaagaaatgtataattcattcaaatataagccactaaattagcggcgatggcgccttaaaattggccagcaaaacataaataataaattataattgtctatgtatatgtttcacactttccagttgctgtttattttaaaatcaaagccaagcggttttcgcttgcgataacaacattttcaagttgctaaggaaattaagaagccattaaagataaaccccagaatatgatgaaaacaattcttcttgtcttctgtatttttttttatttttttttttctcgctagttccataaaattccaacatcattttgtggggtacttataaacggatgagcggaacacgtaaattgcgatctgatatttgaaaatatttagacaatttctcctttttttttggtgccaaggggtcgatgggaaggcaatgaaaattcgttttctgtgctctttagattgctacgttttgtttgccagcttcgtctgcctttcggttttccccctcgcttttcttttttccttatagcgggtggcagacaaacaacaacaagcatggggcgatcgactgcagacgtaaacgaccttcacaattagccagatatatgcagggcagataggagagatagagatacaaagatacacacatacagacgcgttgcccagaatgcacaagccagaaaatcggaaatcgacgtcaaatatttcgcaggccatagtgtatataagaaattgagagtactcgtgtggaatgataatactgtgcatacaaatgtatcttccttcatattcaaagtacagtgcggttcgcatctgcaaggatactatccagatatctgaacaaatgggttattctcaacaggactattaataaaatcacttaccattattttgtgaataatggtataattgcccatagtgaaggaactttcttataaattacttttatagatgtacaaatatcaaaggaactactatatcttttatgtttgcaaactgtgtatttatgatgcattcgattttaggaaacacttacattttcgctacgcactgtttgcacaatatatgtatgtacttatggtacaggtaaaagatcatttgtattattctatacttcggttttttatttcattctgccttttcgaggacacgcaaaacaaacttaaaacaagctaagagcaacaaagacatgaaaaaaaaaataaataaaagttcgcactgtgtgccaaaagcatacaaaataaaaaaagtttacaaagtcattaaaattatggcagctcacgattgtttaggtattttggattgtgagggcgtgaaattttcggtgggtgtgcgcactacgggaaaactcttgtaattagttgagcaaaatttccattcattaaaatgcctttgtaaaaatcatggtggcacgtgttcttctgccgatttacatgaaattgtcttatgggaatttccaatgatttgattacatttcggtacacagatgccaacaaacgaaaaggcatcaaaatgttgttaatagaattaattttgtactctgttattttcgaaatatttaaaatatctaccaaaccagttttatcctgaaatagtggcagttttaagacttttcaactaatgccaaagctagcttttaatggtttctatcaaatctattacttttgattgatttacagcgaaacgaacgtgtaatcgctctgtccatcaacccaataagtctgttaatatcttggctggactggggaattaccatgccgccttggcgccctcgaagactttgaggtatcgatgcatattgaccggaaatctctctgtctggcatgtcaaaaaataaacatatataaataacaaaaaatcgccaaaaatatgcttgaatacaaaaataattgcgaaaggaactacgtactagatggcgtccctcccgcaccttcaacttggttttgaaacacaaaacatatggacagacgaaaagaacgggaaagggaatgcgaagggaataaacgaaggaaagaggcagcagtaaataacatggaaaacaactttcactttgtcgcaaaaaaaaaaaaaaaaaaaaaacgagtcggaaattaaataaaaaagagatagagcaacgaaaagtatgtgaattgtgaaaattataaatcaaatgcagagacatgaaatggaatggaagcagccacacaaaataccaaaagacgaaaaatggaacgaaaataattttattttgtatttcgctgctcgctcgccgattttcttttgcttttcttgcctcgccaataatttgaagaggcgttttgcggaattttctgcagacgtcaggccttgacgtcattgccgaattctagaattgaatatgggcatgggaatcaaactcggaggggcaatggaacttagcgatcgctatggaaaatcaaagtggaacacctcgcctgtctcctctgaaataataactaatacacggtattcatttatcgatgttggaggcttgtgatgaaccctccaatcgccgcaatttgccttttcaaatttgtgaaaataatcgaagcggagttatttttagtcgatgtccaaatccaaccaggtgtgctgcggttgcccacgttatcgcgcgacatttgtgtctcttcgcaacaggggacatacatatgtacacacacatatactatatattttcctgaactcgtcccttcccgaagctaaatatcaacaaaattgctggcgataagatagatttaaattgatgggaaagttttcattgagatcgcaggaatacaccgtacagtagttactcaagtaggttaaacacttagatgtaagattcttaagttttgctgatacagtatttgaatagaaggaccaacgttatgaaaatgagtctatacgtattaatctattatgtcagaagagcgtttcagctctgtcatatcagcatgacattcaaaaaagctgtactctgtgcatggagtaaggcagttattaatgcgtggaataagcacacaatcgaacgtgatttacataaacaaaaggatttatttagtttcacccatataaacaaaaggatttctaagtcagcttttaagtttcatttgatttgcatatttggtacataaaaactcaatttttcaaacgaaattttgtggaactccaacaattttttctttaaaacatacatagttgctcactatcttgagaatttaaaatttataaagtaattaaatttttagttcgtgataaacatacataaattagaagtcgctttaaacgtcatttaaatcgcgttttaatttatgacgtcttttggagacttgtatttattaatatattgcgagataaagggtaattttggtgttatagctgaaaatatttaacagccttgtcgctcaaaagcagagttaacgcttaaatacggaagaagaattcagataatcacaaacagatgagggtttctctctctgctttatatttgcactctcaactgctgaaatgccgggaaattcccgcaattacaagaaaaccgccacataaacaaagtcacaaaacgaaacagcaacaatgatcaacacttaaaaaaataaataaaatgtttcttgtttgttttaccaaaactttttatttccgaaagttacaaaactaagctgctagtataaatattataaaagtttcacaattggcaatataatgcggtaatgcggagctcttgaataaaacttgcgtttttcttacagtgcataacaagtgcaaaaacttgtgaacttgttttcttaatacgaaaccaaaccgaagcaaaaacaacgtacagagagcgcttattgttattgatagtgggagaaaatctaaaagcacacatagcaaatcaatatttgcactttgcgattagaagcgcttggagggggttgagtgggcggtgggtgggtggtggtcgggggatgtacccgaacgattcgtttacatatttcgaaaagacggccatttcgagggagtttcagccgttatcaataggcggaaatacgtatacgcatgtacgaatgggtaatacagttacgtgcagtcttgcacagacacacgaacaccaatgtgcagtgcgagtgcgaaagagacacgtaatggctgtgttaacggcacaagataaaaaccagctacagccagcgtgggtgcgagcgagagggagggagagagcgcaagagagagagagagagagagcaaaaaacaggtgacattggcagctacgcaatagtagataaaaaatatccatacatatataaaaacaaccgagatcgattgaaaatgtgaaacgttgggaaacttggtatggcccctcccccttaaaaaacgcattcacaacttgttgcccgtttggaaatgtgtttatttattgcttttatttggtgcactaggtgatctgcatgtgtgcgagttgtttttcacaatttgttatttgcacacagagcagatccacccacacctgtgcacttcccaattgtatgtggatgtgtgcgtgagcagaagaagcaaaatccacagatttacaatttgcatccttaccgaataagttaaattcttgacttttccaatgttcctttgttgctccgctctttttgtcgtttgttctttgacattcaaattgtgatttcgatattttggtgcttttcaatctgaatcttttccacttttgccccttcgatttcctcgttggctttgttttcgtttttcttttctcacacactcacaactacacacacagttcacgcaaaagctccgctttgttttaatttagttatttattttatttttcgcagtaaacttaattaaatgtatttttcacgtcgctcttttcgcgatcacaaaacagcagtgtgaccataaaaggtgggttgaaaagcccgaaaggttttgggttaaaattaccaaatcgagaaataccaaatttttaagactttcatttccttgtttttttttttttaatctacaaaagtattaatttaacaatcaaagtctattaaatatttttgaatagtcaaatattaatgtgtattaagtttttgtttaaaaatatatatgttattcttttttcttttcatttaagctacaaataattcaaagaattatttctcaagctagcgttaggcgccaagaccgtttgttttctttaatttatggtattttttgaaataccactgacttatgtagtgttgcgtggcgaagtggtgtttcagtgttgtgaagcgccgtaagtccgtttgatttccgattcggcattcgaaattgttttcccttaattttcgtgtcgaatacaagatttctggaaatgaagactgtgccgaaaaagaaggaaacggccctgcgcttgcgggagtcgcgccgtgaggagcagaaaccagagacgacaaacctgccgccggacgacgacgcagagtcggatttgcccattcggggccgtccctcgaagaagctgctcatccagcagcaacagcagcgtcagtaccaggtaaagctagatccgaaagtcaagacggtcacgtcgggctctagcgagaagccttcgacatcctcgagtgcagccgcagccggcgccggaggacgcatcaaggccaggagagtgctctacaagaagagcgttggagcagcggcagtcgcccagaaggcgcccggcgagacctacgtaatgcgcctgtttgagcgaagtttggacctgtccaaataccaggataagactcctttgtaccccatatgccgcgcatggatggcaaatcaacccaagaatccagctgtgggtgcatttcaaacagatgcttcactcacggccaccaaacgtgaggacaacggcgaagaaatcct

SEQ ID NO: 16514 - DNA, 2759 bp, DROSOPHILA
cgaaaagagcgacgtgaaaaatacatttaattaagtttactgcgaaaaataaaataaataactaaattaaaacaaagcggagcttttgcgtgaactgtgtgtgtagttgtgagtgtgtgagaaaagaaaaacgaaaacaaagccaacgaggaaatcgaaggggcaaaagtggaaaagattcagattgaaaagcaccaaaatatcgaaatcacaatttgaatgtcaaagaacaaacgacaaaaagagcggagcaacaaaggaacattggaaaagtcaagaatttaacttattcggtctccagctgtgacaaatgatggcctaaaatggcggctacaccaccaatgccgcccggatcaaacacccatcaattgaatggcaaaacagtcggcaaggggaaccccctagctgaggcgatcaatcagcactttcagcggaagaaacagaatcagcaccagagtcccaaccccagtccaaacccgaatcccaacagtcccgccagccgcagcgggagctatgagcagctggagctgctggatcacgcaacgcatccacagcaacaacaggaagccagcagtggcaaggccaagccgagctgccattgcaccaacattagtattatgcacctgtttcatgagatgaagcaggagttccccacgatacccgatgccatagtgacgcaatgcgtcaatgagaattgccatcagcgcgaaaactgtatccagatgttgaggaaggagctcgcgcttcatcctatcccagtgcagagctatccggcaaaggtgctgcagcaacagcagcagcaacaccaccagaataggcaggccaagcctcccacgccgctcaagccgtcacggatagcaccaccgcagccggaagctgtgctgagcaatggagtggctacgccgccaggtgttggtagcccacatcctgatacgcagcccaggccgcgacccacgacgctcaatctgcaacgtcagtttagcactcagctgcagcaaaagattatgcagcgccagcagcgacagcagagggatcaccagccagcccagctgacgcccacttccttgagcaagccgctacgccgggcaccgccacttccgccgccacccaaaccgaagcccggcagcttctccaacgattcctcgtgtctcaccagtcccatgagctccagcgaatcggagctttcgctcaacgcggtccccttatcgtcaccaacgtcggcggcggctactgctgctgcggcgtcagcagcaatcgcatcaacgcaacaacaaccctcgccggtgcgacatcgttcagtcataacgctacagccagagccgccgtacgcgcgcgactttcgcagcattgactttccgccgacgaccgcgtgtacgccgcggctaccctcgcccagttcggcagcgtcaccaagtgcgcctggtggacgcaagagcttcacctcgctcaatctcaccctgcgccagccgacgggctcggcacaatcggccattgacatcaccgccggtccggcgcccagtgggcagggcagtgggatcacctactccagcgttagttttgacgcacgtcgtgggacgcagaagaatttccagctgactgtgacggacgagggcagtgtcttcagtgcgggcagcgttcgcccaaggaccttgtacgcaacgccctgtgagccggtgacaagtgttccggcaaaccagcagcctcctccgcccgcagcagtggtggcagatggtctgggggacgctgatatgacgtcggacgttttcccatatcccacgcaggagcagaatcacattgtggcatccaactatagtaacaaccatgccgtcagcgacaataacaacattgggatcagcaatagcacggacagtagtcccaccatgcccctttacgaaggtgtcatggaggaatgcgatcgcgaagctcgtgccgccactatcgagcgtcagaagcagcgtcgcgacaagctggccaatgcactgagggacaacaagaagcgcctgctcgtcctggagcaggagatcaacatcctgactgagccggtgccggtgggggaatctgaaagactggatagagatatcaagcaactgactgaggactgtaatcggctgcttgactgcttaaatgaaccgcaggcgaatggccctggtccggcggccaatcccacgaaccgccagcacctgttaccagccagcaatgcttcacagcagcagccgcagcaacagccacagccattcccgcgtcagcgtcaaagtgctcgcgtccaggcgccgcccagttcactacgtctgcactcggtgccggcagcacccatctcccagccgatgcagagtcaacagcaactgttacagctgcagcaggagccgccaccgacgtacgcccagtactatcagttccagcaatatctgcagcagcagcgacagcagcagttacaacagcagatgcagcagcaacagcagctacaacaccagatgcagcagcaacagcagccgcagccacaacaggaggaagaattcctgtccgactccgatgtggatgaggaggaggagacgctggactcgtgggcctgcaacatgtgtacattccgcaaccatccacagctaaatatttgtgaggcctgtgagaacgttaggatccagccgggtatgatacgcattgttcccagtggaggcggggccgctgctgctgctgccacgccacccggcagcattgagcagcaacagcagccgtcccagcagccgtacgctctgcatacataa

SEQ ID NO: 16515 - protein, 811 aa, DROSOPHILA
MAATPPMPPGSNTHQLNGKTVGKGNPLAEAINQHFQRKKQNQHQSPNPSPNPNPNSPASRSGSYEQLELLDHATHPQQQQEASSGKAKPSCHCTNISIMHLFHEMKQEFPTIPDAIVTQCVNENCHQRENCIQMLRKELALHPIPVQSYPAKVLQQQQQQHHQNRQAKPPTPLKPSRIAPPQPEAVLSNGVATPPGVGSPHPDTQPRPRPTTLNLQRQFSTQLQQKIMQRQQRQQRDHQPAQLTPTSLSKPLRRAPPLPPPPKPKPGSFSNDSSCLTSPMSSSESELSLNAVPLSSPTSAAATAAAASAAIASTQQQPSPVRHRSVITLQPEPPYARDFRSIDFPPTTACTPRLPSPSSAASPSAPGGRKSFTSLNLTLRQPTGSAQSAIDITAGPAPSGQGSGITYSSVSFDARRGTQKNFQLTVTDEGSVFSAGSVRPRTLYATPCEPVTSVPANQQPPPPAAVVADGLGDADMTSDVFPYPTQEQNHIVASNYSNNHAVSDNNNIGISNSTDSSPTMPLYEGVMEECDREARAATIERQKQRRDKLANALRDNKKRLLVLEQEINILTEPVPVGESERLDRDIKQLTEDCNRLLDCLNEPQANGPGPAANPTNRQHLLPASNASQQQPQQQPQPFPRQRQSARVQAPPSSLRLHSVPAAPISQPMQSQQQLLQLQQEPPPTYAQYYQFQQYLQQQRQQQLQQQMQQQQQLQHQMQQQQQPQPQQEEEFLSDSDVDEEEETLDSWACNMCTFRNHPQLNICEACENVRIQPGMIRIVPSGGGAAAAAATPPGSIEQQQQPSQQPYALHT

SEQ ID NO: 16516 - DNA, 2585 bp, DROSOPHILA
ttgcacatccacaaaacagacacccacattcactcactcgcgtggagaacaacctgcgtagtcggaaagtgggagaaccacttgcccacgttccacatgccctgcacttagactcagaacatcgaaatacactacggattattgttggcaaatataaacaaataaatatgccggaaattattgtatatatgtacatcgaatgtatagtgtacagattcagatagatttatgtaacgagttctcatacaaatattacaattgtggaaaacggatagttagattaatatatgtatattccttttcattataagtttcaaaagaaaagaagttcataattaagtaattggttgttctagggaagcttttaactgttttgtcagtgtaagtgactatagagagtcacaagtcactcactcacaggaacagccttgagcaccccgccctgccccagcccctgcacctcctcttcctccgttccagccagcccaccgcctgcagttcgcgcgtgtgtgcgtgcgtctgtgtgtgatttgataatgacactgaccatgttgttgtttgcctgtgctgactgaaggccaataaggcgcaaaggaaaaacaaagaaaaagcgtgggttgggtgcaggaaaaacacacagacatttatgtatgggtgcgacataaaaaaaaccagttgcggtctgtctgttttcttgtttttgctttgaatcacggactaactgctgttcagctgtgttttgctgttgcgttttaattgcctgattagggcaacaacaaaagccaagcaagcaacatgttatcacacacacatttgcacgctcgcttacacctttgcatatgtgttcatgtgtgtttatgagggaggtgagcgtgttgcacagttagttatgtagccgtactttggagcatacatttgtgcgcagtttagatggccgttgcagttaccgttatacgcgagggtatatgtgaaggttagagcagtgcaggctgcaaaagccacacaattccattttacatttcacaatcacatacacatacactcatgtagggctgacaggtaattgatttgctctctccacttcattcctctccactactctccactgctgccttctcgctcgtactctcttcagttactacggctaagttgagagtttatatttgcactcaatgtatattattggcgtaacgcggcgcaacaagaggttggccttgtgcattcaggtacacatatacatacacacatgtacagcgcgaggagaagaaaaattgaatttggaataaaatgaaaagtgattttcatctccgcctttccgcctttcgagacattttcccacgcacatctccatgcattcctttttccacctatgcaaaacacacacacacgcagacacgcaaaacactccagcgataaattaattttctatattcggttacgttgttgtttggcaatttacgatttgttttagttatttttcacgtattccgatttgtttgttgctttttacacgccgttagcggattcctcgctccacaaaaaataaataacaaacgaacgagcgaacgaaacatgaacaattccgccacacaatggtcgtagaaaagcaaataagaattgaaacacagcgcacagtggtctcctttcagcctttcgctgctctgtcgctgctgctgctgtggctactgctgctgcgactattgctgctgctgctgcgcgagagagcagccacagtggcacatcccaaatccaaaggccaacaacaggagtgcgcgattccgccactcgactcaaccaacacattccattgtgccatatacacacttaatttccatttttcatattccaagcgcactgaaaaaagaagccaaccccactaaccccaccaccctcactccaaaaggcacccaccacccaccgaaagcggagagagcgatggatagtggaagagagagagagagagagcacggaacgctggagagaatcacgtttaaaacaagaatcatacacacacagcagcacgagtatttggcaatcaggaaaacgcgcatagtaaatttaagactttcggtttatctgctctatggccaaacattaattatccatgtgaaccgaaagcagatcgtaaacatactcaaaacattgtgtagtgcgctagtctcagctgttaaggccccattggaatgccatgcgtcgcgctcagagagcggctgatatgggttttccccctgatttgcatgcgacaagtgtccgaaaagataatgtaaaagggttatattcatgccgggattttctatacttcccttaagagaaaaataataatcgtttataatgtattcgttttctcctgtatccgttgaaaagttgtatctttaagataagcttaagataagataggagaagagaatataaacttcaaacaaggcatcatagttcaatagaaaacattatttcataaaacattaaggcatccataatgtttttgtgctgcttaaacgcacactatgattttaaaaactactcctaccagtttatattgatctcattttgtacgcccaactcaatttgcagcacgcatcattcag

SEQ ID NO: 16517 - DNA, 585 bp, DROSOPHILA
cggaattgttcatgtttcgttcgctcgttcgtttgttatttattttttgtggagcgaggaatccgctaacggcgtgtaaaaagcaacaaacaaatcggaatacgtgaaaaataactaaaacaaatcgtaaattgccaaacaacaacgtaaccgaatatagaaaattaatttatcgctggagtgttttgcgtgtctgcgtgtgtgtgtgttttgcataggtggaaaaaggaatgcatggagatgtgcgtgggaaaatgtctcgaaaggcggaaaggcggagatgaaaatcacttttcattttattccaaattcaatttttcttctcctcgcgctgtacatgtgtgtatgtatatgtgtacctgaatgcacaaggccaacctcttgttgcgccgcgttacgccaataatatacattgagtgcaaatataaactctcaacttagccgtagtaactgaagagagtacgagcgagaaggcagcagtggagagtagtggagaggaatgaagtggagagagcaaatcaattacctgtcagccctacatgagtgtatgtgtatgtgattgtgaaatgtaaaatggaattgtgt

SEQ ID NO: 16518 - protein, 42 aa, DROSOPHILA
MEMCVGKCLERRKGGDENHFSFYSKFNFSSPRAVHVCMYMCT

SEQ ID NO: 16519 - DNA, 3409 bp, DROSOPHILA
ctttatatggtcacgaatgtctctgttgcacactacagactaaaatcaaaatattctctgaaaggtattcccaacaaaaaacgctatatcctgggataaccattgtattcttacgattaatttcacaaaatgaattaagaaactataattgtacagaaacgattatttaaaggattattgccgttcaaaaacgaaagagtaattcccgctactgttccgctgttttcacgtccgcagatttaagtgacccaattgcaaaaacaaaagcaaaacaatattaattcaactctgagccgactgatgctgcaggcacctcaaagttaaaaaatgcgtagcacgtgcgttcagaaattcggccaagaaaaaaggaaactgttaactgggtccataaattcaactttgttgtatatacatacatacatactgtatgttcatataagtacgtcactttaaacatctgccttcgtttcctttaactctttaatttatttttgatccagctttaataactattaatttattattcctataacttgtacgttgaatgggcataggtaattttcttgaaatatgaaatatttaaaatggaatgcattctgtatgaaatgtattcgggcctaaaaagatgattgtagttatttaaatttgaaactagatttttaatacaagaagattgataaaaagttatttttgatttatatttaataaatattttagaactaaaaccaaaataaatgatgttttccctactaaaattatactcgaacttgtagctgtattaaaacgtgttcacttattgattaaatcatagcccatacagttagttatacgttctcaatttttgccaatcttgcgcttctgatttccaatgaaataaaagtgactattgtacgaatcaccctaatattttttcacaactggtatttttctccgtcccgcaatcggtaacaccatgcagggtgtctgagtttcgaatcggcataaattcgccggcagctgagcaagatgtatcctgtgagctcgcaaaagaggtcctggacattcgccaatgagggccagctcatggagttccgcgtggagcagaacagcaagtacatcgagtcgcacgaggaggaggcgcagggtcgcgacctcaatgagcactttctcacgtcggcggaggagcgcctgttgctgaagcagtacgagatctacctgttcgatttctgccgccgcttcgaaccgacgatgcccaagtgcgttgtgggcacggccttccactacttcaagcggttctatctgaacaactcccccatggactatcaccccaaggagattctgtaggaacgctcacctgagagcagcaaacacccagctgaaaagcaaaacattctaaaaatgtataaaccttttcagagccacatgcgtgttcgttgcctgcaaagttgaggagttcaacgtgtccatcaaccagttcgtaaacaacatcaagggcgacaggaacaaggccaccgacatagtgttgtccaatgaattactgctgattggacagctcaactactacctcaccatacacaatccgttcagacccatcgagggtttcctgatagatataaaagtgcgatatatattcacatttgctctccagattgtttcgttcatattggtttgtttcagactcgcagcaatatgcagaatccagatcgtctgcggccacatattgatagtttcattgattccacgtactactcggatgcctgtcttctgcatacgccttcgcaaattgcattggctgccgtcctccacgcggccagcagagagcaagagaatctcgatagctatgtgacggatcttctgtttgtctccgccagggagaagctacccggactcatagatgccgtgcgaagtaagtttgtgctgtgagatggtgcgcccagccctacatgcctttttcccgacagaaattcgcataatggtgaagcaatatcagcagcccgatcgggagaaggtcaaggccatcgagaaaaagttggacaagtgccgaaatcaagccaataatcctgatagcgaactgtaagacgccctaatttgttcatgcattccgaatttaataacccttatactttaaaagctataaggagcgcctacgccgattgtacaccgatgaggatgacatgcccgccgaagatgcctcattccacattgcagatgtgagctcggacacatctgctatgaacatcagccaatagacttaagaatatttatttaaatgatgtgatgatctactactgcgtggatttcatcgatattaaagcattttgtaatttaccatttcttgattgttaaaatgtatgcgtttagtgttagtttactaaacaaagttggattaggtacttcacttttccaatatataaaatattaaaaaaaaaaccttttgaaaatccgcttagcgctgcttggcaatatttcgttcgcagctaacggccacactgcgccccaagaaaaacaagaatagtgaactcagtcacaacaaatagcaaaaagagttcgaaatgcaggattttctgccttcgctggatgttctctttcttggactaccaggccactactcggtagcgctggtcacccttctgctgtgcgttttggtcgccttctacttcgccaacatcttcaaggacaaaggcgtgggtgtttttgccggaagaagtagacgtctcctggaatatttccttacattatcttgcaggaactggaggacgagggcctgggggccgacgagccgcgcgatgaggaggattccgagtcacggactccgcaaggggaggaaaccgacgatgacgaggcctacgaagagaactccaccgaaagcgaagttgagctaatcgaggaacagctgcccgagcacagctacaaccacctgatgggccagctcaaggccaagaggctccagcataagatggagaagaccctgactcccagccaaatcgaggaggagcgccgaatagagcgcgagcagctggcggccatctttgagctcctgcgcaaacaggaggcggaattgaacctccaggaccgaataagcgaccaggatctcaagcagcaggtgcggctctatcgctgaagtggcgccgagcctgggctcaccctacctgaatgtacagacttgtgtgatctattagtttaatgtttaaaattccaagatttggtgttgcctcatacggtccactaagtgcgggcaagtctttagtcagagagctatctcatcagtcgatgatgtcggaatataatatcttagttgtatgtaaattatatgtattccacttcgatctatgtattttgtgagttcctggtgttattaatatctgatttagatttgtagtaaatggctgttcggctcttagtctcttaaatcagctttcgaattaagaat

SEQ ID NO: 16520 - DNA, 1161 bp, DROSOPHILA
gcaagatgtatcctgtgagctcgcaaaagaggtcctggacattcgccaatgagggccagctcatggagttccgcgtggagcagaacagcaagtacatcgagtcgcacgaggaggaggcgcagggtcgcgacctcaatgagcactttctcacgtcggcggaggagcgcctgttgctgaagcagtacgagatctacctgttcgatttctgccgccgcttcgaaccgacgatgcccaagtgcgttgtgggcacggccttccactacttcaagcggttctatctgaacaactcccccatggactatcaccccaaggagattctagccacatgcgtgttcgttgcctgcaaagttgaggagttcaacgtgtccatcaaccagttcgtaaacaacatcaagggcgacaggaacaaggccaccgacatagtgttgtccaatgaattactgctgattggacagctcaactactacctcaccatacacaatccgttcagacccatcgagggtttcctgatagatataaaaactcgcagcaatatgcagaatccagatcgtctgcggccacatattgatagtttcattgattccacgtactactcggatgcctgtcttctgcatacgccttcgcaaattgcattggctgccgtcctccacgcggccagcagagagcaagagaatctcgatagctatgtgacggatcttctgtttgtctccgccagggagaagctacccggactcatagatgccgtgcgaaaaattcgcataatggtgaagcaatatcagcagcccgatcgggagaaggtcaaggccatcgagaaaaagttggacaagtgccgaaatcaagccaataatcctgatagcgaactctataaggagcgcctacgccgattgtacaccgatgaggatgacatgcccgccgaagatgcctcattccacattgcagatgtgagctcggacacatctgctatgaacatcagccaatagacttaagaatatttatttaaatgatgtgatgatctactactgcgtggatttcatcgatattaaagcattttgtaatttaccatttcttgattgttaaaatgtatgcgtttagtgttagtttactaaacaaagttggattaggtacttcacttttccaatatataaaatattaaaaaaaaaa

SEQ ID NO: 16521 - protein, 324 aa, DROSOPHILA
MYPVSSQKRSWTFANEGQLMEFRVEQNSKYIESHEEEAQGRDLNEHFLTSAEERLLLKQYEIYLFDFCRRFEPTMPKCVVGTAFHYFKRFYLNNSPMDYHPKEILATCVFVACKVEEFNVSINQFVNNIKGDRNKATDIVLSNELLLIGQLNYYLTIHNPFRPIEGFLIDIKTRSNMQNPDRLRPHIDSFIDSTYYSDACLLHTPSQIALAAVLHAASREQENLDSYVTDLLFVSAREKLPGLIDAVRKIRIMVKQYQQPDREKVKAIEKKLDKCRNQANNPDSELYKERLRRLYTDEDDMPAEDASFHIADVSSDTSAMNISQ

SEQ ID NO: 16522 - DNA, 6194 bp, DROSOPHILA
ggctagtgagtgtttagtgtcggtttaacgttttgtacatgcccaaaaaactttagcaaaaacttgaatatcactcgtatttatgttaaaatttgcaattttcaaattcaattctcttgcatgaaatatgttttacaataaactttataaacgccatttaatcagttatcgataaagttattaatatatatgtatatgtatatattacgcgcgtatgtatacaataaaaatagggagatgcttagactacgatttttacaaaagcctatcgcattggcatgcgttctcattgttggagacacatgcgaacataagtgacatgacccttgagtggtttgtagattataaattcgattaatgcgcttggattccgggcggggatcgaatctcagatggattaactcgtacaccttacaacaccatgcatatgtgatgtaagtcggtagtataactttatgatctatgtttgacccgtgttcgattcaaacaaacttagacgagaatgggggtttttgatgtacaattagtctgccaactaagcaatacaaaaatatctatcgtactttgccgtggaatcgagttcttttccatctccttcagcggtgcgatttgtatgtacattgaaagtgtcttccaaatcttgatttggcgcaggagtcatataagttctgcttttggcactgtactgagtacccaagtagtcgggataatgatggccttgaggcacacaatacatcaaaagccaaaccataagtcaatcaaaattcatctgtacatccgtccagttcgtccctcggtccgttgagtccgtcagctaatcctactaatttccagcttagcagctgctgttgatctctggcgatctcgactaatgctcggcccataaaaaccgccggtcactccattcaaacgctggcctcggacatccactgaggcgaactcagttgttgttcttccagcgcgagagcaggagcctccagcggtttttacgccttctgcttcaaatttgccatatcaatagatggttggtgctgtcctcgcggccagcgatctcgctcagcgagttggcaccggagttgcggaagtcctcatagccatcgccgccggaaatgatcagcgtgttgttcgtctccgacttggatttggagtgcttgatggacctgcaacacatagtttttgttaactatatcgctactttctgtcatattctcaaacttacccctgtttggtgtactcatcgctgttggaactgcctgcatcgcgaccaccgcctgcaccagaagcagctccctccaagcccgtagtctcaacaaacgtaaggaatcgaacgtgtccagtgtgaccatgaggaatgcctgtgggcactatgtttatggcacccttttcgtagccctgcgccggtatggtcagcagaacacccgcactggttccaatccaaatgagatccttgcagcataacagcgatgttactcgcagacaagccgccttgtgctggcggataatctcatcgcaattggatagcatcttgtttacggcgggggcgagattcacttcagtgaccagttggtggctgcaattagaaggtgttatcattaatgacataaagccagaggatatagattatactcacgtattggaatggaaacacttaatgtgcgctgagttctgaatggatatccagacatgattgtttgagacagtcatatttgtaatcggcttcgaatccgatgaaatctgaatttgattaacgacctgagtgatagaagaatcatttgattagttcttgaatgggtagaaataatgtttttcttactgttaatgtctctacgtccagcactttgatgatgccctgaatggaacaccatagtcggccgttgacgttcaatagcttattcaccggactggtgaccgtgcctatggacaggcaatgcgatgagcaagtattccaggaggttgctaaatgattaaccaatcgttagacttattcatgggttctgcaataataaacacataccaccatccctcaggtaaacgcaaatatcaccattagctaatgatacaaacacacgattgtccaggtacctattcaaaacaaaacatttaaataactattgcgttgttaacttattttagttctgcttacaaaatggaataaacggccgaatggtgctcgatcttgatgcggtttttcttaatgcgaatattgtcagtgctattatagacgtggatgcagccgtcttcagtgccaatccacatggttgattgattgctctcgccctcctcgggatttgagtcctgcggggcaaataaagtaagtcactggagcattcccagagggattggtcacaactcacctgatgcccatgatatgagggcgcaggactgggtacccgttccactaatgtggatcctgtgctcccggcgacgttcaaagaggcggccgcagcctctgtttcatcgtcgctggagcttagattcagttccagctgagtatcgctgccgcctgtggtcgcagcatccgcgggttcaccaccagccaccggcgtaggtgtcggcgtcagcttcttcttttcgggcgtcgccgtggccgatgcggaggcactttggaaactgggtgagatgctcttgcggtaatctcttagctgctgggtatagctctgtggcgtgtggcgcttatccttctcctcctggccgccggatcctgccggctgctcgctactactattgcgactggaggccgccgaactgtacgccggcacggaagccacgcacaggatgcgagcattgcacacgccattgcagctggtgacattcggctccggatgcagcgacatgatgcacacctgacccacatagccatcgctgttgcacacccatacgtcccgattgtcactcagcgtggctgccgcacaggtgaactggaggccagctcgggtcttgcgaatcggtatggatgtaaggaactcgggaattggatgccgctccagggtggcagctgcagggaattgtgagatgtattacttattcaatgtagatgaggtgcagtgaaattacttacccagcttctgcttggcctcgttgaagctctcctcccactgagtgcgcttctccgtcttgctaaagaccactgccagcttctggttaccatttctgaaaaataatatagatatggttaagaatactaacactataggctataatcctgttcatctattagcttttcaataatgcttttgaattttcttgttcagtttttgctaggttcataaaatccacttacggagaactgactgtcagctcgagcatatttagttgggtgtcgtttgtctggcgttcagagagctgtctctgcacctcgcggtggagctcgcggattacatcctccagatactgatgcgggtacttaatggtgacggttatatcggtgatttgctgcagcttattgcagtcttcggccaaagtctcgatttcgctgacgatgcgcttgatgttctcgtccttggctgcaaaacagacagaatagtttgttttagataccaagtatcaagttcattaactacactcacatttgacaatctccaggcagtccagcgagatcttggtgaggaacttgtacttattggtgtccaaagtggtggccacggtgcccgggcagatgctgctgttcggcttacggatggtaccgcttcgtttcttgatgctcgtcaggacgagtaaatcgttgaacaggaagaagccgcgatccttgcgcgctccttgtcccgaaggcatggagaccagatcgaagagcagaaactgcctttcgggggctataagatcggtgatgccttcgatgacgccttccagttcccggagcgtggcctccctctgtccattctccatgatctcgcgctccttgcagttgatgtgcaccagtatatcgtggactagcttcagcacatcctgcagatgcttcgtgtctggatgatcgtgatccgtgtgcttaatcaatcgctggaagagcagctcatagctggaaacaagagattttcttagttgttggtccttcttcaaatttatattgtaaataacttacttggggaacttttgaacgggttttatgagcagattgtctaaggttagcttgcccttgtgctctcgagcggtcgtctcaagaaacttggaaaacgagggtcgctgatgcttcatggagcgtatggcattctttgccctattgcagttgttcacaaaggatgtatagacctctagaacctctagcttcgagaactgtgagtaagaacaccaatattagagcagttggaaatatattattataaacaaaattaaactagtttcaaatgataggttggtagataaaccgaaagtagtcaaagatagtctttaccgtgtccatgaaggcatcaccaactttctgctgcacatcccagtcatccaaacggctcttcaggtcgctgagaaacttctcgtgaatctcgaggatgtcgggtaccatgaagaagatctcatccacagtgcgtgtatctatcatgccggcgtgttcgggcgccttaagcactttcagatacttgacaacgacggtttgcagggactccacgtaggattgctcattacgatagatctcctgcaccacataggtgcgtgtgtcctgagggaaatatacaatgcaaatgaaattaatatggatcatagattggcacttggctaaaaggtagttggggttagttgcgaccagacttacgccttcatagccgcccagattccatttactactaatctcgaactgcgctcgtcgctcggaatcgtcctccgagtcggagcaggtgatcgaagtcattttcttcagcctgtcgcacttgtcgttctgatagccactcccggccccgccccctgaaccggcagccgccccgaatcccgccttgctcagacgcgccaccgttgtggtggccatcgagaccgcctgcgagacaccagtgttgatgttgctgctgctgccgcacgcgcttatgttgctgctgctgtgcgagtgggtgttgctgctgctgttgctgatgttgctgctgcttccactcggcagctgttgcatgtgggcgggagcttgggggagcagggcggcggcaacggtttgggagggcgccgtcagggtggcctgcagatccaacaggctgagtcgcagattctcgcgattgtgcgacatgctcggaatgtgtattaaagtgttctttctccgctttctttttgtttacaccgtcactagtttaggccactttttgtttcactgccgcaacgatactgatttcttaaagcaccactgaagcattctgtgtgttttattgttgttgtttgttggtgtaaagacaaaagcgcacgtctggcctggcttaaacgcccaaatagactgaaaatgcaacaagcgatgttgcacatccacaaaacagacacccacattcactcactcgcgtggagaacaacctgcgtagtcggaaagtgggagaaccacttgcccacgttccacatgccctgcacttagactcagaacatcgaaatacactacggattattgttggcaaatataaacaaataaatatgccggaaattattgtatatatgtacatcgaatgtatagtgtacagattcagatagatttatgtaacgagttctcatacaaatattacaattgtggaaaacggatagttagattaatatatgtatattccttttcattataagtttcaaaagaaaagaagttcataattaagtaattggttgttctagggaagcttttaactgttttgtcagtgtaagtgactatagagagtcacaagtcactcactcacaggaacagccttgagcaccccgccctgccccagcccctgcacctcctcttcctccgttccagccagcccaccgcctgcagttcgcgcgtgtgtgcgtgcgtctgtgtgtgatttgataatgacactgaccatgttgttgtttgcctgtgctgactgaaggccaataaggcgcaaaggaaaaacaaagaaaaagcgtgggttgggtgcaggaaaaacacacagacatttatgtatgggtgcgacataaaaaaaaccagttgcggtctgtctgttttcttgtttttgctttgaatcacggactaactgctgttcagctgtgttttgctgttgcgttttaattgcctgattagggcaacaaca

SEQ ID NO: 16523 - DNA, 3306 bp, DROSOPHILA
atgtcgcacaatcgcgagaatctgcgactcagcctgttggatctgcaggccaccctgacggcgccctcccaaaccgttgccgccgccctgctcccccaagctcccgcccacatgcaacagctgccgagtggaagcagcagcaacatcagcaacagcagcagcaacacccactcgcacagcagcagcaacataagcgcgtgcggcagcagcagcaacatcaacactggtgtctcgcaggcggtctcgatggccaccacaacggtggcgcgtctgagcaaggcgggattcggggcggctgccggttcagggggcggggccgggagtggctatcagaacgacaagtgcgacaggctgaagaaaatgacttcgatcacctgctccgactcggaggacgattccgagcgacgagcgcagttcgagattagtagtaaatggaatctgggcggctatgaaggcgacacacgcacctatgtggtgcaggagatctatcgtaatgagcaatcctacgtggagtccctgcaaaccgtcgttgtcaagtatctgaaagtgcttaaggcgcccgaacacgccggcatgatagatacacgcactgtggatgagatcttcttcatggtacccgacatcctcgagattcacgagaagtttctcagcgacctgaagagccgtttggatgactgggatgtgcagcagaaagttggtgatgccttcatggacacgttctcgaagctagaggttctagaggtctatacatcctttgtgaacaactgcaatagggcaaagaatgccatacgctccatgaagcatcagcgaccctcgttttccaagtttcttgagacgaccgctcgagagcacaagggcaagctaaccttagacaatctgctcataaaacccgttcaaaagttccccaactatgagctgctcttccagcgattgattaagcacacggatcacgatcatccagacacgaagcatctgcaggatgtgctgaagctagtccacgatatactggtgcacatcaactgcaaggagcgcgagatcatggagaatggacagagggaggccacgctccgggaactggaaggcgtcatcgaaggcatcaccgatcttatagcccccgaaaggcagtttctgctcttcgatctggtctccatgccttcgggacaaggagcgcgcaaggatcgcggcttcttcctgttcaacgatttactcgtcctgacgagcatcaagaaacgaagcggtaccatccgtaagccgaacagcagcatctgcccgggcaccgtggccaccactttggacaccaataagtacaagttcctcaccaagatctcgctggactgcctggagattgtcaaatccaaggacgagaacatcaagcgcatcgtcagcgaaatcgagactttggccgaagactgcaataagctgcagcaaatcaccgatataaccgtcaccattaagtacccgcatcagtatctggaggatgtaatccgcgagctccaccgcgaggtgcagagacagctctctgaacgccagacaaacgacacccaactaaatatgctcgagctgacagtcagttctccaaatggtaaccagaagctggcagtggtctttagcaagacggagaagcgcactcagtgggaggagagcttcaacgaggccaagcagaagctggctgccaccctggagcggcatccaattcccgagttccttacatccataccgattcgcaagacccgagctggcctccagttcacctgtgcggcagccacgctgagtgacaatcgggacgtatgggtgtgcaacagcgatggctatgtgggtcaggtgtgcatcatgtcgctgcatccggagccgaatgtcaccagctgcaatggcgtgtgcaatgctcgcatcctgtgcgtggcttccgtgccggcgtacagttcggcggcctccagtcgcaatagtagtagcgagcagccggcaggatccggcggccaggaggagaaggataagcgccacacgccacagagctatacccagcagctaagagattaccgcaagagcatctcacccagtttccaaagtgcctccgcatcggccacggcgacgcccgaaaagaagaagctgacgccgacacctacgccggtggctggtggtgaacccgcggatgctgcgaccacaggcggcagcgatactcagctggaactgaatctaagctccagcgacgatgaaacagaggctgcggccgcctctttgaacgtcgccgggagcacaggatccacattagtggaacgggtacccagtcctgcgccctcatatcatgggcatcaggactcaaatcccgaggagggcgagagcaatcaatcaaccatgtggattggcactgaagacggctgcatccacgtctataatagcactgacaatattcgcattaagaaaaaccgcatcaagatcgagcaccattcggccgtttattccattttgtacctggacaatcgtgtgtttgtatcattagctaatggtgatatttgcgtttacctgagggatggtgcaacctcctggaatacttgctcatcgcattgcctgtccataggcacggtcaccagtccggtgaataagctattgaacgtcaacggccgactatggtgttccattcagggcatcatcaaagtgctggacgtagagacattaacagtcgttaatcaaattcagatttcatcggattcgaagccgattacaaatatgactgtctcaaacaatcatgtctggatatccattcagaactcagcgcacattaagtgtttccattccaatacccaccaactggtcactgaagtgaatctcgcccccgccgtaaacaagatgctatccaattgcgatgagattatccgccagcacaaggcggcttgtctgcgagtaacatcgctgttatgctgcaaggatctcatttggattggaaccagtgcgggtgttctgctgaccataccggcgcagggctacgaaaagggtgccataaacatagtgcccacaggcattcctcatggtcacactggacacgttcgattccttacgtttgttgagactacgggcttggagggagctgcttctggtgcaggcggtggtcgcgatgcaggcagttccaacagcgatgagtacaccaaacaggggtccatcaagcactccaaatccaagtcggagacgaacaacacgctgatcatttccggcggcgatggctatgaggacttccgcaactccggtgccaactcgctgagcgagatcgctggccgcgaggacagcaccaaccatctattgatatggcaaatttga

SEQ ID NO: 16524 - protein, 1101 aa, DROSOPHILA
MSHNRENLRLSLLDLQATLTAPSQTVAAALLPQAPAHMQQLPSGSSSNISNSSSNTHSHSSSNISACGSSSNINTGVSQAVSMATTTVARLSKAGFGAAAGSGGGAGSGYQNDKCDRLKKMTSITCSDSEDDSERRAQFEISSKWNLGGYEGDTRTYVVQEIYRNEQSYVESLQTVVVKYLKVLKAPEHAGMIDTRTVDEIFFMVPDILEIHEKFLSDLKSRLDDWDVQQKVGDAFMDTFSKLEVLEVYTSFVNNCNRAKNAIRSMKHQRPSFSKFLETTAREHKGKLTLDNLLIKPVQKFPNYELLFQRLIKHTDHDHPDTKHLQDVLKLVHDILVHINCKEREIMENGQREATLRELEGVIEGITDLIAPERQFLLFDLVSMPSGQGARKDRGFFLFNDLLVLTSIKKRSGTIRKPNSSICPGTVATTLDTNKYKFLTKISLDCLEIVKSKDENIKRIVSEIETLAEDCNKLQQITDITVTIKYPHQYLEDVIRELHREVQRQLSERQTNDTQLNMLELTVSSPNGNQKLAVVFSKTEKRTQWEESFNEAKQKLAATLERHPIPEFLTSIPIRKTRAGLQFTCAAATLSDNRDVWVCNSDGYVGQVCIMSLHPEPNVTSCNGVCNARILCVASVPAYSSAASSRNSSSEQPAGSGGQEEKDKRHTPQSYTQQLRDYRKSISPSFQSASASATATPEKKKLTPTPTPVAGGEPADAATTGGSDTQLELNLSSSDDETEAAAASLNVAGSTGSTLVERVPSPAPSYHGHQDSNPEEGESNQSTMWIGTEDGCIHVYNSTDNIRIKKNRIKIEHHSAVYSILYLDNRVFVSLANGDICVYLRDGATSWNTCSSHCLSIGTVTSPVNKLLNVNGRLWCSIQGIIKVLDVETLTVVNQIQISSDSKPITNMTVSNNHVWISIQNSAHIKCFHSNTHQLVTEVNLAPAVNKMLSNCDEIIRQHKAACLRVTSLLCCKDLIWIGTSAGVLLTIPAQGYEKGAINIVPTGIPHGHTGHVRFLTFVETTGLEGAASGAGGGRDAGSSNSDEYTKQGSIKHSKSKSETNNTLIISGGDGYEDFRNSGANSLSEIAGREDSTNHLLIWQI

SEQ ID NO: 16525 - DNA, 6304 bp, DROSOPHILA
tgcttgcttttcgctttcacaatgcgtaaaaaaacacctaattttgtatagcatatgaatatcattaagtgtatcagtaaatttgtatcagtaacagttgcaatattatcgttatccttgtattatatccttttttcctttttcttttgttttacccgacgagataccacgaacgacgattacgattacgaacgagcgacgaaaatacgcgaacgcgaaaccgttagaacccgaaacgcgacgatttttttcgattccattttttgtttgttatataaatgacgaaagtgttggatacttctgggaaattggaatccgctgttgatgaatgctttctatggtttttgaacggagttgaacatcagtctttgtttgatttgtaacaattttgtgtgcacctgccattgaatccatttttccatttctgatcttaggatttcacaggagacccaacactttcatcctttaaagattttatttagttatttagtttttaattaccgcgacgaggacccgcaatatcatttagtttcgacgatttttcatttagcttttctattactatatgagaaacacccgtgtgtttaacatattcaactctattttcggtttgggttttggggcagagtgtattggagaatggggcatatctgctatagcactgactccggttaagtacggccggaacacataattttctagtggttcctactaagttttctgcacaagaaaggcattttatatgctgtaagcggacagtcgtgtgcctaaagaggttctacagatcaaagatcctctagcttgaattcaaatatatacgattcttctctattcgatttttcgatatatgtttgtggatttaaatctagttatgtagtttcttttatgtggatttgctgtttttttcgatttctataagcttagattttcaatgttaacttaacattcgaactgcatcgaataacttaaggaggctaaagataaagacgacacgcttattacgcatacttgtacataattgtctagttaaaaagttgctgcttggctcgctaatgggtgaaggtgggtgttttatggcatggctagccttagatgttatacattgtggtcaggcgctcggccaaggttggcgggaattgctccacaaatcgacgccagttctcctcgcccacttgggtcttaaaaccgtgcagaatcttgaaagaaacatgtgtgaaataaagaaaatagttactacctgtagggtacaaaccttctgtatcatctgatgcagatcctctggtgggttaacccaggaagcgatggcatcgcagaagaatataaagtctgctaccacgccagctggattcaccgtgatcatatgacacattccacggaaggctgagtccttctcatcattgtctcgtatgtgccgcaacgatgtgcacctgcatttttcaaagaaaatgtttaaatgtcgttttcaggaaaagtaaactaaattagcaggctttggcaaacacgaaagttcaaaagcaaatttaaattccagttaaatgatgtggattgttagtgagttgtggaacaaaggaatagatcgatgtgcttataggtttcagtgttcaagcgtaatttaagagtaatgggaagaacgggaaggatagataagagaatagaaggaaagaataagcattttaaatataaaacgtgttacacaccactgtcgtacaaattcgggcaaataaggagccacttcaactgggcacacataacctagacgaccgattgttattgctaaaagaacagaagaaataagtataaataaatcaactgaataaatcaatatcatacgtagttcgctgcgattgattgctaaattcgaattgaatatcaattgcgattctggtctatctatatctatgcatgttgtatgggaatgaggttcgatttcgtttcgttgctgctcatgcaacaagtaacacaaattaaaacagaaacaaatttccggacatccacatacacgcatacattcagagtaatatatatacaaacagatcgcatataagttcttagatagctcgggaaattcgaaagatttctatcagctcaaacgaattacctgtgttctccagcagtgtcttgggcgtgttcgggcggttgataatgatgaaaaggtcgctgagtacaaggcgtatgtactgcttggtctcctcacctttgaatcaaaatatatattaaaacgatcctaatactcctaagaagctcctcccacttacccaatttcatgcagatttcgcctatggcccaagtagcattattgcagaccgaaatgaagtctgggttaaggttttgacccaagatggggaagaaatcggccatgaagggatgcacgtgggggaaacaggccttagtcaaatcacccagcagggcaaacgaagattggcgaacctggaatacaacaacattatagaaattcaaaggttaatttcgaaaagattggttttaagggagacatacctcaggcaaaacgtcctgcatacactggtagagtagatgcataatgttgctgttggccaccaatgtctcgatgtggcgatccaaaccctcggctaggccagacagcagatctagggcgacaatcatgcgctctttgtcgggatggtcgtacgtttggttttgtttacacagctgttggcgatttagattgatgaaaaagattccttagaaaattgacaagtagattaccatttcctggttgatagtctgctcaataagagagatgcaccttcgatacaccgggtcgcagtagggcagaaagccggactgcaaggcagtggcgatgctcgacaggcactccaacaatgggaacagatccttatcgtcatccttcagcaggttccacttatcaattagcggaggcattaggatgtcaatatattgcggcttattcagatgatgacctacggagtccgccaaagtacccacggcatcgtacagtatcaataagttcttgtgctggtacttggagaaggcaaagacgagcgtctttagaatatactccaggtagggcaccagttccgtgcaggcctcctcctccagagtagcaaaggcagagcacgcagcttcctgaacgcgcttattggagtctagaatgcgcttcagcagttcttccattagaggcttcaagtactggtcgtgcggctggttgacaacccaattggcgtatcgcgagagcgtccagcatgtgatggagcgcaccagtgccttcttgtcggaaaggcagctaattaggtagggaatcagctctggcaagtgttggatcatgccctgcatgcagccctccgcaatagctcccaaggccagcacaccactctctttgatcacccattcttgatggaacagagtctctttcaggatgggcagcacaacgggcagacaatcctctcggaaaacattcgccaatacatcgagagcagctgcgctgcacttgcgcaagttccattccgatagcgagctatcgtcgtccattccatcttcaaattcgtcgtcgtcatcatcgcctgtcgctccagctcctccctcttgtgtactcctgattgtgtgtgcacgggacttgtggaaacgcgggcggatatcctcttctcgatcgggcaccatgtcatcctcctcaacgtttcccttgaggagaattatgtcgacctctgagtaccgcatgcctcgtacaagaactggcgctaattgagcaagataaggggcaagcacgtccttgcagatgctttgctcggccagtgaaagccagaactcggatgcttccagggccacaccctcatcggtgtcctgggtgcgcaacagcatgtactaaaattcgttaaataagatatttaaacaaaaatttatcagaataattattattaattatatattttattttaaagttatacctcaataatctgcgacatgtgcggcatcagacggtccattcgcacctccagcagcatgaccaatccgtggcacacgtttttgcgcacctcgtggtcctcatctgatgacaggtgaaagaggttctcaatgaagctgtctatgtttagcatcagagcctgtgatctgttgatgatgaactggttgatgcaggcaatggcgtgggagcggatctttggactgctgtgcttgaagtactccaggaactttggaatcattatgtttaatggcctgttgagcgctgcggaatccaaaatctcggcagagtcctcgcaaattttctgcagggcactgaatgcgccttcgcacacattatagtcctggttgtcgagcatttcgcagagagatggaagcagctgcggccagttgtgcagaccgccattgctggcgatggtggtaatcaggatgcccacggtggcacggatcaggggcgaagcgtcgcccactgcctgcaggcactcgtgtttgatatactccacgatctccggctgcagagtggtgccgtgcatgcggatgttgttcttgaggattaggccgctgagtgatctcgtgggctcgtcctctgtcttcagtttcgtcagcacatagataagatagttgttgaagtcggggtagcgattgaattcctccagtttctgttgagaaggacacaatatgtgcatgcagttcgaggaaccgtacctggtagaagttattactcaccatctgtacggccatttgagtggctgtgtccggtgactgcgactccttgaggatcgctatgatctgctgcagaccttctccctgtggttcccacgtcattttgctgctgcaagggaagatcgcaagggttttaggtttgattagtgaattcggaattagaaattagggttaatggcctcgcaaagggtagcaaatgggggagaaagagagagcacgagagacactctgttcgaggccactcacgcacaccagggcattttgcacccacacccgcaaacagacatctgctgttgtgaaatttacgttttccgttcgatgtttccttggcacttaatggttttacggcggaaggcgggagttgaaagccctgccccgagagtaacgtgcgattttctgcccacaaccccagacaaaaaaaaacacacgaatagaactcgcctgcctccgccatatttcgtgacatcgggcgtgcggttgaaaacgcttttccgagataagttctgcgttgtccgcataccccctacttacctttgggtgttggctgtgctttaaaactattttagttggaattttcttaagattttgcgtaaattgtctcttttttcaccttttctttgcacaattagcgagatgtatacagtgtgaccgtgcaagagagagggagtatgctattttttattagagatggcaacgtgtcgtcacgggttttaaaattatatttaatgtagttgattttttaatttattgtgcttaatttaatatttttaagcagcttaaaatgtttgaatcactctgatatataatttccgaacaacaaattattttattgccaaaatgaaaaaaaatgaatattaaatcaaattttgcagtccaaagctgctccgatgtaacgaacttcctctcacatatgtatctaagtgctgctgcacggtcacactcgatacggctctcgaaatgcgtccacactctcgccatttagagtgcccacattcgccaccctgttcaattttgtttgggtttgaggccagacagaggagtcattaattttaaacaaaggaccacgcttcaggacattcatcccgggtcagacaaagccgccacacactttcctcgaggccgagtgaaagtttctcgccttgtcgccgcttaacatccgaagcgaccggacatgaacaagcgcaaccatgtgagcagaaaacctacggctccacacacaaagcaaatgtattgagtgaaaagtgctatttcttttgcagatccgcctgccgccagaggtgaatcggctattgtacgtgcggaacctgccgtacaaaatcacctcggacgagatgtacgacatattcggcaaatttggagccattcgacagatacgcgtgtaagattgaagatgataatgctattcgccgtgaatcctctcaatcaatttgtgtatcttttgcagaggcaacactccggaaacgcgtggcaccgcctttgtcgtctacgaggacattttcgatgccaagaacgcctgtgaccatttatcgggttttaatgtgtgcaatcgctatctggtggtgctctactaccaatccaacaaggccttcaagcgcgtggacatggacaagaaacaggaggaactgaacaacattaaggccaagtacaa

SEQ ID NO: 16526 - DNA, 2894 bp, DROSOPHILA
tcacactgtatacatctcgctaattgtgcaaagaaaaggtgaaaaaagagacaatttacgcaaaatcttaagaaaattccaactaaaatagttttaaagcacagccaacacccaaagcagcaaaatgacgtgggaaccacagggagaaggtctgcagcagatcatagcgatcctcaaggagtcgcagtcaccggacacagccactcaaatggccgtacagatgaaactggaggaattcaatcgctaccccgacttcaacaactatcttatctatgtgctgacgaaactgaagacagaggacgagcccacgagatcactcagcggcctaatcctcaagaacaacatccgcatgcacggcaccactctgcagccggagatcgtggagtatatcaaacacgagtgcctgcaggcagtgggcgacgcttcgcccctgatccgtgccaccgtgggcatcctgattaccaccatcgccagcaatggcggtctgcacaactggccgcagctgcttccatctctctgcgaaatgctcgacaaccaggactataatgtgtgcgaaggcgcattcagtgccctgcagaaaatttgcgaggactctgccgagattttggattccgcagcgctcaacaggccattaaacataatgattccaaagttcctggagtacttcaagcacagcagtccaaagatccgctcccacgccattgcctgcatcaaccagttcatcatcaacagatcacaggctctgatgctaaacatagacagcttcattgagaacctctttcacctgtcatcagatgaggaccacgaggtgcgcaaaaacgtgtgccacggattggtcatgctgctggaggtgcgaatggaccgtctgatgccgcacatgtcgcagattattgagtacatgctgttgcgcacccaggacaccgatgagggtgtggccctggaagcatccgagttctggctttcactggccgagcaaagcatctgcaaggacgtgcttgccccttatcttgctcaattagcgccagttcttgtacgaggcatgcggtactcagaggtcgacataattctcctcaagggaaacgttgaggaggatgacatggtgcccgatcgagaagaggatatccgcccgcgtttccacaagtcccgtgcacacacaatcaggagtacacaagagggaggagctggagcgacaggcgatgatgacgacgacgaatttgaagatggaatggacgacgatagctcgctatcggaatggaacttgcgcaagtgcagcgcagctgctctcgatgtattggcgaatgttttccgagaggattgtctgcccgttgtgctgcccatcctgaaagagactctgttccatcaagaatgggtgatcaaagagagtggtgtgctggccttgggagctattgcggagggctgcatgcagggcatgatccaacacttgccagagctgattccctacctaattagctgcctttccgacaagaaggcactggtgcgctccatcacatgctggacgctctcgcgatacgccaattgggttgtcaaccagccgcacgaccagtacttgaagcctctaatggaagaactgctgaagcgcattctagactccaataagcgcgttcaggaagctgcgtgctctgcctttgctactctggaggaggaggcctgcacggaactggtgccctacctggagtatattctaaagacgctcgtctttgccttctccaagtaccagcacaagaacttattgatactgtacgatgccgtgggtactttggcggactccgtaggtcatcatctgaataagccgcaatatattgacatcctaatgcctccgctaattgataagtggaacctgctgaaggatgacgataaggatctgttcccattgttggagtgcctgtcgagcatcgccactgccttgcagtccggctttctgccctactgcgacccggtgtatcgaaggtgcatctctcttattgagcagactatcaaccaggaaatgctgtgtaaacaaaaccaaacgtacgaccatcccgacaaagagcgcatgattgtcgccctagatctgctgtctggcctagccgagggtttggatcgccacatcgagacattggtggccaacagcaacattatgcatctactctaccagtgtatgcaggacgttttgcctgaggttcgccaatcttcgtttgccctgctgggtgatttgactaaggcctgtttcccccacgtgcatcccttcatggccgatttcttccccatcttgggtcaaaaccttaacccagacttcatttcggtctgcaataatgctacttgggccataggcgaaatctgcatgaaattgggtgaggagaccaagcagtacatacgccttgtactcagcgaccttttcatcattatcaaccgcccgaacacgcccaagacactgctggagaacacagcaataacaatcggtcgtctaggttatgtgtgcccagttgaagtggctccttatttgcccgaatttgtacgacagtggtgcacatcgttgcggcacatacgagacaatgatgagaaggactcagccttccgtggaatgtgtcatatgatcacggtgaatccagctggcgtggtagcagactttatattcttctgcgatgccatcgcttcctgggttaacccaccagaggatctgcatcagatgatacagaagattctgcacggttttaagacccaagtgggcgaggagaactggcgtcgatttgtggagcaattcccgccaaccttggccgagcgcctgaccacaatgtataacatctaaggctagccatgccataaaacacccaccttcacccattagcgagccaagcagcaactttttaactagacaattatgtacaagtatgcgt

SEQ ID NO: 16527 - protein, 893 aa, DROSOPHILA
MTWEPQGEGLQQIIAILKESQSPDTATQMAVQMKLEEFNRYPDFNNYLIYVLTKLKTEDEPTRSLSGLILKNNIRMHGTTLQPEIVEYIKHECLQAVGDASPLIRATVGILITTIASNGGLHNWPQLLPSLCEMLDNQDYNVCEGAFSALQKICEDSAEILDSAALNRPLNIMIPKFLEYFKHSSPKIRSHAIACINQFIINRSQALMLNIDSFIENLFHLSSDEDHEVRKNVCHGLVMLLEVRMDRLMPHMSQIIEYMLLRTQDTDEGVALEASEFWLSLAEQSICKDVLAPYLAQLAPVLVRGMRYSEVDIILLKGNVEEDDMVPDREEDIRPRFHKSRAHTIRSTQEGGAGATGDDDDDEFEDGMDDDSSLSEWNLRKCSAAALDVLANVFREDCLPVVLPILKETLFHQEWVIKESGVLALGAIAEGCMQGMIQHLPELIPYLISCLSDKKALVRSITCWTLSRYANWVVNQPHDQYLKPLMEELLKRILDSNKRVQEAACSAFATLEEEACTELVPYLEYILKTLVFAFSKYQHKNLLILYDAVGTLADSVGHHLNKPQYIDILMPPLIDKWNLLKDDDKDLFPLLECLSSIATALQSGFLPYCDPVYRRCISLIEQTINQEMLCKQNQTYDHPDKERMIVALDLLSGLAEGLDRHIETLVANSNIMHLLYQCMQDVLPEVRQSSFALLGDLTKACFPHVHPFMADFFPILGQNLNPDFISVCNNATWAIGEICMKLGEETKQYIRLVLSDLFIIINRPNTPKTLLENTAITIGRLGYVCPVEVAPYLPEFVRQWCTSLRHIRDNDEKDSAFRGMCHMITVNPAGVVADFIFFCDAIASWVNPPEDLHQMIQKILHGFKTQVGEENWRRFVEQFPPTLAERLTTMYNI

SEQ ID NO: 16528 - DNA, 4006 bp, DROSOPHILA
aagtgaacgcctttcttcggtagcaaaattattatataatatataattaattggaatttggtttatttttagatctttggcatgatattctcctgtctactattcaatatgatcgaatagcgccaacgaggaggggaatcccatggtcacgcaggaaaatcagataccaaggtccacagtccagaagaaacacatttttaaacataattcgctggagttaaattaagagtattatctgagtgtatgctaatgttagatctgcacagatcaactgtccgcttgtattatgtattgtattgtatgtatatacgtgtttagatacgcataactagtgagtattgaacttagtagggattctattgttattatctgttgcataaatttgtattatttgtgtgaagttttgtaaatttcctcttaagccaccgttatcaacaacccattacaattgctagttttaagtgagcttttcaatacttaatagagaatttagatgtctgtccattgttgttttcaataaaaattagttaaaaccaaatacttcggaaatgtttatatatattaatattttttatttttaatccaattatcattaaacgatatgttgtgatatgagtataaaaaaaaaacgaaaaaggataaatatttaaaatgatctggtccatgaaatatgtccatgttacgtaaaaatttgtatttaaaaaacggtttaaagtattaaactgtttttgatcgaagctttaatctacatgcaatattgttgcatatttttaggttttttttgtcttaagtcacatttttgaagcgggaaaatagggaaagtatggatcacgctgtgacctgaaggtgtttacaaagtgaattatcatcagataatataacaacttttatgttatttaactgaaaataagttcgcactcaagcgactttaaagatttgaataaaaaagtattttctttaattaacttttattaaaaattattctactaagaacttacagctacaacagatttctgtatactaagcctataatactacccatcgcaagccataaattgatggagaaggtgccggaacctgattgcgtatccgtattattccaccactcccagtttccgttgtggaaagtcgggttagctcttgaatcagaatgcggaactcgggcgctgggaatcgcagtcttccgaatttgttccaactcatcggcaagttgctgcagttggagtggatacatttgggctaggttgtatcgctcgcagggatctttggccagatcgaaaaagcagggagccttcagtggttcacatttgaaatgagattccagaggattttgtccttcaatagggggacacgtttcggtggcttcactgcgcatctgtcggatgcgatccttagttaatccccgatttcctagtaggctttgaacatccgatgccaagacatgttgttcgtagctctcacccaggggatcgtcttcgttagtttccagttcacccaaccactgatcgtatcgtcctttaaagctgctcccgtttacatacttaagagtatccctcatgtacgatgagtaaccgaaaacctcatcgagtacatgaatcattgttcttggtttcggttcctcgttgccactcagcataggccacaaattaatcccatccaacggaagatcctgcggcaaggatacgccggcagctcctgccagtgtgggcagccagtctacggcatgtatcgcctggttggacacatatcctcgctccttaagcagcggactccacagtgcaccagccgatcgaatgccaccctcccacggcgattccttttgctgaatgtaaaataaggtgaataaatattctagtttcattgcttttatgatattcctggattacttactcctcgatagggatagttagaacccgcattggaatggatgcctatcgtgggtgctccgttgtctgagtagagcagaataatgctgttattcagcatgccattatccttcaaagcaccaattgtctgagccacgcttttgtccagactggaaatcatacctgtggtaaaaagtagtaacaagattacaaatattaatttgatttacaatatatgtacgcgttgtgttaactcgccagcgtaagtgcgtcgcttgggatccctgatgtggggaaatttggccacttcctcctctggagcctgcatcggactatcctcgttgcccgtatgcaccgccagatgactgagcaccatgaacaacggcttgctcttgtcgtgttgctcaattatcctttttgcttccgaagtaaaggcttcggtggcgtaagtgccattcgcttcggggcacggctccagatcccgccggaaatccagtccagccgagtagttcctatcgagcattcgcacctgatggtcgtagtaatcaatgtagccattgtagtagccaaagtgatggtcgaatccacgcattgttggcgtgagatccttgcgccagaagcccaagtgccacttgcccaccaaatgggtcgagtagcccgcatcccggaaaatttcgggcataagacgttctcgctgaggaaggccccacggctcatcggtgataatcacaaagtgctgcatgcctgaaaatattcggatgtaagccaattaaatgatttttcgttggtaaaacgtatattacctgtgtgtatgggatattttccagtgagcagagtagctctggatggtgtgcataggttcggaacataatgcttattcaacaggataccattgtaggccaaagcatctatattcggtgtaaggatctgattcgagccatgaaaactgacatcgttcatgccctggaaatgcaatggcgattagttacttttcgaaaaaagttttaatttattatcaaaaacttaccatgtcatcgattagtattataactatatttggttttgtagaatatcccgatccatatgccaggctgagtatggaactcactaccagcagaacgaggatttttccacttgtcatcgtaaatactcctagggcctagacagtccaataatcttcaaacaatttaaacagatttagtaacactacgtttcatcgttgttgttttttcaataatacgacgggttcgctgtcttaagatttgtcgtacatgtttcatattagcaaagagtcaataaaaatgactgagatgcgtcttttaaaactcttactctgcacacgccgaaaaacacaaaaaatgttgcaatatgtgaaaatgcctgcatgtaagagcctttttaataatattgcacagttaggcagtatctgttggattttccgcgcaataattggcaattgtataatcagccatcttccacaggcgctgcccccaaacttcatcccacttgacctattccattgtgtagtgtgccatatggccaaaaagttcattcaaccattgtcgttttattttggtggctttagcaacaatagttgggacattatataaaacgagaaacagttgcaagcttgtatttgggcttaccttcgccgtgaggagtgtaatttctttttatcatggctaaaactgtgttttaattgtcgcaataggccataaaaaagctggtaatcatgaaatcgaggcagataagcgagacaagccataaaatctatgagctgtgcaattgttttagcattttggccgagttttaataacgacacataatttgtatataaacaagaaagtcgtgcgaatgagatgggtattttcgtcacgacatgtggattgtacatgtgtaattgagaatgggaacgcccagcgggtaggaggtgaccttcacaggttgttaatatcgtgaccttgataaaacacttgtgatgcaattaagatcaagttaatcggtcgttattggaaaggttcttaagtataaagaccccacaactgcctccgactgatccgatcgaaacaagttttagtggaaaaatgttcgcgattgaaaagtttaaggattttgtcgatcctatactaaaaccaacttat

SEQ ID NO: 16529 - DNA, 1740 bp, DROSOPHILA
atgacaagtggaaaaatcctcgttctgctggtagtgagttccatactcagcctggcatatggatcgggatattctacaaaaccaaatatagttataatactaatcgatgacatgggcatgaacgatgtcagttttcatggctcgaatcagatccttacaccgaatatagatgctttggcctacaatggtatcctgttgaataagcattatgttccgaacctatgcacaccatccagagctactctgctcactggaaaatatcccatacacacaggcatgcagcactttgtgattatcaccgatgagccgtggggccttcctcagcgagaacgtcttatgcccgaaattttccgggatgcgggctactcgacccatttggtgggcaagtggcacttgggcttctggcgcaaggatctcacgccaacaatgcgtggattcgaccatcactttggctactacaatggctacattgattactacgaccatcaggtgcgaatgctcgataggaactactcggctggactggatttccggcgggatctggagccgtgccccgaagcgaatggcacttacgccaccgaagcctttacttcggaagcaaaaaggataattgagcaacacgacaagagcaagccgttgttcatggtgctcagtcatctggcggtgcatacgggcaacgaggatagtccgatgcaggctccagaggaggaagtggccaaatttccccacatcagggatcccaagcgacgcacttacgctggtatgatttccagtctggacaaaagcgtggctcagacaattggtgctttgaaggataatggcatgctgaataacagcattattctgctctactcagacaacggagcacccacgataggcatccattccaatgcgggttctaactatccctatcgaggacaaaaggaatcgccgtgggagggtggcattcgatcggctggtgcactgtggagtccgctgcttaaggagcgaggatatgtgtccaaccaggcgatacatgccgtagactggctgcccacactggcaggagctgccggcgtatccttgccgcaggatcttccgttggatgggattaatttgtggcctatgctgagtggcaacgaggaaccgaaaccaagaacaatgattcatgtactcgatgaggttttcggttactcatcgtacatgagggatactcttaagtatgtaaacgggagcagctttaaaggacgatacgatcagtggttgggtgaactggaaactaacgaagacgatcccctgggtgagagctacgaacaacatgtcttggcatcggatgttcaaagcctactaggaaatcggggattaactaaggatcgcatccgacagatgcgcagtgaagccaccgaaacgtgtccccctattgaaggacaaaatcctctggaatctcatttcaaatgtgaaccactgaaggctccctgctttttcgatctggccaaagatccctgcgagcgatacaacctagcccaaatgtatccactccaactgcagcaacttgccgatgagttggaacaaattcggaagactgcgattcccagcgcccgagttccgcattctgattcaagagctaacccgactttccacaacggaaactgggagtggtggaataatacggatacgcaatcaggttccggcaccttctccatcaatttatggcttgcgatgggtagtattataggcttagtatacagaaatctgttgtag

SEQ ID NO: 16530 - protein, 579 aa, DROSOPHILA
MTSGKILVLLVVSSILSLAYGSGYSTKPNIVIILIDDMGMNDVSFHGSNQILTPNIDALAYNGILLNKHYVPNLCTPSRATLLTGKYPIHTGMQHFVIITDEPWGLPQRERLMPEIFRDAGYSTHLVGKWHLGFWRKDLTPTMRGFDHHFGYYNGYIDYYDHQVRMLDRNYSAGLDFRRDLEPCPEANGTYATEAFTSEAKRIIEQHDKSKPLFMVLSHLAVHTGNEDSPMQAPEEEVAKFPHIRDPKRRTYAGMISSLDKSVAQTIGALKDNGMLNNSIILLYSDNGAPTIGIHSNAGSNYPYRGQKESPWEGGIRSAGALWSPLLKERGYVSNQAIHAVDWLPTLAGAAGVSLPQDLPLDGINLWPMLSGNEEPKPRTMIHVLDEVFGYSSYMRDTLKYVNGSSFKGRYDQWLGELETNEDDPLGESYEQHVLASDVQSLLGNRGLTKDRIRQMRSEATETCPPIEGQNPLESHFKCEPLKAPCFFDLAKDPCERYNLAQMYPLQLQQLADELEQIRKTAIPSARVPHSDSRANPTFHNGNWEWWNNTDTQSGSGTFSINLWLAMGSIIGLVYRNLL

SEQ ID NO: 16531 - DNA, 5981 bp, DROSOPHILA
ccgcgtgcctcttaatttcggcatccacccatgtaacaagggactttcgtgcctatcttgctcattcgtgacacgaacatcaagaacaactcggctgctcatcactggtgtgcgctctgttccgaattaacggttgtgctgctttcctattggtcaattggtaactggaaagatcgaaagggctgccagctgcagcttgctagggattctgttggcctagtgtctgggacccgacagttgtctgcgaaaaatgttgccccgtcgtaaattttgtcaaaaatttgtgaattctcagtggctgaacaccaggcaaacaaaaattgccacatagggcagacatcataaagtaactaacggtttctccccatctttggcttcctattggtcgaatgggctgactggaaaagcgtaaggcgcagccatcttgaaaaggatcagctgttttagttaatttgagcggccagctagcacctgttactgtttctgttcgcctggtgcctgaaacttgtaaaggtggcaatttcgaccagagaaattacgattttaaacatcccatcctttgtacgacgacgtagatcgactacgaaaatgtttaaataaatacaattaacatcaatttgtaaaaagtatatttgtatataagcttttatatataatgtggattgcattaatttgatttgtttttttgttagtgatttttaaatcgcggggagtcgcgaccgatggatgtgtgtgtgtgtggtgatcaagtatttagtacaactatttcaaagtattgggttagcatatgaattatatggttggctggcgttgagcaaaattaaaagatgtgctaaaatagtttgttgaaattaagttaaaatgtcaatttaagttttaatatttaaaaaaaaacaatcataaaatagtcgaacgtgcgccggaggggccagtgtgtggccttctgcgccgaatttttagttcttgccttaagtctagtctgcccccataagccccgtgtctatgtctcgtgttctcctccttcgccccctacgcaaccttccgtggtaacagcagtctgctgctcggctgactgcagttcagggtcgtccatgacggccttgacctggctgattttcgagcgcttcgtctctgccattgtacctagtccgggctcgtcgccaaagctcagcatgcgcttgccgccgcgtaccttttcgttcatagcctgaaggtcctgcgggtatagcaagcggattaatcgatgttatagctgaggaggtggacgcaactccgaaatatttaccttggcggggctgcggcaaaaactgtagaccatctggttgggcgactgctgtatctcgttcttggacatctgcgacacgaacagcgagtggctctgggttaccttcttgggctgggcggcccgttccttcggatgcggggagagctgtagatccgaagcccggccactcacgtccggagttacgtttaggtagtcgatgacgaactgccgcatcagcggcacgtaagtgtggttgtaaaagtgaatgatgtccttcacctttggctccccgtcctcgttgatgtcgatgaacacctcgcggtagacgctgttcaccgcctgcggctggttgcgatatgcccgcataatgtcactgaacttggggtcctccattcgctttacctgcgggttgtaaggagttgcatggatgttataagtgggtcttcagctgcacacggacgaatgcatctgattatgtgcatttcaaaatgtatgccagcgaatcggacagagatagaatgtggatgtgctactcactcttatgtagatatatattgcacacataatattttgatcgaggtggcggtccttcatcaattccgtctcgtgggtgatcgagtgctcaaagatgtgccagatgctctcgggcgtcttctcgcacagtgacagctccgagcacagcttctggatgcgcaaccagccaagcaggtacaccttgcgcaggaatatctgcaaggggccggcggcgcggtcgaggttaaccatgagccacgtgggcaacggcagttgggcggaggcgatcatttcccagacggtcgagttcctcgcccaggccagccgctccagacacgtctcctcgatggagttaaggtgctttatcagcgaccggttcaaacagccttcgtgcgagccgtgccgcaccacgatctcgatgatcttttggaactcgaacgcgctaatactgaaacagtcgagcacccacgggaacttgagctccgttttgtaggcctccagcaccagctccacgcagcaggccatcagcgtgatgttaaagatgaccagggagaccttctgcaccagcagtcgcttgagatcgatgtcgggcttgttccgaatttccgcctgcaggatctggtcgagcaggtagaagaagaaggacttcgctagttggaagcgactcttcgcctccgttgacgggtacttggcgaggaatttctgctcgatctcctcgatgatgctaagcagcttggctattacctcttcgccagcttgcctggataaagacagggcgatatcaaaacatgagctatagaaatcaatcccggatttaatctaatcgattcttcttacatcaacagaaatttctatggatgtgtgcttcggctaacgaaattcgatattcgatatttcctacgatttataaagcaatcaaataaacatgagttttgtttacacgacgccaacgactttcagccatttggacatagagataagccttttctctctcacaggttttgaatgatagttaggaacactcgacacccaacccaaatacaaggccagccggcaactcacttgacaaagtccgtgggttctgtgatccgtccgaaggcgctcagctgcttcacgttgttagtggcgttgcggacgggctcaaatttatcgccagccatcgcgggctgcgcaggcagatcttgcttgcgggtaagcggagtaaccggcggacgcagggactggtcgttgagggcagtgtgttcccccgcatcgtaggcactcagaatgcgttcgtcgaattcgccgacgctgaggacgtactgctcgtagctgatgttgagggactttaggttgcgctcgaagttttcgttagccaataggcctaacatagtgtccttgttgccgtagatggtctggtcgaaatgaaaatagaacaaattaattgttttaatggaaatccgaaacggcactcctaccgaagcctgaaagaagctcgacatgatctggcggaaagtggtggccttcatggctttagcctcctcggtcatgtcacagaagttggacaaaatgcagtgcggattgtgacgaaagtccagctccgtccagttgctcggcaggccctcgaatttggggttgatgagatcggtgcgcttctcggccagcacattgttgtatatcaggtctatgcagcaaatcatcagattgtaggatgtcaccaggtccacggtgttgctcggcttctggttcttggcgcagagaaacaggcgccagcagatgtcgtccagcttgatgtacgagcactttccgtgggcgtggttgccatgcagagaactgttccaaagagggaagctttttatatacacggggtcaggctgacatgatgatatacgcacatgtacttggagtgcttcttctcgttgggcgggcacgagaagatcatgtccataataatgcggaaacgcttgtgcagcatgaatgtaatgctgaacttgcggtccagatcctcaatctcgttgacaaactcctgaggcaggttggccatgtcgcaccactgcttaattttggtcttgaactcgtagatgctgtgggtggggattgtggaaatggttaggtgtgaaactgcaggcataaacggcaacccacctcatcttgcagcagcgcagcaaattgtttaaggacacacaattacccttgaccactgcattctggccagtcaccgtgggtgtgctggttcttcggcaggccgtgtaaatggcgcagcacatccagtggctggctgtgcccttttaggcaggcaatgcacagaaagaatgaaagaaaggacgttaggttggaggctactgctgccacttcgaagctcacctccatggagcacctctgggacacctctaagtacgtctcgtagccctgcagctctgtctgccgatccatgtttagatcccggcataggttcgtgtactcggcgttgatcatctccaggcggtcgtcgctggtcgccaccaatccgctgaccacctcagctcccagttcctgcgggtcaggctcgctcatgtctgcgaatgatgtctctgtcccggctgattgcgtatgcttgcagcggcggccgctgcttctggcgacagcctggagtcggaaatcggagacggaggcgcctgaattggagctagccggctaaccggggcgttgcgggcctggcgccgctgtttacgtctagtggcctggcgcctagtggctgccggtgtatgctgcgcttgccgccgcgctcctcgcggacatgtaactgcgagagcttacacttaattacagaaataatgaagtttcccgccgaaatgatttgggcgtgtgtgtttgtgtgcgagtgtttgtcgcgtgtgtgtgtgttcgcgatacacccttttctgaggaacacaacaaaagagcaggcgaggggacagaacaaacagcgctgggatgctgcgattagccaggaccacaccacggccacggttgttggttaaaacacattaacaaaataactatttcacaacttaatcgccatggaaaacgcgggaaacttgactagttgcggcgggcaggtgcgtgtgatccactccgcgttcgaactatccacttctagggctgcgcggacgatgtggccctagggatggacttgtgcagaaggaaaactaatttattgccactacttaaagattttgcaattgcgattgcatagtcagagtctgacacgttaatacaagttaatggatttttagttgggcggccggtatttcgccagcaaagccatgcggtcacaccgacgcgcgcattcggccagtttaaacgtggtggggtggtattactacagtgcttggcgagttatgcagtgactgcaagcagtatgtcgtgttgcatacatacctaaattgggggaccctaaaatgaattagaacgaaataattgacaaaaatatgtgtacacatataatttatttgcaatgcacaatgctatttgcatgtgtgcggtaaactgacagtgttggttagcgttcaagagcattgcacatcggcgatatagctagttgtaatcgatagccgcaaatttaaatactgctttgaactttatggaaattcgcgggaattcttcgcgattcagctactaacatacatacatatacactatacaatttagagaacttgctgtcgcagcacatacgacccgagctacgacgtggctaacgtagataccgtcttctgaacctcctggccaggaggtggaatagcatgtgtcgccgcataaaggccgccgtcagacctgccgccgtggacagctcgtggttttcttgagaatcgctggccagactggagctctcgaaggaattggaggaattgaaagagtcagaactctctgcctgcgtattctgatccgcaccagttctagcacttctccaaatgggtgttgaagagccgtcggacttacagccactggtgttggttctggagttcgggatctgggttctgtcgggatgcttctccagcacaaggcaatgctgtcttttgaacggttgactagcagacacaccgtacttggctatcgcgcggttgagctcaggatcggggatgtatgcaccgcgcgacaaagactccgtttttccgatcgattttcttttggaaatatacccgctgacatatctttttggtctagagaaacgtctcgcggaggttgccttctcaatagtcaatttcct

SEQ ID NO: 16532 - DNA, 3210 bp, DROSOPHILA
tcagactctgactatgcaatcgcaattgcaaaatctttaagtagtggcaataaattagttttccttctgcacaagtccatccctagggccacatcgtccgcgcagccctagaagtggatagttcgaacgcggagtggatcacacgcacctgcccgccgcaactagtcaagtttcccgcgttttccatggcgattaagttgtgaaatagttattttgttaatgtgttttaaccaacaaccgtggccgtggtgtggtcctggctaatcgcagcatcccagcgctgtttgttctgtcccctcgcctgctcttttgttgtgttcctcagaaaagggtgtatcgcgaacacacacacacgcgacaaacactcgcacacaaacacacacgcccaaatcatttcggcgggaaacttcattatttctgtaattaagtgtaagctctcgcagttacatgtccgcgaggagcgcggcggcaagcgcagcatacaccggcagccactaggcgccaggccactagacgtaaacagcggcgccaggcccgcaacgccccggttagccggctagctccaattcaggcgcctccgtctccgatttccgactccaggctgtcgccagaagcagcggccgccgctgcaagcatacgcaatcagccgggacagagacatcattcgcagacatgagcgagcctgacccgcaggaactgggagctgaggtggtcagcggattggtggcgaccagcgacgaccgcctggagatgatcaacgccgagtacacgaacctatgccgggatctaaacatggatcggcagacagagctgcagggctacgagacgtacttagaggtgtcccagaggtgctccatggagggcacagccagccactggatgtgctgcgccatttacacggcctgccgaagaaccagcacacccacggtgactggccagaatgcagtggtcaagggtaattgtgtgtccttaaacaatttgctgcgctgctgcaagatgagcatctacgagttcaagaccaaaattaagcagtggtgcgacatggccaacctgcctcaggagtttgtcaacgagattgaggatctggaccgcaagttcagcattacattcatgctgcacaagcgtttccgcattattatggacatgatcttctcgtgcccgcccaacgagaagaagcactccaagtacatttctctgcatggcaaccacgcccacggaaagtgctcgtacatcaagctggacgacatctgctggcgcctgtttctctgcgccaagaaccagaagccgagcaacaccgtggacctggtgacatcctacaatctgatgatttgctgcatagacctgatatacaacaatgtgctggccgagaagcgcaccgatctcatcaaccccaaattcgagggcctgccgagcaactggacggagctggactttcgtcacaatccgcactgcattttgtccaacttctgtgacatgaccgaggaggctaaagccatgaaggccaccactttccgccagatcatgtcgagcttctttcaggcttcgaccatctacggcaacaaggacactatgttaggcctattggctaacgaaaacttcgagcgcaacctaaagtccctcaacatcagctacgagcagtacgtcctcagcgtcggcgaattcgacgaacgcattctgagtgcctacgatgcgggggaacacactgccctcaacgaccagtccctgcgtccgccggttactccgcttacccgcaagcaagatctgcctgcgcagcccgcgatggctggcgataaatttgagcccgtccgcaacgccactaacaacgtgaagcagctgagcgccttcggacggatcacagaacccacggactttgtcaagcaagctggcgaagaggtaatagccaagctgcttagcatcatcgaggagatcgagcagaaattcctcgccaagtacccgtcaacggaggcgaagagtcgcttccaactagcgaagtccttcttcttctacctgctcgaccagatcctgcaggcggaaattcggaacaagcccgacatcgatctcaagcgactgctggtgcagaaggtctccctggtcatctttaacatcacgctgatggcctgctgcgtggagctggtgctggaggcctacaaaacggagctcaagttcccgtgggtgctcgactgtttcagtattagcgcgttcgagttccaaaagatcatcgagatcgtggtgcggcacggctcgcacgaaggctgtttgaaccggtcgctgataaagcaccttaactccatcgaggagacgtgtctggagcggctggcctgggcgaggaactcgaccgtctgggaaatgatcgcctccgcccaactgccgttgcccacgtggctcatggttaacctcgaccgcgccgccggccccttgcagatattcctgcgcaaggtgtacctgcttggctggttgcgcatccagaagctgtgctcggagctgtcactgtgcgagaagacgcccgagagcatctggcacatctttgagcactcgatcacccacgagacggaattgatgaaggaccgccacctcgatcaaaatattatgtgtgcaatatatatctacataagagtaaagcgaatggaggaccccaagttcagtgacattatgcgggcatatcgcaaccagccgcaggcggtgaacagcgtctaccgcgaggtgttcatcgacatcaacgaggacggggagccaaaggtgaaggacatcattcacttttacaaccacacttacgtgccgctgatgcggcagttcgtcatcgactacctaaacgtaactccggacgtgagtggccgggcttcggatctacagctctccccgcatccgaaggaacgggccgcccagcccaagaaggtaacccagagccactcgctgttcgtgtcgcagatgtccaagaacgagatacagcagtcgcccaaccagatggtctacagtttttgccgcagccccgccaaggaccttcaggctatgaacgaaaaggtacgcggcggcaagcgcatgctgagctttggcgacgagcccggactaggtacaatggcagagacgaagcgctcgaaaatcagccaggtcaaggccgtcatggacgaccctgaactgcagtcagccgagcagcagactgctgttaccacggaaggttgcgtagggggcgaaggaggagaacacgagacatag

SEQ ID NO: 16533 - protein, 845 aa, DROSOPHILA
MSEPDPQELGAEVVSGLVATSDDRLEMINAEYTNLCRDLNMDRQTELQGYETYLEVSQRCSMEGTASHWMCCAIYTACRRTSTPTVTGQNAVVKGNCVSLNNLLRCCKMSIYEFKTKIKQWCDMANLPQEFVNEIEDLDRKFSITFMLHKRFRIIMDMIFSCPPNEKKHSKYISLHGNHAHGKCSYIKLDDICWRLFLCAKNQKPSNTVDLVTSYNLMICCIDLIYNNVLAEKRTDLINPKFEGLPSNWTELDFRHNPHCILSNFCDMTEEAKAMKATTFRQIMSSFFQASTIYGNKDTMLGLLANENFERNLKSLNISYEQYVLSVGEFDERILSAYDAGEHTALNDQSLRPPVTPLTRKQDLPAQPAMAGDKFEPVRNATNNVKQLSAFGRITEPTDFVKQAGEEVIAKLLSIIEEIEQKFLAKYPSTEAKSRFQLAKSFFFYLLDQILQAEIRNKPDIDLKRLLVQKVSLVIFNITLMACCVELVLEAYKTELKFPWVLDCFSISAFEFQKIIEIVVRHGSHEGCLNRSLIKHLNSIEETCLERLAWARNSTVWEMIASAQLPLPTWLMVNLDRAAGPLQIFLRKVYLLGWLRIQKLCSELSLCEKTPESIWHIFEHSITHETELMKDRHLDQNIMCAIYIYIRVKRMEDPKFSDIMRAYRNQPQAVNSVYREVFIDINEDGEPKVKDIIHFYNHTYVPLMRQFVIDYLNVTPDVSGRASDLQLSPHPKERAAQPKKVTQSHSLFVSQMSKNEIQQSPNQMVYSFCRSPAKDLQAMNEKVRGGKRMLSFGDEPGLGTMAETKRSKISQVKAVMDDPELQSAEQQTAVTTEGCVGGEGGEHET

SEQ ID NO: 16534 - DNA, 2589 bp, DROSOPHILA
taactgtagaggggaaaatgggcttaattcaaggactaataaattaataattccataatatattttaaaatgaaacgtgtaagtacaacattaattttttatgtatataaaatttaatacttttcagtaaaatatggacatttaaaacagtttcggtgtaagcatttcaaattaaaaactccagaggacgagagctgcagttacaaataaaattcgtgttaaaaatgtttaacttgcattcgtctcgattttcttacgtcgctttagtgtgtttaattccctagaacttcataaaagccgtaaattgcacctgaaactgggtagaacttcataactaaatcgggtttctaaaaatccaattaagcgtattcagtttatggttggaagcagacacaatcacttgctgaaatctaaagaaaccaaccacatggagccgttcccaaaattcgttataatatttctagctgcctttatcaatgtggcatatggcatgcataatccaatgatgcgtgatagtgagctattctaagacatatctatataaaatatgaactaaaatttattttcatatattttagattgtaatttgggagagcatctaacttgtaggcttaagtttattcactgttggctgtacgcgtgcgtttgtcttccgaatcactcttacttgggacttggaaatggatgccttcacatcagatacgcttaaatataagttatgaaatctatattcgtttcttcattcatcttgaatcatgtggatatgattttcctattttattgtcaaaaggaaaatggtcttgccacaacacatatgcatgaacatcctcaactgttaataaacattgaaaactatcctgttttttgaagtaacaactccttggtcacaattctcaaatatataatttacaaccgtcgtaataaaacgcataagactttcagcttacatgctaatcacgaactactactttatttgcactgaacggcggggagaggatgactacttcgctttgtccagaaagtctttggcctcgttgatcttggccgccaaatagggagatcctcctcgatccggatggttcaacagcatgatcttcttgtgcgcgtccttaatctgtaaacaaatataggaataagaatatttgtatttaagccaaaggagtatttgatttaagccaataccataaatattatataaacaaatttgacaatcacaggaactacttagtttcggctttttcattgcttggaatgcctttatagaagtatacagctcggacttctgagagatcctaagcaagagaactccacattacctttatcttggacgcactggggctgacacctaggattagggacgcctcccgcttgttcatcttgggatcgaagccgcccttgtagtatttggaggcggccatgctctccgcatcgtatttgggcaggttcttgagggcctcgttgaatttggtggtcatctggggcatgcggcgcatcaggtgctttccggcgaatcccacggcggccacgctaagacccgccagaattacggagctcgccttcggaatggaataattcgtattggtcgacatcgcacggacaatttaatattatgaaacgaaagagattcgcaatattttacatttgttttttgattaaaacaatgtgatttaacacagtaccatttttatgtaattttaacagctgtaagtcagtggaactgcatagcctgctgtcagctgttggattatcgatagactcagggttgtcgctctattgaaaaaaatattgctaatttaattagtattttcatttaatactgttgaaattatagttaaatactaattaaaaggataatttgtatgcactatgcttttatattatttgctttaatatctacattttaaatccccatttactacgacactgcaaccaagctgctgattgtcaacaaccagggctgcaggctcacaacagcagttgttaaaacgatattaaggtgatctatcaccaacagtttgcagctgcaaatacattaagtgcttaaaccaaacaggtatttctagaaattcagtgaattttatatcatgctcacaaaatcggcgcatctgctatcgaatgtgtgcgcagacgttgcctatcgataacaatcaggtcgcatcgataacgggactcaacaaagtgcacaaacaagtgaagaagaagcaggaaaaaattttgatgtgcaaagtttggaaaccaaataatattgattgacgaaagtaagagttacgaaattggtgatctccacatcctgggtggcgtggtggtgtgcgtgaatgatcgtcagcgtaccgctaatcgtgagcgtgcgtgcgtgtgtgcgtgcgtgccgtgtgtctgtgtccgtcggtcgccgagagtgtgtgcgttagctcctcagctggggaaaaacttttggaaaattagcagttctccgagataaacagccgtcaaactggagcgaattccggaatatctgcgcgacactgtcgattggcttatggggtgagtaccgttacaccactaaagacaatgtaatctatggctcgaaagtgttagtcccgaaaaaaa

SEQ ID NO: 16535 - DNA, 387 bp, DROSOPHILA
atgtcgaccaatacgaattattccattccgaaggcgagctccgtaattctggcgggtcttagcgtggccgccgtgggattcgccggaaagcacctgatgcgccgcatgccccagatgaccaccaaattcaacgaggccctcaagaacctgcccaaatacgatgcggagagcatggccgcctccaaatactacaagggcggcttcgatcccaagatgaacaagcgggaggcgtccctaatcctaggtgtcagccccagtgcgtccaagataaagattaaggacgcgcacaagaagatcatgctgttgaaccatccggatcgaggaggatctccctatttggcggccaagatcaacgaggccaaagactttctggacaaagcgaagtag

SEQ ID NO: 16536 - protein, 128 aa, DROSOPHILA
MSTNTNYSIPKASSVILAGLSVAAVGFAGKHLMRRMPQMTTKFNEALKNLPKYDAESMAASKYYKGGFDPKMNKREASLILGVSPSASKIKIKDAHKKIMLLNHPDRGGSPYLAAKINEAKDFLDKAK

SEQ ID NO: 16537 - DNA, 10807 bp, DROSOPHILA
tgctctaactaggccacacacggaacagggattggaaatttcactttgagctgcaaagttctggcgatcacctccacctctcgcaacgcggcaaaatatcaactgaatattttcagacctcgagtgtgttatttgcgttaaaagaaagagtcgcgaatcgctgcgaagagaagaaagagaaaagaaatactaaaagctcgctccgaagctttggcgacgcgagcatgattcttctcatatacagtatatagcatttgaattgattaaatgctaatttagcatgctgtggtcgttgccgccatcggagatcttacactgaaacttgaaaagcggattctgaatatcaattcttcttgaaaaaaggcttttatatgtatacatagatctatagcttcctaaaaatcattgcagctcattatcaaacatgctttaatgctgattcgtctgtataaatatttaattattgtctaccaagtcattggaaaattttcaccactatgcttattcgccaacactctcggaatattttattttttccatggtctatttgtataatttcttaccttaatgccaagaccatttgaatatttataccctgtcctttgctgttttgttctcttatcaatgcccttcgcattgaccgagttttcagatttccttgcctttggcatcattaatccctttcaacatggccaaaagccattcaaaactgaattgttgagagctgtcacttggcattttattgccatcagatagctgtactcacaacaaaattctacgacaacccaaccgacaaagcccacacgatgatagttaattaaaaagttgttggcacactcagaatatcatgcaaaattagcctggctaactggccttatcataattatcagcaatccccaaacaaaactttacaacatgataattattaaataaaaagcaaataaccactaacagtagaaccgaattaacatttgtgagctcagaaaacaaaagcaaaatacaggtgaaacaaaatgcagcagcatccgtttactaatttatacgcaatctcaaataatttacaaaacaaatggttaaccgaaagaaatattttaacaagctttcttgaggcattacaaaaattaaaataatatatttcagacagagcaagatatctatttaaatattattttatacaaaatgaagcaattgttaaacaatttggacaacgcatgcaatcgaccctatttgtaatttaattgatcaaaagcgaatgtgtcttaaagcagtacctctctactacacgcttgatgttaaattgaatttttgcaatttttatttttccggttctttaaatataatataataataataataataatttttccagctgatttttatttgtagttttgtttttctttgtatttaaacttattatgttgatgctgttgttggtagctgtctagcttttaatgtttaatgcttacatcattttttcagtaattattattaaattatttccgtttatgctgttctgtttctgttcggtcaaacacacaattaatcgcatgttcgccaccaatccgccagttgctgctccaattgccactgccacagctgcagcggctgttgctgctgatgttgctgcagctgctgatgttgctgcggccccaaggacgcctttgccgctgccgttgctcttggtaccgccgccaaatttgctgctcctaatgctaatgccgctgcgaaggcggtagcagcggctgctgcggcgaaaatgactgcggcagttgatgatcttgctgttgttgctgctgcagctgctgctgatgatgttgctgctgtggcgagtgttggtgttgtgtttgttgctgctatggtggtgaccgcagttcctgctgatattgtggctattgttgtggacaacagcacggcggccattgccacttacaatgacgctgctgcagctcctcctcttctgaatctgactattgtaaactgttgatgttatctttgttgcttttactgttgttgttgcatctgcttttacttctgctattgttgatgttgaatttgctgattctgttggactgctgcaatctggaacgcatcacatagcatactttctagtccactctcgtgccagctcattgtatttttcccgatcggttttatatattctggcaatctctggaacaagaggatcgtctggattgggatcacagagtagagagcaaattgataataaaactgaaagagaatatggaaacacatgttagtatcattttcgatgtaagaactttagatgaactcaccttttgaaatagttaatgctggcgaccactgagatcttaatatatcgagacaaatcgatccattgctgttgatgtttggatggtatatgcgcgttgtaaaagccactttgggtggtttaaagggatagtctgttggaaaatgtatagttaagaagaatacacctccttgataagggctgtccggctgtaagaaaattgataacaaatactattagtacaagaacactagtttactacacacctagtttattttattttggtttatttggaggtcaaatcatagattgcgttcacttgaaaaatttggttaaaagaatgctttgaaataataagaagttctgaagtaaattatcgcgagcttcagacgcatgccacaatgtttacacgtttaatggattgttctacacatgtactggatttctatttaaacacacgattacaaatgtacttggctattatatattatctatcatttcaaagcatctaatcaactgacgtagcttatttataaatacaaatagagtattgttttattattgcattctaatttacattaatgatttattaatctgctatttttaactgtatacggcaatccctgatcagaccaaaaataaaccaatataaaatatttcaggctacaaattaagatagaatcgattcgatctttcggtgaagtcctcttaccgggcccattattgtagcttgccagtgaaatactgtaagaaaacaagagatacattaatcaaaactgttaaaaacgtagttgtgatataatcctaaagagcaaacataaactgcgctgcagttaaacgttttctgtttgctttgatatgagtcctatatctacctatatctgccctagatgggaaattactgtgtgtacgtaaagcatcttggatatttacatttgataatgagatgatgacagagtatattaaaattttcccttcgctcaaaactaaaacgtatttttccttgcccaagttatattcaagtaatgagtttagatacaggaactgatttgctaaataactaggtaaataaaattaagcttccaacaagccacagaaatgtaatcttcttgtagtacaataccactttcccctagttcgccacgtctaggccccactgtatatgcatccaatgcagcaaactcgctctcgtctaaataaatgcaccactctctcagcgccgcccaccaccccacttcaccacttccattctcatggccacgctctttagcgattcccccccacaaaagaacaaacacaaacaatgccagccaaagagccttggcaccgacaattggcagcagcgtcagcagcagaaaaagcaccaaatgctctcccccttgaaacaaaaacaaagtttttaaagtaaggaatatacctataccgagataccctgtaaccaaccaggctttaaagcacacatacgaaaaattcatttctatataaaactgagatatttttataaaatcatgttttcttaatggtggaacgcaatatattcgatttttcaaccgatttcatgctaaacaaaccttgactattattggcatacatttccatgagttctatatatcctttcacactgcagaacatcacatatgtatatatatacccttgtaccctgtgagagagcacaaaacgtgtggcagttggctcagaatcatggccaaaacagagctactggctatgccgtcaatgtcattctggtgaacgaatcgaatgcgactgggaaactctctctgttgtggcagagcactgagaactgaactgggaactgggccctcggtaaccagctgctgccttgaccataattacacgaaatgttcatttgtccatctgcagtagggagtttgggtctggaaaatgcgtcggcattgtttttgtcatagctcagacgaaagtaatctcatagctgcagccattttgattaataccacttagacaacaatcaataatttctgagcattgctaaggcaacaaaaaccctgcaaccagatgatattaataaaagcaatgcatatttagataaaaacatccttagtgcatttaaagaattgattaatccgaccatggtagcttagctcaaaagcattcaatcaatgttgagtttaaatgtttaaatacatgattaaatcataaggtttcctttgccatactacaattacaatggattaatttcacacacatacacacacacacacacacacacacagcgccacactgagctgaaaatggatgggagtttccattgcactcgagtgaaaattcgccacccacccaaccaacacctaaaaaaccaaagtaagccccgccctgagctgcaattcctttcttttaccccagttgctgggaattcgaaggcaagggttcggaacagccaaattgataataaaagcaaagtgataagaactgcggaaattattgagctgactcctcaataatcatagaaatattcacgcttatatacaaacatacttttaattgtatataatagcgacgtttaaacgctgttaatagaaatcgagtgaaatcgccacactggtcgttcattatcagcaaacgatgacaattattaatattattatttactctgcctcgcgggaacttgaatgagtttgatttccttacgaccagagaaactgggaaatgaaacacaaagaaatgagctaacgaaagtgctgggatatatataaaatatttcaatattttgccgttctgtataatattttcatttccacaaaagtgcgttcactaaattataatatatatataatactgcaaagcattacgaacaaaatttctataagttcctatagttaaaacaatagtttatatagctttttgcagaataatttcagttcctagccattttccctaaaactaagtatttagtttgccattttctttttaaaattttatcgcttacaaagtatgccggtgttttttttttttaaccgaaatcgtcgtcagcaagactatataatttacgatttcactttttgtgacgtcattggagagtgacccccatatggctggcacctcttcctcttcccgcttgagtggtgaaggggtgaagggagggggggggggtgcttttcagtaacggttgtctgtatgcagtacagctctacgtgctataacgtaaccgaatccgatccacaatcagcgtgaatttgttggctaattgcatgacggcttcgtgagttttttaaatcgagtttaagacagcgaagaaaaaagaaccaagtcatggcgatcagctgtttggaggccgtcgctatcacaaaataaaaagaaccgaatccaaacttggcgcaaaagaattccaaattagcaaagtccaaactaaaagtaacagccaataggaaaacaaacgatgtacaaatttagtgtgttatatgcctagtcacgatcgaaatctatgacgtggtgatggtcgatcgacaatatttgcattttttattaacaattccgagatagtggtattgtgaattttgcctaatatatatatagttcctattccttgcatcagactatatactatactgactcagacttggcaactcagaaatatttcacataatttcatgtcttggagctcccacacgatatggtgaaatcgaaacttgggttaaagcccccccaacataatacaactgactcacggcaaatcaacgagttgttgaataacattagcaatacttacaatcatctccaactggaccggctgaacattgtgcaggtggatctctgcccagatcttgcagttcctgttgaacaaagacattttcaaattagtcattgaaataaaagttaaatataggtatgtaagctcagtcaatttctgattgtttttaacagttatgtcaagtcctacaaaaagaactggtttttaaagagtatatctaatttctagtcaaaccttatatactacctactttctgaaagcataggtaacaaacctagcaattgcaatacaggaaaccccaaaaagaattctcgaaatgggaaatggtcaaaagtgcatttcatggatatctgcttatgttttccggtagtcggttcttttgttttgctctatgatccagctatatgtacatacatatgtatgtatgtaccacggttttccgggtgtgcgtacattttatgctgtgtggttggtatgcaaatgatgtaaattttaaatgcagaatttaaaaacagatatgtggggatacaaaataaacatttttatgcgagagcttcgttcgaagcgagtgcgagcgagagggagagacgtgaaaaatcaagttcgttggcccggaccacaaatggcgctgtctccttctgccccaccccccgaccagtcgctccatccctgttgcactcgcacgcacacagctgagcggctcccctccctctctcttacactccgactcttcttcacttatcacagctgccccacacacacacactccaaacggggagagagaatgaggtgtaaggtaaaccggcaaaaaaaaagaatatatatataaaaagaataatgaagatgagctgcgaaagagtagcgcgactcagtggagaagtaagaggaggagcagcaggaggaggaagaatgaaggagagtgagaagactgagcttcagtgtatgcgtgtgtttgtaacggcaccacaaaatcagagtggagcacaacaaaaatagccgtcgcgaaaaacaccgtgtttctttgccccatctcacttactcattttgggaattgtacctgttgagcaaaaataaattacaagaaattgttacatttcttttttcgttgggagtcggagcggttatgactcatatcagacgaacaaatgaagtaaaaacaaacacgcacacttgtgcacagcaagaaaattcgataatattatcaatattagaccaggtgcactaccaatacaaacttctatttaattcttattcgaataattaatattgtgaactttaagaattggttcagtaagactaaatgccatatgcattggttctaaagcccatttcgttcagtgtacggttcaagtgagctccgatcggcgtttaagccgttctctctcgctctttaactctcttttttggcaaatgaggccatctagagaaaaaaggcttttgaagaattgaccacaaaaagggggcgtgagtgattttaagagtttactacaatgtatacttttatttccggtttgccgcttgccatttcgttttcatttaggcaggcattaaaatgttataatggatagaaaactacgaaaaacgaggaaaactcaatggccatgacgccgacgcaggcagcgctgcttttgtcgagacagtcagcagacccccgccccacacattcaaacacaaatacacaccacgctcacacatacgcatagatatgaacaaattccgcattcgctgctcattttgtatgtaaattatgcttaattataatttataactaattatttgggggcccccttttggctgacggtgttttgcaacactaagccccgctagcactcacacacttgcgctctctttggctctgccccattgcgcgagcgggaccgaatgaggcctcagctgtcgcgggcaaagggaatgcgccagggccagagcgagatggcatgcaatggccatagccaagtgatggcgagactttgtatttgcgagcgttttaatgtgtgtgtgtgtggggtatgactatgataaccggcttcaaacgtaaaaaaagatcccaatttgccaagtaacatttccacaacttcgagatattactaatgcttttgaggaaggctgggatgactttgaaaaaatatcgggttgtcagggccttgaacattggggtgtaaaaaagcatttactggacaaggacaaacgacgcgcaggcactttaaaaataattatcgaagcacgcacgctagaaccactctacctaaatacatatataaatatatatgcttgggggcagcactatttctgaattatcagcgcaaaaagtagggttaggttaattttatacgcttcttgcttttgctctgttttattttttgctggatctttctgcggcgctggcagtgtgtgcgtttatgtgtgactgttgcgaggctgagagtgtgtgcgagtgccgtgtacagcgtgtattgggtaacagcgcccgtagagctgcgaaaactccgccgtatagttgcattaatgtaaatgcatccaggtgcccggcacacacgcacacaaacaatgcacatttgcattgcactttcacgcacacgcatcgcacacacacttatcccacactctcgcaaaagtaacggaagcgatgactgcactacacgttgccttgcccaccacacacacacatccttatacctttttcaccaccctcaaaatttctaatctgctcctaattactaacttattaattaaatggtaactccacagctcattttctcccttccctcttgcacgcttctttccccccgcttcttctttcttctcctcggttactacctacgtttcacatttcttgcataaaatttttctcccgttgaaaactgatgtctgttcgctttttttttagactatcattttggtgtatcgcaaagggttctgttctttctttttttagtccgtttcgcaaagttttttgagatattccttttttcacataccttattgattctttttaacgccattttctgattgaaatttgattttctgggttgtgtgtgtgtttggttggttgtgtgtgtgtttggttggttgtgtgctggtgttggtgtctcgcgtatttcttttgttcttcgcacagaattgggttttattcaatatataatcctcctgcttagaattgaacgaaaaacgaaacacaaagctgcgttgcgcctctagaactttgatgcttaaatatggctctttcggttgagtgtcccttgtcacgaaataaagcagcaccagcgcactgcaagtaaaaacggcgacccgacgaagactacggcgacgattattttttcacaatcaatgcggggcctttcgaccgtttgtgcgatagagacgaccgttagtgagctgagaacgcaacgaagcacaatcgttacaccgaagtgtaagcccgagcgagaggaatggtgtgtctgtgtcgtgtggtagtgttgtgaagcggaagtccagcagagcagtccagctatatgaccttttcgctaggggtggccagatcgattgggtggcaacgccttttaggtgagggatgaatcagttaattacaatttgattgccaatgcaagactcttcatactcactttagttcgggaacagccagaagaaatagttttaccggcagcgaggaggtgttatattttattcgaactaccttcttatcgatggtgcgtgcgcccaaaagcttgcaacttgtatgtaaatttgttaacacccaacgtgttgcaggctgccggaatgtttttactgagcaattttgagatgttggtaatccgagttcttgaaaactttccgactagctactgagttctacaactgaattgacagggcgttattttaaaatttaaattcactccagagcgctggtctggcaaggccgacgtgccaattcaggatacttgtcgatattttccgttgtgctatcgatagtttttgggaataacaggcgttagtagatttttagtatttagattttattatcataaggatgaaaatatttttaacaaaataaactggttcatttaatttaactttttattttctcactactccaaatggcgcttccgctgtctgaaactgccgttataatagtatgaacagttaaaacaatcgacggtagctgaatttaatcaatgcagccctcttaccctatacatcgatagtatcgcataaacatcgattttggttccagctctaactttaactgtctgcaaaatatttcaaacaaaagtgtttgttaattaagtaatatacttaatattagtggctgttttgcttcgacattgatcgaattgcggttgtgcaagtgttttgtttgatttgttggcgtgtttttcctagtttggcggccctttgaactcgttcgtgtatcgccatctctctcccacccccgcaatcggcttcgtgcgtatttttttgtgaatttttacacagaactcacacttttgtatggcccaagaatttgtacaatatttttgcacttgaaaaacaagaaataatgaagaaagccaagataaacgcgacgatgtgcaagtgctaatcattcagttttggcaagcgctgaacttcgctgacttcttgaacagcaaaaaagatggaggaggataatgccaaggtcctaagtaataacaacaagaacaacagaaacaacaataagggacgccagcagctgcagggacacgcccacagctccgccaccgcccacgcctccgtcgatatatttatattcgatttatagtagctgtagttgtagtcatgccaacaacaaaaacgcaaacacagacaacaac

SEQ ID NO: 16538 - DNA, 2276 bp, DROSOPHILA
agttttcaagaactcggattaccaacatctcaaaattgctcagtaaaaacattccggcagcctgcaacacgttgggtgttaacaaatttacatacaagttgcaagcttttgggcgcacgcaccatcgataagaaggtagttcgaataaaatataacacctcctcgctgccggtaaaactatttcttctggctgttcccgaactaaagcgttgccacccaatcgatctggccacccctagcgaaaaggtcatatagctggactgctctgctggacttccgcttcacaacactaccacacgacacagacacaccattcctctcgctcgggcttacacttcggtgtaacgattgtgcttcgttgcgttctcagctcactaacggtcgtctctatcgcacaaacggtcgaaaggccccgcattgattgtgaaaaaataatcgtcgccgtagtcttcgtcgggtcgccgtttttacttgcagtgcgctggtgctgctttatttcgtgacaagggacactcaaccgaaagagccatatttaagcatcaaagttctagaggcgcaacgcagctttgtgtttcgtttttcgttcaattctaagcaggaggattatatattgaataaaacccaattctgtgcgaagaacaaaagaaatacgcgagacaccaacaccagcacacaaccaaccaaacacacacacaaccaaccaaacacacacacaacccagaaaatcaaatttcaatcagaaaatggcgttaaaaagaatcaataaggaactgcaagatctgggcagagatccacctgcacaatgttcagccggtccagttggagatgatttatttcactggcaagctacaataatgggcccgccggacagcccttatcaaggaggtgtattcttcttaactatacattttccaacagactatccctttaaaccacccaaagtggcttttacaacgcgcatataccatccaaacatcaacagcaatggatcgatttgtctcgatatattaagatctcagtggtcgccagcattaactatttcaaaagttttattatcaatttgctctctactctgtgatcccaatccagacgatcctcttgttccagagattgccagaatatataaaaccgatcgggaaaaatacaatgagctggcacgagagtggactagaaagtatgctatgtgatgcgttccagattgcagcagtccaacagaatcagcaaattcaacatcaacaatagcagaagtaaaagcagatgcaacaacaacagtaaaagcaacaaagataacatcaacagtttacaatagtcagattcagaagaggaggagctgcagcagcgtcattgtaagtggcaatggccgccgtgctgttgtccacaacaatagccacaatatcagcaggaactgcggtcaccaccatagcagcaacaaacacaacaccaacactcgccacagcagcaacatcatcagcagcagctgcagcagcaacaacagcaagatcatcaactgccgcagtcattttcgccgcagcagccgctgctaccgccttcgcagcggcattagcattaggagcagcaaatttggcggcggtaccaagagcaacggcagcggcaaaggcgtccttggggccgcagcaacatcagcagctgcagcaacatcagcagcaacagccgctgcagctgtggcagtggcaattggagcagcaactggcggattggtggcgaacatgcgattaattgtgtgtttgaccgaacagaaacagaacagcataaacggaaataatttaataataattactgaaaaaatgatgtaagcattaaacattaaaagctagacagctaccaacaacagcatcaacataataagtttaaatacaaagaaaaacaaaactacaaataaaaatcagctggaaaaattattattattattattatattatatttaaagaaccggaaaaataaaaattgcaaaaattcaatttaacatcaagcgtgtagtagagaggtactgctttaagacacattcgcttttgatcaattaaattacaaatagggtcgattgcatgcgttgtccaaattgtttaacaattgcttcattttgtataaaataatatttaaatagatatcttgctctgtctgaaatatattattttaatttttgtaatgcctcaagaaagcttgttaaaatatttctttcggttaaccatttgttttgtaaattatttgagattgcgtataaattagtaaacggatgctgctgcattttgtttcacctg

SEQ ID NO: 16539 - protein, 147 aa, DROSOPHILA
MALKRINKELQDLGRDPPAQCSAGPVGDDLFHWQATIMGPPDSPYQGGVFFLTIHFPTDYPFKPPKVAFTTRIYHPNINSNGSICLDILRSQWSPALTISKVLLSICSLLCDPNPDDPLVPEIARIYKTDREKYNELAREWTRKYAM

SEQ ID NO: 16540 - DNA, 3791 bp, DROSOPHILA
aagggatacggtggtgaccaacgatcgctggggcttcggcactgcgtgtatgcatggtgacttctacaattgtgccgatcgcttcaatcccggtgttctgcaagctcacaagtgggaaaatgccttcaccctggatcgcaccagctggggtcagcgattcgatgtctctttgtccgattttatgacctccaaggaagtcattaaaggtgtgtgcctataatacaacatagtatttaacatatactactttctataaaatttttttttagagattatcaccactgtgagctgtaatggcaatgtgctgatcaatgttggaccaaccaagtttggtaccatactgcccattttcgaggagcgtctaagggacatgggtcgctggctgaagttcaatggcgagggtatttacggcagtgtaccctggatttatcagaatgataccatcaatggaaatgtttggtatacgcggcaaaaggaggcatccaatggaaaaatcaccatatacgcatttgtgctggagtatccgtacgacaccaatgaactggatatctatccgcttggcaaggatatcaatatattccgaaatgtaatgctgactggaatcgatatgggcaccggtggagatattctgaatgagcaaagcactgaggttgtcatgttgggcatggaggataccaaaattaaggtacgtaacgaaagtcactaagtaatagatgccacataactttttcctttgcatccttctttagtggaatgctgatcataaccggctacacatcgtgtttccacctaaaaatcacatcgataaaagaggtcttgactatgcctggacttttaaaataactataacgtagtcatagccattttataattatttttttatatatattttaatattaaccagaaatagttactttcgcttcgttttatacgaaatacaacatgatcaactcatagcattagtttagttccttgagtctagatgtgtttcttagatattctagggtgtggtatccgcctcctgtttgggaaagcctgtccggtgtttgtgggctgccagttgtgctcgtgaaaggactccgccgtcgcaggtgacgcaatggtagtgggtgtgccgttgggcgtaggagcagccgggagaatcgcactgctcgtttccgcccaccttgcggaagccagcattccgcacatagtcctggcgaagatgcaatcttcgatgggccaccaccttgttcgaatccgtgcacacataatcacacttgcggcagtgaaagtgcgaagttttccgcgaggatgccgttaccgcctctgtgggatctgaaaaataggaggattttagccgcactcaaaatggaaggaattctctacttatgctgtaatgacttacctatcctgcttaggtgattcgtctccgtggctgcaccacttgcagtggcataaccgcagctggccactccgcattgcatgttggctcggaattggcgaaaatcatcacccatcaacgtgtccattcgctcatgacgcgccgtatgttgcacaaagcgggtcttgtcgcagaaactatagtggcaatctcgccggttgcagtggaagtgcgactggtgattccggtagccacatctctcgaatccacagtcctcgttgaagcggaattttagatagccactcggaatgtcgtgatcccggttacgtttcgccgcagtcctttgaccggagttgattgttgtggctgccactgcacttgccgttgcacttgcggctgcattgagcagcattagcttctgttgagcggcattctcaagcaaaatgcgcatgtccagaagaggccctgaaactccaggacctgctgctgaacccggtaatgccaacggttgactggctgccgccagaaagctgggcaacagcacctgtcgctggtacaaatcgatcagctgcttaaactgcaacagattcatattcagagctggtcccactaccgccggtgtggcagtggcttccggcagagatggtcgcatgctcagatcctccggctggtccacctccaagtcgttcgactcctggcgactattgtatctcgaactaaccacttccggcgtttccccttgggcagctgaattcgcattctccggataaaaagttcccgccgctcgaacaactatattgaatactcagttaagattcgtacatatatctcaaactagttcagcttacctgaaactttatccaaaattgtgcttgataaattcgtcgacgagtttgtttctaaaggctctgagggctgtaaggtgggctgtaacaatataaaacataatataattttaaatgccaaatatataattcttgaatggagtatttattacctgggctaaagactcatggcggctactccgagactctgtctcacttctcgctccaaagtgggttggctgattgacaattctcttgctaggctgctccaaagacgatgttggggcccaaacacgaccccgtttccggtagcgactaggtgtgagatcagttgctgatccatcgtgatccgctagagacaaacgatcctctgcagtggccaccgttgacgatgagccaccgggaagacgtgctcctgggccggaatattcgcttctctccagcttaaagctggtgaagatggcctgcggcgagtgctgggcctattttggaagcataaaaattgaaaaaaagcgtttctgaatttgttgacaatcgaaatcggtgtccaatattccacgcagcaatgtgggcgcctttcatggaattaaattacttttggcatggcagggccgtacttgccgccgttgtcattgtcatagttttcggatttaacattttggatttatgacaaacaatcggccgcaaccagtttattactcgtatttccgaaattactgttaatgtttgtcgttggcccaaaatgtcactatttaaattttgttcacgcatcaaatcaataataaaattgaacaaaaaaaaaagagagaaagaacgagtgaagtgaaaaagccaaaagcaaaaacaatggagaaaccattaaaaattttaaatacaagtgcagagctcatggataccctaaagcaatccataaataggcttacaaaaatggtaaacaaatattttcggtgaatatggaaaataaaaaaaaaaattataatataaatgggtgatataaaaagcacataagtagaatttaagcctatataaaacaatgaaatcttatgtacgatttacacaaatttcaactcttgaagaattcaaatattgtagtttcactggcgacagtgtatttggcactctcatatttgcccataacaataattacaccgaaaatattgaaagacaatgaatcgagtttgcctgataagttgtggctcacacacataagcacacacaccttattcgattaaatgcgatacaagtgtgtattattattattattattactgctattgttagtgccgtgtatctttcctttccatcggcattggggattatcgaaggggttacaagggattcaagtgggtggcggtgcgagaggagatccacccaatgcaccaccttgattcctgacttcgatttgggtcaccttagccccccttttagtcccagacttggcacggcttacttcccaaaagaatgccacaaatggcaatcgacaaaatatttattcaaatttgcctttttattcacacagaaagtacactgagaaactgggtagttgtgttcatatttaagtgcacatttttcttgcaatagatctaaagggtattaagaataaa

SEQ ID NO: 16541 - DNA, 1482 bp, DROSOPHILA
atgccaaaagcccagcactcgccgcaggccatcttcaccagctttaagctggagagaagcgaatattccggcccaggagcacgtcttcccggtggctcatcgtcaacggtggccactgcagaggatcgtttgtctctagcggatcacgatggatcagcaactgatctcacacctagtcgctaccggaaacggggtcgtgtttgggccccaacatcgtctttggagcagcctagcaagagaattgtcaatcagccaacccactttggagcgagaagtgagacagagtctcggagtagccgccatgagtctttagcccagcccaccttacagccctcagagcctttagaaacaaactcgtcgacgaatttatcaagcacaattttggataaagtttcagttgttcgagcggcgggaactttttatccggagaatgcgaattcagctgcccaaggggaaacgccggaagtggttagttcgagatacaatagtcgccaggagtcgaacgacttggaggtggaccagccggaggatctgagcatgcgaccatctctgccggaagccactgccacaccggcggtagtgggaccagctctgaatatgaatctgttgcagtttaagcagctgatcgatttgtaccagcgacaggtgctgttgcccagctttctggcggcagccagtcaaccgttggcattaccgggttcagcagcaggtcctggagtttcagggcctcttctggacatgcgcattttgcttgagaatgccgctcaacagaagctaatgctgctcaatgcagccgcaagtgcaacggcaagtgcagtggcagccacaacaatcaactccggtcaaaggactgcggcgaaacgtaaccgggatcacgacattccgagtggctatctaaaattccgcttcaacgaggactgtggattcgagagatgtggctaccggaatcaccagtcgcacttccactgcaaccggcgagattgccactatagtttctgcgacaagacccgctttgtgcaacatacggcgcgtcatgagcgaatggacacgttgatgggtgatgattttcgccaattccgagccaacatgcaatgcggagtggccagctgcggttatgccactgcaagtggtgcagccacggagacgaatcacctaagcaggatagatcccacagaggcggtaacggcatcctcgcggaaaacttcgcactttcactgccgcaagtgtgattatgtgtgcacggattcgaacaaggtggtggcccatcgaagattgcatcttcgccaggactatgtgcggaatgctggcttccgcaaggtgggcggaaacgagcagtgcgattctcccggctgctcctacgcccaacggcacacccactaccattgcgtcacctgcgacggcggagtcctttcacgagcacaactggcagcccacaaacaccggacaggctttcccaaacaggaggcggataccacaccctag

SEQ ID NO: 16542 - protein, 493 aa, DROSOPHILA
MPKAQHSPQAIFTSFKLERSEYSGPGARLPGGSSSTVATAEDRLSLADHDGSATDLTPSRYRKRGRVWAPTSSLEQPSKRIVNQPTHFGARSETESRSSRHESLAQPTLQPSEPLETNSSTNLSSTILDKVSVVRAAGTFYPENANSAAQGETPEVVSSRYNSRQESNDLEVDQPEDLSMRPSLPEATATPAVVGPALNMNLLQFKQLIDLYQRQVLLPSFLAAASQPLALPGSAAGPGVSGPLLDMRILLENAAQQKLMLLNAAASATASAVAATTINSGQRTAAKRNRDHDIPSGYLKFRFNEDCGFERCGYRNHQSHFHCNRRDCHYSFCDKTRFVQHTARHERMDTLMGDDFRQFRANMQCGVASCGYATASGAATETNHLSRIDPTEAVTASSRKTSHFHCRKCDYVCTDSNKVVAHRRLHLRQDYVRNAGFRKVGGNEQCDSPGCSYAQRHTHYHCVTCDGGVLSRAQLAAHKHRTGFPKQEADTTP

SEQ ID NO: 16543 - DNA, 5721 bp, DROSOPHILA
agaacaaatattactggcacagaaacaactaactttatcaccgtttcctttagcgagtgtgcactgtaacttacgttatgttctggttgaagttgacgaacacttcgcccgcatccacatcggtgcgcccgagcaggctcatcatggtttctgtgtgggaggggctggggtcctgcaacagattgggcgtaaatcgttagctatatcggactgctcggccagggaaatgtgttgatctcgcgatttaccgatggcgcattacggaatagcgaatggcgcaaacaaagcgtgggccaaagcagtaaatatatgttaataaatacaataacaaactttgcactagtgtgtgtacactttttggggctgctgataaaagcaacaacaacaaacaaaacacacacacacacccaaacgcttgcgaaatgtacatacgtgactgagaatcgtttatttgtacctatttgtatagctaacacctctgcctcggccctatcaatatacgcaggacaccgctgttgactagtggttggctgcaaggcgtttattaaactgaatccacgtaatgtttaatgatatttggatttcttgtcgcgcaattgtttttgctctgttttgcacacacaccagcacccacacaaaggcaagtgggacagcaacagagcagagcgaaccagggagtgctaatcgagagcagagttgcatgcgccagtgctggaaagggctgcgtctgcacctgagctgcatacatattgaaaatcattcacttgcattcaggataagcatctaccacgaaactaataaaactaaatgccattgttagttattttagagtaaaacattatgcaaacgattatatacattactataagttttatttaaaaaatgaaataagtctgtaaagtaattgcggcagtgttttagttccgaaaagcgaaccaccgaatcgtgagcacgagccagcatagtctgcatccctggataggtgttcagtgtttgccagccctggtcaggtctggttcaccaaaaaagaaaataaaattacatttcaatctttccaatatgcaaatatctgcacgaaaaccagcgagaacagcatgctcacaataaagagcccccaaacaatgtgactcgtatccgcgcagagtgacgtttcgtgccttgcccgagtgccaaatccaaatcccaatccaggcgcacaaaatcgatgcagatgctgtctgcattctcatagaaagtgcaactgaataaccgatggtcgccaaaagccacgatgtccagtaataatgaccagtgaataaacaattatgactcgagcatcgaaaaatgctgaggaacgaatacataagcaataacaagaaggtgctcaactcggaccaaaacaagtactacatgctaacggtcgaggaggccgatatgtattgacgttgttacagtggagctgattacacaaaagatcctcagaacgattttatgtaagtatgtaaacagaggcggacaggcccaccttgggccgcaatcacaatcttctggcttcggcttcccttgggctgataagagcagagtgcttagtgctgcttatctttcatctgcaacctggccgatgtcgtccgccgtctacttactacaccactactgccccccattgtctttgctagcgcgcgttttataccctgacacagagttgactgggtgcagcaacacactaattgtaggagctttacgatagtagggatatatgaccatttcctggcagacagattatgtatattgtatatgactagtctaaatatagactcgtgttcagtgcctagctgataatgaggtcagagtgctggcattccaattggttgccaattgttagggtattaaagcttcgcttccaccactgtcccttttcgattttattttacttcgcttttgcctaatcaatgtcagcactgtgcgtcgtgatttgtagtaccttcagctggaaggtactccacgcacagtgctgttatcgcactcacggcgcgcggttcggatttcagttcatttctgtcccgtacttttccacgaccaccgatgaagttctacgcgggagaagggtaagctatagagcttgcatacgttcacttgtgaatccgaggatcgcattcgaattgcactggacggaccgccgtttgttttggtttttgcgcggcttaattacaattacgttttgcattcattaagaattccgtgaccaggtttcatgcgactagcccagcactgtgggctccaatggcactactcattcataagtccagataacagcgttggaattgtaaagtacccgtttttgggttctatgtttaccactgtgcagcgcgttctatttgacattaaactaaagcgatctttatcgcggtgatttggcgaaattgaacgtttttcccacatttcaactctttacttgttcatttctctccgcattttgggttgatcctcatatcgtaccatatcgtttatcctaaaccttgtatctcgagtcctctatctaatcaatcattttcttgaagttcaaatcaaaggctttaacttgttgaaacatatttcttattttatccgcaactctttttttctcacccagccaaggcacgaacatgtccgacggcgtcagcatcttgcacatcaaacaggaggtggacactccatcggcgtcctgctttagtcccagctccaagtcaacggccacgcagagtggcacaaacggcctgaaatcctcgccctcggtttcgccggaaaggcagctctgcagctcgacgacctctctatcctgcgatttgcacaatgtatccttaagcaatgatggcgatagtctgaaaggaagtggtacaagtggcggcaatggcggaggaggaggtggtggtacgagtggtggaaatgcgaccaatgcgagtgccggagctggatcgggatccgtcagggacgagctccgccgattgtgtttggtttgtggcgatgtggccagtggattccactatggtgtggcgagttgtgaggcttgcaaagcgttctttaaacgcaccatccaaggcaacatcgagtacacgtgtccggcgaacaacgagtgtgagattaacaagcggagacgcaaggcctgccaagcgtgtcgcttccagaaatgtctactaatgggcatgctcaaggtaatttcatagtcccgagttaaagttcctaaactctaatcgctttaacttttcaggagggtgtgcgcttggatcgagttcgtggaggacggcagaagtaccgaaggaatcctgtatcaaactcttaccagactatgcagctgctataccaatccaacaccacctcgctgtgcgatgtcaagatactggaggtgctcaattcatatgagccggatgccttgagcgtccaaacgccgccgccgcaagtccacacgactagcataactaatgatgaggcctcatcctcctcgggcagcataaaactggagtccagcgttgttacgcccaatgggacttgcattttccaaaacaacaacaacaatgatcccaatgagatactaagcgtccttagtgatatttacgacaaggaattggtcagcgtcattggctgggccaagcagatacctggctttatagatctgccacttaacgaccagatgaagcttctccaggtgtcgtgggcagagatcctgacgctccagctgaccttccggtccctaccgttcaatggcaagttatgcttcgccacggatgtctggatggatgaacatttggccaaggagtgcggttacacggagttctactaccactgcgtccagatcgcacagcgcatggaaagaatatcgccacgaagggaggagtactacttgctaaaggcgctcctgctggccaactgcgacattctgctggatgatcagagttccctgcgcgcatttcgtgatacgattcttaattctctaaacgatgtggtctacttgctgcgtcattcgtcggccgtgtcgcatcagcaacaattgctgcttttgctgccttcgctgcggcaggcggatgatatcctgcgaagattttggcgtggaattgcacgcgatgaagtcattaccatgaagaaactgttcctcgagatgctcgagccgctggccaggtgaaaaggattatgcgggcgcccaaactagttgatctagctgataagcaaaggtgcaaatatagtcttaggtatatatggatgtatactagagtagattaagcgtaggataagccatgtatataaatagtaaaatacttgtcgggtaagattagttcgcagaaaaaatctcttttaatggactaccaactacagcaactggaaaaccctacttatcttctagaatcggggtgtgcttacactggttaaaggcgcatataggtgttatgtgtctaaagttgtgagtcacagatcttcaataatttgttcaattctcactggttctgatatatgtatatgccgcaaccttctgatgtaacgtatgaatttgtgggcacttttaaaatacgatagtggttctacaatacaatggattatactgtttctaagtgtcatgtaacccagtgattctgtgtctatgtggtacacatgcggtcaaaagaatagcaatgtcgtccgtgaataataaaccgtttgtaactgttgtttccatactccctaagttctgtattctttggggattttcttttcctaaacaaattcaaattagttttctagaattcagtgcatttgatcgcatttatacatcactatttcctaatccatacataggctgatatatcgcaaaacttcaaaaaattaaccatgacaaaggtattctgtggtccttgagggcttacaattagtgctaacgatggtcatatttacatttgcagactagagacgttccatcatcaccaattagagctaagcccaattaattctacggtgtatgtgtatcaaagtacttgttggagctttcctgaaagcgatcgctacgcgccaattcgttgcggaagtaggagatggtccgctgaagtccagtctctaggggaacctttggctcccaatggagcaactggcgggctcgagttatgtccggttttctgcgctgcggatcatcttccatggccttcgattgctttatcacactgggcccgccgaccagtttcttgatgatctcggcaaattcgccgattgtctgctccacaggattgcctaaattcaccggctgtgtgtagttggatgccattagggctatcattccgtccaccagatccgaaacatactgaaaggagcgcgtttgtttgccatttccatacaccgtaatggtttcattcctcagcgcctgaagtataaagtttgacaccactcgtccatcgttcatatgcattctcggtccataagtgttaaagatgcgcgccactcggacttgcactttctcctgtcgatacagatacatttaaagagcaattaatttgactcccagattgctggccaagatcaaaaaatgtggtcagtgctcgcgcttggaaatcttatctcgcgtcagccaaccgagcggaacatcaattaatagcattccaattgagatcatttaatgctcaactagcgatcgaaacaggaaaaatctgccacatttctggatctcagctagtttaatgtttttttttcgatctggcttaggaatgtggttatccaaaaaagtatatatattgctaaaggtattacctg

SEQ ID NO: 16544 - DNA, 2529 bp, DROSOPHILA
ccctggtcaggtctggttcaccaaaaaagaaaataaaattacatttcaatctttccaatatgcaaatatctgcacgaaaaccagcgagaacagcatgctcacaataaagagcccccaaacaatgtgactcgtatccgcgcagagtgacgtttcgtgccttgcccgagtgccaaatccaaatcccaatccaggcgcacaaaatcgatgcagatgctgtctgcattctcatagaaagtgcaactgaataaccgatggtcgccaaaagccacgatgtccagtaataatgaccagtgaataaacaattatgactcgagcatcgaaaaatgctgaggaacgaatacataagcaataacaagaaggtgctcaactcggaccaaaacaagtactacatgctaacggtcgaggaggccgatatgtattgacgttgttacagtggagctgattacacaaaagatcctcagaacgattttatccaaggcacgaacatgtccgacggcgtcagcatcttgcacatcaaacaggaggtggacactccatcggcgtcctgctttagtcccagctccaagtcaacggccacgcagagtggcacaaacggcctgaaatcctcgccctcggtttcgccggaaaggcagctctgcagctcgacgacctctctatcctgcgatttgcacaatgtatccttaagcaatgatggcgatagtctgaaaggaagtggtacaagtggcggcaatggcggaggaggaggtggtggtacgagtggtggaaatgcgaccaatgcgagtgccggagctggatcgggatccgtcagggacgagctccgccgattgtgtttggtttgtggcgatgtggccagtggattccactatggtgtggcgagttgtgaggcttgcaaagcgttctttaaacgcaccatccaaggcaacatcgagtacacgtgtccggcgaacaacgagtgtgagattaacaagcggagacgcaaggcctgccaagcgtgtcgcttccagaaatgtctactaatgggcatgctcaaggagggtgtgcgcttggatcgagttcgtggaggacggcagaagtaccgaaggaatcctgtatcaaactcttaccagactatgcagctgctataccaatccaacaccacctcgctgtgcgatgtcaagatactggaggtgctcaattcatatgagccggatgccttgagcgtccaaacgccgccgccgcaagtccacacgactagcataactaatgatgaggcctcatcctcctcgggcagcataaaactggagtccagcgttgttacgcccaatgggacttgcattttccaaaacaacaacaacaatgatcccaatgagatactaagcgtccttagtgatatttacgacaaggaattggtcagcgtcattggctgggccaagcagatacctggctttatagatctgccacttaacgaccagatgaagcttctccaggtgtcgtgggcagagatcctgacgctccagctgaccttccggtccctaccgttcaatggcaagttatgcttcgccacggatgtctggatggatgaacatttggccaaggagtgcggttacacggagttctactaccactgcgtccagatcgcacagcgcatggaaagaatatcgccacgaagggaggagtactacttgctaaaggcgctcctgctggccaactgcgacattctgctggatgatcagagttccctgcgcgcatttcgtgatacgattcttaattctctaaacgatgtggtctacttgctgcgtcattcgtcggccgtgtcgcatcagcaacaattgctgcttttgctgccttcgctgcggcaggcggatgatatcctgcgaagattttggcgtggaattgcacgcgatgaagtcattaccatgaagaaactgttcctcgagatgctcgagccgctggccaggtgaaaaggattatgcgggcgcccaaactagttgatctagctgataagcaaaggtgcaaatatagtcttaggtatatatggatgtatactagagtagattaagcgtaggataagccatgtatataaatagtaaaatacttgtcgggtaagattagttcgcagaaaaaatctcttttaatggactaccaactacagcaactggaaaaccctacttatcttctagaatcggggtgtgcttacactggttaaaggcgcatataggtgttatgtgtctaaagttgtgagtcacagatcttcaataatttgttcaattctcactggttctgatatatgtatatgccgcaaccttctgatgtaacgtatgaatttgtgggcacttttaaaatacgatagtggttctacaatacaatggattatactgtttctaagtgtcatgtaacccagtgattctgtgtctatgtggtacacatgcggtcaaaagaatagcaatgtcgtccgtgaataataaaccgtttgtaactgttgtttccatactccctaagttctgtattctttggggattttcttttcctaaacaaattcaaattagtttt

SEQ ID NO: 16545 - protein, 484 aa, DROSOPHILA
MSDGVSILHIKQEVDTPSASCFSPSSKSTATQSGTNGLKSSPSVSPERQLCSSTTSLSCDLHNVSLSNDGDSLKGSGTSGGNGGGGGGGTSGGNATNASAGAGSGSVRDELRRLCLVCGDVASGFHYGVASCEACKAFFKRTIQGNIEYTCPANNECEINKRRRKACQACRFQKCLLMGMLKEGVRLDRVRGGRQKYRRNPVSNSYQTMQLLYQSNTTSLCDVKILEVLNSYEPDALSVQTPPPQVHTTSITNDEASSSSGSIKLESSVVTPNGTCIFQNNNNNDPNEILSVLSDIYDKELVSVIGWAKQIPGFIDLPLNDQMKLLQVSWAEILTLQLTFRSLPFNGKLCFATDVWMDEHLAKECGYTEFYYHCVQIAQRMERISPRREEYYLLKALLLANCDILLDDQSSLRAFRDTILNSLNDVVYLLRHSSAVSHQQQLLLLLPSLRQADDILRRFWRGIARDEVITMKKLFLEMLEPLAR

SEQ ID NO: 16546 - DNA, 1996 bp, DROSOPHILA
gccatcctgacccagtttgggatcctgcgagagcattacctcgagtacaatgtatataagtatatatatatatatatataggtatgttcaacaccttggtattcgtagaggtaggataacaattgtcagatgttcactgaatgtgagaaaatgcattcaatgcatttcgtaggatgcgcttagccactcaaataacagatgaaaccgctctcggtggttcggtgtgttgtggttaagtgtgttgtttttaagtgatttgcttttgggcggtggcaagtgggtggtggatttggtttggtggatgttggtaggtggaagagcttagcatacacttgaaatactgcactgaacaattaataaccaaccagactataacatagaaatattcatacttaaattattacaattttctaccttagacagacgatcgagcttgagacgcgacctccaaattgttggatcgcttgagttgcttgattttcgggtgcgcacaacttacaaatagtattcaattagaaaaaatagatgtatattttttaagtacgtagtgtttaggtttaggtttagatttaggcttgggactcgggggtcttggggctagtgagtgtttagtgtcggtttaacgttttgtacatgcccaaaaaactttagcaaaaacttgaatatcactcgtatttatgttaaaatttgcaattttcaaattcaattctcttgcatgaaatatgttttacaataaactttataaacgccatttaatcagttatcgataaagttattaatatatatgtatatgtatatattacgcgcgtatgtatacaataaaaatagggagatgcttagactacgatttttacaaaagcctatcgcattggcatgcgttctcattgttggagacacatgcgaacataagtgacatgacccttgagtggtttgtagattataaattcgattaatgcgcttggattccgggcggggatcgaatctcagatggattaactcgtacaccttacaacaccatgcatatgtgatgtaagtcggtagtataactttatgatctatgtttgacccgtgttcgattcaaacaaacttagacgagaatgggggtttttgatgtacaattagtctgccaactaagcaatacaaaaatatctatcgtactttgccgtggaatcgagttcttttccatctccttcagcggtgcgatttgtatgtacattgaaagtgtcttccaaatcttgatttggcgcaggagtcatataagttctgcttttggcactgtactgagtacccaagtagtcgggataatgatggccttgaggcacacaatacatcaaaagccaaaccataagtcaatcaaaattcatctgtacatccgtccagttcgtccctcggtccgttgagtccgtcagctaatcctactaatttccagcttagcagctgctgttgatctctggcgatctcgactaatgctcggcccataaaaaccgccggtcactccattcaaacgctggcctcggacatccactgaggcgaactcagttgttgttcttccagcgcgagagcaggagcctccagcggtttttacgccttctgcttcaaatttgccatatcaatagatggttggtgctgtcctcgcggccagcgatctcgctcagcgagttggcaccggagttgcggaagtcctcatagccatcgccgccggaaatgatcagcgtgttgttcgtctccgacttggatttggagtgcttgatggacctgcaacacatagtttttgttaactatatcgctactttctgtcatattctcaaacttacccctgtttggtgtactcatcgctgttggaactgcctgcatcgcgaccaccgcctgcaccagaagcagctccctccaagcccgtagtctcaacaaacgtaaggaatcgaacgtgtccagtgtgaccatgaggaatgcctgtgggcactatgtttatggcacccttttcgtagccctgcgccgg

SEQ ID NO: 16547 - DNA, 476 bp, DROSOPHILA
ttaatccatctgagattcgatccccgcccggaatccaagcgcattaatcgaatttataatctacaaaccactcaagggtcatgtcacttatgttcgcatgtgtctccaacaatgagaacgcatgccaatgcgataggcttttgtaaaaatcgtagtctaagcatctccctatttttattgtatacatacgcgcgtaatatatacatatacatatatattaataactttatcgataactgattaaatggcgtttataaagtttattgtaaaacatatttcatgcaagagaattgaatttgaaaattgcaaattttaacataaatacgagtgatattcaagtttttgctaaagttttttgggcatgtacaaaacgttaaaccgacactaaacactcactagccccaagacccccgagtcccaagcctaaatctaaacctaaacctaaacactacgtacttaaaaaatatacatctatt

SEQ ID NO: 16548 - protein, 42 aa, DROSOPHILA
MRTHANAIGFCKNRSLSISLFLLYTYARNIYIYIYINNFIDN

SEQ ID NO: 16549 - DNA, 4699 bp, DROSOPHILA
aaacttaagagatatattgcttaaagatattcggtttaaaaatctttgtttaatctcgcagaatcgtaatccttgacgaaccatcatcgggattggacattaactcgcgtcgtgagctgtgggacatcctacttaatctacgcaaggagaaggccgttctggtcaccacgcactacatggaggaggccgaggtccttggggataccatctgcatattggccaatggaaaactgcagagcatcgggagtcctttggaattaaaacgaaaatcgggaattggttatcgtctcaaattagagatcaacgattttacatcaagagaagtggaaatcatggaaataatccatcactttgtgccaacagccagagtcttggtaagtcattaataaatgaactttatataaggcgtgtgcataatatcctttaaacgttgaacagaatgtggtgaatcctactgtgtatatctgcctgccgtatgcctataaaaattgtttcgcacaaatgctttataggctggagactgaatcaaaggaactgggcatacatacaatttccatgaccgacacttccctggaggatgttttcctaaggtagggattggaagatacattgtttattgtttttgctttaatatcttatgtggtgttttagatgcgcaggcgaacaggatcaagtggatacccccgatggttcgcgcaatgatgcgccgctactggcacactacaaaagactccaagaccatccccctcatcgcggactttttcaactttggatggctgtgttttacaaaaagtggacctttatttccaatgaatggttatatactctgataatggtaagttgttagcaatttgtaggactttgctctgttgtataaacggcgaaaacaactaaaactaaaacgaactaaaaactttttgtgctcccctctcgctagctgtgcattccctttgtatgcgtattcggggctatactggtgatgcacgccatgtccttggtggagaacgaagaggctctgccgctgaagctcagccagatgggcagtggcgttatatacgttcacaatccaacgggccatcacgcccatttggagcagcagctgcgtcaacagatcgagctgaatggaatcacagcgaaaacaatgcacctgcgtgggagtaatgatgtgaaaaatggtgagtatgcgacgttgtgctaaacattttaatggctctatcaatacatgtgttctctagaatcccttgacttacaacgcgacaacttggctgatttcttggagcaggtgattggcattattgacatgtacggaggtgggcgtggcacctccgaatacgcccaccattgagattttttactcaggcaatcgctaccacagctctgtggagcttatcaacctggtggactcggcaatgctgaagctagggcgtccagagtctgaaattgatacgacttacgtgccaattcgtcgatttgttagcgacataagtccatcgcgcctcgaatactatgcggtcatcgtgccgatcggcatgttcttcttcatgttctatttcatctcattgccgtttcgggaatatgccaatggattcaaacagctgcagaccatgtcgcgatttacttattggtttgcgcattttacttttgatatgctgatcctgatcttcgtctgcgttgccctgttcagtctgcaatccttgatgatgccctcggagctgtatacaacggctgaacttaaggtcattgtgttaagcatatttttctacggctgcagctacctgcccattctatacgccctgggaaacaactttaagtcgatatccacgatatctacttatttgcttttgatgctgattgtgtccggtaatattatttgattttataaccagtgacaacaattagaaaaactataaaacccattttcttttagccattgccccacttatcacctccagcaatgcggcggccatgaaactgcatgagaccaagatcgccttcctctgcttcctaccggacttcaatcttaatcaccagtttcgcatcatcaatgaaaactttataacccgacgccatccggcacttataaagggtcttatcagccaggacaccttctttgcctatgccaccgccgtgggtgttatggtcatggcattctttaccatagtcctggaacacaagtatctgcgcagacgaattcatgatggcatctgggaatgggcattccaaagaaagaaatacaattcgacaggcacccttcccagtactccgatctcagaaattgatgattgtgcaagggaggaaaaacgggttaccgatctgataaaagacccattgaacgaccattcactgattgtgcacaatcttcgcaagcgatacggcgataagctggctgtggacggagtcagctttgcggctgcccagggtgaatgctttggtctgttgggtgttaacggagcgggtaagacaagtacctttcagatgatagcggccaatttgcctctagatggtggcactatccgcatcaaaggcgcagacattcgcgagcatgagttgaaataccgggaatactttggctactgccctcagtacgatgcactaaataaattcatgaccgccgagcagtgcctatactacatggcattgctgcgcggcctgagccgccgaaggaccgatggaccagccagctgcaaggagcacgtgaagtactggctagagaagatgcatttgaccaaatatcaaaaggtgcaagtgcgccactattcgggcggcacgaaacgcaagcttctggcggcaatggccatgattggtgcacccgcactggtgctcctggacgaacctaccaccggtgtggatcccatctcgagacgatttctttggcaatgcatcaaggatttccagggaaaggatcgaacagtggtgctcacatcacataggtaagcccaaaaaagtatatttccttttcaaacagattcaaaagtgtacacattctctacaaacagcatggacgagtgcgaagagctgtgcaatcgcttggccatcatggcgcacggaaagttcaagtgtctgaacaatatttgcgcccttaagcgattaagcggcttcacgataaaactgaaaatgaaggcggacaccgaaacggagatgaatgtgtccacgatcactggcacgttgaagtcagagtttcctggtctggaactgcgcgagagccatgccggcacactcacctactttgttagcacgcaggagagtgtggtcctttggtcaagtgttttcaagatagctgaggaatatctgggcgatcgcttaagcgctctcgtggccgactattcggtgaacgagtgcacactcgaggatattttcctcaagttcgagagagaggcgaaatcacaatcgacgtcacgtcaaacctccgtgcaacgcaggccggaatgcagctacgtttaggccagatagtcggagtgtcggagtatcaagtaagataagcagaagacgggcgtcgtacatttcattatttccctcaaatatggaacttttatgaatctctatccggtgggaataatctacttaatgtatttagggactaataaaaccaaacaaacaccttcgacatgggtatataaaactaaaatataaaagtaagatataactagtacgacaaataaataatattttttatttatattataataaatatttctacataatatttgatgtgcattgattatgggattaaggtaaattatcataattcaaaagaagttaaaaacagttttatacccttctattggtagaggaacaggtatctgattgacggggaactcgactatagcattctcccgtttttttttttttttaatttaaaatctcccgccttagtatttttaaaataccactcataataataccaaaaggaactttaaacgatctatatttggaatttaacgattcattcaagaattaaaagtaatacataatgtaatttttttatccagcttgactattgaatatttaattatgagaaaaataaatataaaactattattacttggacgacttaggcgctaatggaaatgtcaaattctcaaaaaatctcccacttggccacactaatgtagcgttatttacaaaatattcatttttttcgtcgttaatttatcgtttatgccgaatatgtcgcgtagcagaatatggaagttctacgacaagttggatcggaattccgcgcagtgccagctctgcgagaaagtaatcaagacaagcggcaacacgtccaatctgatgaagcacatgaagacccatccgcagatgtaggaaaggctcctgagttcaaaaacctttcacaatgaaaattttcttgaagaaacctcttcgacgacgatgtggtggtggagcggggcatatacaagcggcgggagcaggatgacaagctgcgattccggaaggttgttcccttcaaggaagagagctctgatttccacagcgagctgttgttcaaggctgccaaggatgcgagcggcattatcgagctggatgatcaaggaatgatcaaggcggctgctgaggatcgcatctcaacaaagagcgtcgggtatgcgtgggtctctccggaggccacagtgtcccgaacggagacggttggcggcgacgatatcatcgaattcgaacccaaggaggagctcgatgagtcggagaaaagcccact

SEQ ID NO: 16550 - DNA, 2506 bp, DROSOPHILA
gagaacgaagaggctctgccgctgaagctcagccagatgggcagtggcgttatatacgttcacaatccaacgggccatcacgcccatttggagcagcagctgcgtcaacagatcgagctgaatggaatcacagcgaaaacaatgcacctgcgtgggagtaatgatgtgaaaaatgaatcccttgacttacaacgcgacaacttggctgatttcttggagcaggtgattggcattattgacatgtacggaggtgggcgtggcacctccgaatacgcccaccattgagattttttactcaggcaatcgctaccacagctctgtggagcttatcaacctggtggactcggcaatgctgaagctagggcgtccagagtctgaaattgatacgacttacgtgccaattcgtcgatttgttagcgacataagtccatcgcgcctcgaatactatgcggtcatcgtgccgatcggcatgttcttcttcatgttctatttcatctcattgccgtttcgggaatatgccaatggattcaaacagctgcagaccatgtcgcgatttacttattggtttgcgcattttacttttgatatgctgatcctgatcttcgtctgcgttgccctgttcagtctgcaatccttgatgatgccctcggagctgtatacaacggctgaacttaaggtcattgtgttaagcatatttttctacggctgcagctacctgcccattctatacgccctgggaaacaactttaagtcgatatccacgatatctacttatttgcttttgatgctgattgtgtccgccattgccccacttatcacctccagcaatgcggcggccatgaaactgcatgagaccaagatcgccttcctctgcttcctaccggacttcaatcttaatcaccagtttcgcatcatcaatgaaaactttataacccgacgccatccggcacttataaagggtcttatcagccaggacaccttctttgcctatgccaccgccgtgggtgttatggtcatggcattctttaccatagtcctggaacacaagtatctgcgcagacgaattcatgatggcatctgggaatgggcattccaaagaaagaaatacaattcgacaggcacccttcccagtactccgatctcagaaattgatgattgtgcaagggaggaaaaacgggttaccgatctgataaaagacccattgaacgaccattcactgattgtgcacaatcttcgcaagcgatacggcgataagctggctgtggacggagtcagctttgcggctgcccagggtgaatgctttggtctgttgggtgttaacggagcgggtaagacaagtacctttcagatgatagcggccaatttgcctctagatggtggcactatccgcatcaaaggcgcagacattcgcgagcatgagttgaaataccgggaatactttggctactgccctcagtacgatgcactaaataaattcatgaccgccgagcagtgcctatactacatggcattgctgcgcggcctgagccgccgaaggaccgatggaccagccagctgcaaggagcacgtgaagtactggctagagaagatgcatttgaccaaatatcaaaaggtgcaagtgcgccactattcgggcggcacgaaacgcaagcttctggcggcaatggccatgattggtgcacccgcactggtgctcctggacgaacctaccaccggtgtggatcccatctcgagacgatttctttggcaatgcatcaaggatttccagggaaaggatcgaacagtggtgctcacatcacatagcatggacgagtgcgaagagctgtgcaatcgcttggccatcatggcgcacggaaagttcaagtgtctgaacaatatttgcgcccttaagcgattaagcggcttcacgataaaactgaaaatgaaggcggacaccgaaacggagatgaatgtgtccacgatcactggcacgttgaagtcagagtttcctggtctggaactgcgcgagagccatgccggcacactcacctactttgttagcacgcaggagagtgtggtcctttggtcaagtgttttcaagatagctgaggaatatctgggcgatcgcttaagcgctctcgtggccgactattcggtgaacgagtgcacactcgaggatattttcctcaagttcgagagagaggcgaaatcacaatcgacgtcacgtcaaacctccgtgcaacgcaggccggaatgcagctacgtttaggccagatagtcggagtgtcggagtatcaagtaagataagcagaagacgggcgtcgtacatttcattatttccctcaaatatggaacttttatgaatctctatccggtgggaataatctacttaatgtatttagggactaataaaaccaaacaaacaccttcgacatgggtatataaaactaaaatataaaagtaagatataactagtacgacaaataaataatattttttatttatattataataaatatttctacat

SEQ ID NO: 16551 - protein, 82 aa, DROSOPHILA
MGSGVIYVHNPTGHHAHLEQQLRQQIELNGITAKTMHLRGSNDVKNESLDLQRDNLADFLEQVIGIIDMYGGGRGTSEYAHH

SEQ ID NO: 16552 - DNA, 5061 bp, DROSOPHILA
ctcttctctgtgcacggcaagaactcttatgccatactcgagctagtagacaataccttgtactttaccgtgaagaccgatctgaagaacattgtgtccaccaactataagctgcccaacaacgaaagcttctgcgatggcaagacgcgcaatgttcaggccatcaaatccaagtttgtgatcaacatagccgtggatttcattagctccaaccccggcgtgggcaacgaaggatcagtgatcacaaggaccaatcgtccgctgttcttgggcggacatgtggccttccagagggccccgggcatcaagaccaagaagtcctttaagggctgcatcagcaaggtggaggttaaccaaaggatgatcaacatcacgccgaacatggtcgttggcgatatttggcagggctattgtcccctcaactaataaagaacttcggaacgacttaaggacctatgatttatttggacaacgactacgaaaaactgccaggaagaatcttcttttgccgacaactgctaatcaaaggacaacgaacgatcaaatttcaaacgaacaaaatcgacgggtcataaaaaagtcataaggtcttcaaagtaatagatccttagcaaagatgccagtcgtatatattcctagtactataagccaaactgcgtgccaattctattaaagccatttacatttatatatcctttttaaaactccttaagagaatcttgcatttttgtaattccaataaaccaataaaataaacattttaatgaaactaaaacttttgtttttttatgtcataagttttaaatggtgtaacatacatttttacaattattgagactttatttacaaaaatatttcaggttttgttgaattattcatattataaatgattatataaaatcgtatattactcaatagctgactttttttggggctttggttacttagtaaaattagaatgatgattgaagcaatacataattggctggatagcttcggattagtattcgatgtcgtacagttcgattagccggcaggccagtggttgtggaaatttccccaaaaaaattagccaattctccgcacccgtttggttcttaaagccttcgataatctagaataacaaacgagtattgttgaaagacgaaaattaataatttccggaaataacttactcttcgaatcatctgacgcagatcctgtggaggattgtcccacgaggcaatggcatcgcaaaagaataagaagtcgggcaccacgcctcctggattctccctgatcatatggcacattcccataaaagacaaatacttctcgtcgtggtcatatgcgtaacgcaataacaagcaccttcatttcgtggaagaaaggataatttaaaaaatgagcaaatgaagcatttaatgtgtacataccactggcgtaggaattcgggcaaatagggagccacttcatctggacatgcatttccgaggcgcccaagtgttattgcttaaaaaaaagaataataataataaattactttaaatcaggccaaattacttacccgcattcctcgaaagattttttggaatgtcctgccggttcatcaggatcattagttcgctaagcagaaggcgtacgtacggcttggtttcctcaccttaggggcgaaatacaaaaaatcttttttgttacattataagagaaccaagccaacttacccaacttaacgcagatttgccctatggcccaaactgcattgttgcacacaccaacaacgctggggtttaggttttgcaccaagatcaaaataaagtgggccgtgtaggggtatacctgggaaaaacaagccccgctcaaatcacccagcagggcaaacgatgattggcgaacctaatatgtattttaatcccatatacacgagtatattaattaggtaaaacttacttcgggcataacgtcgcccatgcattggcagagcagctgcaaaagtttgctgttggccaccagtggctctatgaggctctgcagcccctcgatcaagccagacaccagatccagggcgataaccatgcgctccttgtcaggataatcggttgattggctttgtttacacatcttgaaaggagtcgagttcattgatagatttacattgaagctaacacagttgcttaccatgtcctggttgatagtctcctcaataatggagatgccctttcgatacaccgagtcgcagtagggcagaaaggaggactgcaacgcagtggcgatgctcgataggcactccaacaaatagattatatctttgtcgtcgtcctttaccaggttccacttatccattagcggaggcattaggatgtcaatatattgcggtttattcagatgatgaccgacggactccgctaaaagaccaacgacatcgtacattatcagtagattcctttggtggtacttggagaaggctaagacgaacgtctttagcatattctccaggtagggcaccagttgcgtgcaggcctcctcctccagagcgacaaaggcagagcacgcagcttcctgaacgcgcttattggagtccaggatgcacttcagcagttcctcgattagaggctccaagtacttgtcgtgcggctggttgagcacccatttggggaatcgcatgaacgtccagcatgtaatggagcgtacgagtggcttcttgtcagacagacaggtaattaggtagggaatcagctctggtaagtgtgggatcaagccctgcatgcagccctccgcaatagctcccaaggccatcacaccactttctttgatcacccattcctggtggaatagcgcctcctttaggatgggcagcataaggggcagacagacatcgccgaaaattttcgaaataatgtcgagagcacaagcgctgcacttgcgcaagttcaatgccgaatcccacatatcgtcgtccgagttttcatccaattcattacttataccgtgtacgcgggacatgtggaaacgtggactgatatcctgctgtctatcaggctccttgtcatcttcacctacatcgcccttcagaagaataatgtccgtctccgtgtattgcgttcggcttacaagaactgggactaactgggatagaatgggagaaagtatatccctgcagtttctctgctttcccaatgaaagccaaaattcggtggcctgcagagccacgttctcatcggcgtcctgggagcgcaacaaaatgagctacagagatttttcattacgttaaaatttaaaactaaaccttaacttcatacctcaataatctgcgacatgtgcggcatcataaggtctatgcgcacccccaccagaccaaccaatgcgtggcagacgttcatgcgaaccgctgggtcattatccgagggcacgtctaagaggttctgaatgaggctgtctatgtttagcatcagggcctgtgatctgttgatgatgaactggttgatgcaggcaatggcgtgggagcggatctttggactgctgtgcttaaagtactccaggaactttggaatcattgtatttaatggcatattttccaaaattccggcagagtcctcgcaaattttctgcagagcactgaatgctccttcgcacacattgtagtcctggttgtcgagcatttcgcagagagatggaagcagctgcggccagttgtgcagaccgatattgctggcaatggtggtaatcagaatgcccacggtgccacggatctcgggtgaagagtcgcccactgcctgcaggcactggtgtttgatatactccaggtgttccggctgcagagtgatgtcgtgcatgcgaatgttgttcttgaggattaggccgctcatggagcgcgttgcctcgttttccgtcttcagattcgtgagcacatagacgagatagttgttgaagtccgggaagcacccgatgaggattgctaaatcagttgggtcttcggtacttacctcttgcacggctagctgcgtggctttaccgggagactgtgagtccttgagtatcggtaggagctgctgcagaccttcatcccgtggtgtccatgccattttgctgctgatgcaaaagttagccgggttttgtatgataaatgtggggtaaggtctgccaaagggggctaccgaagtgacagagaatgacactctgttctcggcctactcatatcccatacaaatcagaaaatccattatcttgatgggtaatgtttgttatacatacatatttattcatatatatacttttcaatttacacaaatcttgatagttgaattttgaaatggagtttttagccaaacaaatatataaactccagaagaataatctgtaatccatatagtttgatgtagggattatacatacatgcatgtatttcatatatatgcgtatgttatttatgcatataggcccgtatatatattcaatttcgttagacatttgcagaacatttgatttagcctagacagtggttgtaagcttaaacgattagagatataaacctatcagagttgaatgttcgatgaacgaaaagttttacgtgctgtttatgaagatatagatggtaaaacaatatttactaggcttggtcttgatttacttaaaaaaaacaacggaagttaaatatcataattgtgtaaagtactaaaaacagttggtatgttctcttcatcgatttaatagcatacacacgataatattgaaagaaataagaaaaaaattctctaatgctgcacaaataacttttgatttgctgttttaatttgtttcttgccctagcttgacctaacatttagtttatttgatgttccctacttttttttttggtttgccctatcgtaatgaaaaataatattttaaacaaaaacctactctgcataaaatctataaatatatttcatattgctgtatatgtgtggtgtgtacatgtttaatgttgtatgtttatgtgtagttgtagtagtgttgattcagtttttttgttttcattttttttttctgcttaaacgctaatcactaagatcacccgagagagatacaaacgcacgcgaacgc

SEQ ID NO: 16553 - DNA, 2655 bp, DROSOPHILA
atggcatggacaccacgggatgaaggtctgcagcagctcctaccgatactcaaggactcacagtctcccggtaaagccacgcagctagccgtgcaagaggtaagtaccgaagacccaactgatttagcaatcctcatcgggtgcttcccggacttcaacaactatctcgtctatgtgctcacgaatctgaagacggaaaacgaggcaacgcgctccatgagcggcctaatcctcaagaacaacattcgcatgcacgacatcactctgcagccggaacacctggagtatatcaaacaccagtgcctgcaggcagtgggcgactcttcacccgagatccgtggcaccgtgggcattctgattaccaccattgccagcaatatcggtctgcacaactggccgcagctgcttccatctctctgcgaaatgctcgacaaccaggactacaatgtgtgcgaaggagcattcagtgctctgcagaaaatttgcgaggactctgccggaattttggaaaatatgccattaaatacaatgattccaaagttcctggagtactttaagcacagcagtccaaagatccgctcccacgccattgcctgcatcaaccagttcatcatcaacagatcacaggccctgatgctaaacatagacagcctcattcagaacctcttagacgtgccctcggataatgacccagcggttcgcatgaacgtctgccacgcattggttggtctggtgggggtgcgcatagaccttatgatgccgcacatgtcgcagattattgagctcattttgttgcgctcccaggacgccgatgagaacgtggctctgcaggccaccgaattttggctttcattgggaaagcagagaaactgcagggatatactttctcccattctatcccagttagtcccagttcttgtaagccgaacgcaatacacggagacggacattattcttctgaagggcgatgtaggtgaagatgacaaggagcctgatagacagcaggatatcagtccacgtttccacatgtcccgcgtacacggtataagtaatgaattggatgaaaactcggacgacgatatgtgggattcggcattgaacttgcgcaagtgcagcgcttgtgctctcgacattatttcgaaaattttcggcgatgtctgtctgccccttatgctgcccatcctaaaggaggcgctattccaccaggaatgggtgatcaaagaaagtggtgtgatggccttgggagctattgcggagggctgcatgcagggcttgatcccacacttaccagagctgattccctacctaattacctgtctgtctgacaagaagccactcgtacgctccattacatgctggacgttcatgcgattccccaaatgggtgctcaaccagccgcacgacaagtacttggagcctctaatcgaggaactgctgaagtgcatcctggactccaataagcgcgttcaggaagctgcgtgctctgcctttgtcgctctggaggaggaggcctgcacgcaactggtgccctacctggagaatatgctaaagacgttcgtcttagccttctccaagtaccaccaaaggaatctactgataatgtacgatgtcgttggtcttttagcggagtccgtcggtcatcatctgaataaaccgcaatatattgacatcctaatgcctccgctaatggataagtggaacctggtaaaggacgacgacaaagatataatctatttgttggagtgcctatcgagcatcgccactgcgttgcagtcctcctttctgccctactgcgactcggtgtatcgaaagggcatctccattattgaggagactatcaaccaggacatgatgtgtaaacaaagccaatcaaccgattatcctgacaaggagcgcatggttatcgccctggatctggtgtctggcttgatcgaggggctgcagagcctcatagagccactggtggccaacagcaaacttttgcagctgctctgccaatgcatgggcgacgttatgcccgaagttcgccaatcatcgtttgccctgctgggtgatttgagcggggcttgtttttcccaggtatacccctacacggcccactttattttgatcttggtgcaaaacctaaaccccagcgttgttggtgtgtgcaacaatgcagtttgggccatagggcaaatctgcgttaagttgggtgaggaaaccaagccgtacgtacgccttctgcttagcgaactaatgatcctgatgaaccggcaggacattccaaaaaatctttcgaggaatgcggcaataacacttgggcgcctcggaaatgcatgtccagatgaagtggctccctatttgcccgaattcctacgccagtggtgcttgttattgcgttacgcatatgaccacgacgagaagtatttgtcttttatgggaatgtgccatatgatcagggagaatccaggaggcgtggtgcccgacttcttattcttttgcgatgccattgcctcgtgggacaatcctccacaggatctgcgtcagatgattcgaagaattatcgaaggctttaagaaccaaacgggtgcggagaattggctaatttttttggggaaatttccacaaccactggcctgccggctaatcgaactgtacgacatcgaatactaa

SEQ ID NO: 16554 - protein, 884 aa, DROSOPHILA
MAWTPRDEGLQQLLPILKDSQSPGKATQLAVQEVSTEDPTDLAILIGCFPDFNNYLVYVLTNLKTENEATRSMSGLILKNNIRMHDITLQPEHLEYIKHQCLQAVGDSSPEIRGTVGILITTIASNIGLHNWPQLLPSLCEMLDNQDYNVCEGAFSALQKICEDSAGILENMPLNTMIPKFLEYFKHSSPKIRSHAIACINQFIINRSQALMLNIDSLIQNLLDVPSDNDPAVRMNVCHALVGLVGVRIDLMMPHMSQIIELILLRSQDADENVALQATEFWLSLGKQRNCRDILSPILSQLVPVLVSRTQYTETDIILLKGDVGEDDKEPDRQQDISPRFHMSRVHGISNELDENSDDDMWDSALNLRKCSACALDIISKIFGDVCLPLMLPILKEALFHQEWVIKESGVMALGAIAEGCMQGLIPHLPELIPYLITCLSDKKPLVRSITCWTFMRFPKWVLNQPHDKYLEPLIEELLKCILDSNKRVQEAACSAFVALEEEACTQLVPYLENMLKTFVLAFSKYHQRNLLIMYDVVGLLAESVGHHLNKPQYIDILMPPLMDKWNLVKDDDKDIIYLLECLSSIATALQSSFLPYCDSVYRKGISIIEETINQDMMCKQSQSTDYPDKERMVIALDLVSGLIEGLQSLIEPLVANSKLLQLLCQCMGDVMPEVRQSSFALLGDLSGACFSQVYPYTAHFILILVQNLNPSVVGVCNNAVWAIGQICVKLGEETKPYVRLLLSELMILMNRQDIPKNLSRNAAITLGRLGNACPDEVAPYLPEFLRQWCLLLRYAYDHDEKYLSFMGMCHMIRENPGGVVPDFLFFCDAIASWDNPPQDLRQMIRRIIEGFKNQTGAENWLIFLGKFPQPLACRLIELYDIEY

SEQ ID NO: 16555 - DNA, 2611 bp, DROSOPHILA
tcctcaagcgttcatcccaggagaggctgcgcaaatctataatggccaagcggatcaaggccatgaaggaggctgcagctgcggctgcggctgcggcagaaagtgccaagttgagtctgaacaatgatatgccggcgaaagagttttgactcgaataattgaaaatttgtgaaaacacaaaccaacgtcttcgaaacaaaacacacctcccgaattccaactaagaaatcaggaggacgagtcaaagaatttgaataaataaaccacataaaacataagaaaataatactgtaaaaacacaattgctcaattaaccagatgtgattcaaaagtaaaatctgatcattgaaaagtgaaaggacaagtcgaaggataagagggattcggacaactcaatgcaagaaaataaaatgtagaacatgttgaatgtaaaagaattcgaaacataaagaaattagccaaatgtccaaaaaatttatattttgtatgtaatgtatataaataaataaataaataaatgtatatatatgcaattaattcagacaactcaacactagaaaatataacgtagtgcaccttcgaaactgcaaaatcaagaatttaagaaataaaagaataattaagtaaaaattgaacttagaaatgcagaaggacgagtcgatggataagaaggattcggaaaacttaacgcaaggaaataatatgaacatatttcgaactgaaaaaatacacaacagcgaacgttgaaacacaaagaaaaatatccaaatgtgattcacaagggcgttccaaacattttgtgtaattccgtataacaatttggcattccattcgactcatcaaacaaaatttgtcatgctaattggccaaatgaaacgctttgcttcgtggtctgttgtattctttttgtcactaattgcccaccgatgtcaatatctcattattgactgcgataattgcacactggtcttcgcataaaatcaaatgaaacacaaaaaaagttcgtttgacagtcaagtttaacttatttattgcttacgcatagggaactccttaaattagtcacattaagttaacaaaaaaaaaaatatatctaaattaaagtttagtgctcgaattgttcctatgggcaaggaggtggcttcccagcgggtgcatcgacttgatgacctgcaccaactatttcccacttgtggtcaacttgtagctcaaacacaagccagagtagccggctggccagtagatatcccagctgccgagtgaagagcacggggttcctgctccaggaactgcctaatcgacacagccagtcgggatccacttgagaaaaccccctcctcctgggatcctcactcctgtttcacttggaaggcctttgccttgggcatggccaccggcagcgagcgatccacgtaggcgaagttgtccaccacgctggaggacaggacgccacccatcacgagcagggctccggcgatggcaattttcgaccacatgctgttgcttgctctcttgcgggaaatcgggacgagtgacgagtgactggacactactccgggtgcggacgggaatgcggcgagcggatgcgaagtgaacgcgagtagagctttttgcactatgcgcgggacgcacgccctgcatggggccttatatacacaatcgcaaacgtagtcccagagtgggagccccaactagagccggcagaggcagaaccagaacccgcgggaagctttgcccatgggatgtccgatgtgctgccggtcacgtcggccagtcgccaccccgggctccacgggccagcggaaaagctcccagaaaataccgctcgtcgatgcacttcctttgccgccgccactcgccgcgattatcgactcattagataagcgcgattcgcacttcgatggcgaaaagctctagcatgtgtgcgaatgcgaataggtgcactgcgagaaaatccggttgaattcggtgcgagctagcgctagtatctggaaatcacctgcaatggtgccatttcatagaattttcaaatcaaaatatattgatgcataccgttagaaaccataaatgattagaaaatactagagatcactaactagtgataaatttaggttttcgatttcaaaaactagtagcttctatttaagaagccatatccctaatattccccttttccaaccttgagtttttaagatcatgttaaatactataaattattgaaataattcaattagctgtttaacagtaagttcttaaatgatttaaatagccagcgaaatcaaacgttttctatttccagcccaaaatatattgaagacccaaaaagtagcagcattttttcgcagtgcataagtaataaactcatgtctgtgccaatgtgatattttaatattttgcaatgttttgtttgtttattcgcggaccgtgtttattggcagtgtttatcaagaacgcctaatcttggaacgaggtgcgtcactatctaagcaatttgagtctaaacacgaatacacatttgtgggcaaacaaaatttgcccgccgatttccctttcatgtttggtttaaaaattacaaactggccccctagaatttgtttatctttattttttt

SEQ ID NO: 16556 - DNA, 611 bp, DROSOPHILA
aaaagctctactcgcgttcacttcgcatccgctcgccgcattcccgtccgcacccggagtagtgtccagtcactcgtcactcgtcccgatttcccgcaagagagcaagcaacagcatgtggtcgaaaattgccatcgccggagccctgctcgtgatgggtggcgtcctgtcctccagcgtggtggacaacttcgcctacgtggatcgctcgctgccggtggccatgcccaaggcaaaggccttccaagtgaaacaggagtgaggatcccaggaggagggggttttctcaagtggatcccgactggctgtgtcgattaggcagttcctggagcaggaaccccgtgctcttcactcggcagctgggatatctactggccagccggctactctggcttgtgtttgagctacaagttgaccacaagtgggaaatagttggtgcaggtcatcaagtcgatgcacccgctgggaagccacctccttgcccataggaacaattcgagcactaaactttaatttagatatatttttttttttgttaacttaatgtgactaatttaaggagttccctatgcgtaagcaataaataagttaaacttgactgtcaaacgaac

SEQ ID NO: 16557 - protein, 48 aa, DROSOPHILA
MWSKIAIAGALLVMGGVLSSSVVDNFAYVDRSLPVAMPKAKAFQVKQE

SEQ ID NO: 16558 - DNA, 10385 bp, DROSOPHILA
tgctctaactaggccacacacggaacagggattggaaatttcactttgagctgcaaagttctggcgatcacctccacctctcgcaacgcggcaaaatatcaactgaatattttcagacctcgagtgtgttatttgcgttaaaagaaagagtcgcgaatcgctgcgaagagaagaaagagaaaagaaatactaaaagctcgctccgaagctttggcgacgcgagcatgattcttctcatatacagtatatagcatttgaattgattaaatgctaatttagcatgctgtggtcgttgccgccatcggagatcttacactgaaacttgaaaagcggattctgaatatcaattcttcttgaaaaaaggcttttatatgtatacatagatctatagcttcctaaaaatcattgcagctcattatcaaacatgctttaatgctgattcgtctgtataaatatttaattattgtctaccaagtcattggaaaattttcaccactatgcttattcgccaacactctcggaatattttattttttccatggtctatttgtataatttcttaccttaatgccaagaccatttgaatatttataccctgtcctttgctgttttgttctcttatcaatgcccttcgcattgaccgagttttcagatttccttgcctttggcatcattaatccctttcaacatggccaaaagccattcaaaactgaattgttgagagctgtcacttggcattttattgccatcagatagctgtactcacaacaaaattctacgacaacccaaccgacaaagcccacacgatgatagttaattaaaaagttgttggcacactcagaatatcatgcaaaattagcctggctaactggccttatcataattatcagcaatccccaaacaaaactttacaacatgataattattaaataaaaagcaaataaccactaacagtagaaccgaattaacatttgtgagctcagaaaacaaaagcaaaatacaggtgaaacaaaatgcagcagcatccgtttactaatttatacgcaatctcaaataatttacaaaacaaatggttaaccgaaagaaatattttaacaagctttcttgaggcattacaaaaattaaaataatatatttcagacagagcaagatatctatttaaatattattttatacaaaatgaagcaattgttaaacaatttggacaacgcatgcaatcgaccctatttgtaatttaattgatcaaaagcgaatgtgtcttaaagcagtacctctctactacacgcttgatgttaaattgaatttttgcaatttttatttttccggttctttaaatataatataataataataataataatttttccagctgatttttatttgtagttttgtttttctttgtatttaaacttattatgttgatgctgttgttggtagctgtctagcttttaatgtttaatgcttacatcattttttcagtaattattattaaattatttccgtttatgctgttctgtttctgttcggtcaaacacacaattaatcgcatgttcgccaccaatccgccagttgctgctccaattgccactgccacagctgcagcggctgttgctgctgatgttgctgcagctgctgatgttgctgcggccccaaggacgcctttgccgctgccgttgctcttggtaccgccgccaaatttgctgctcctaatgctaatgccgctgcgaaggcggtagcagcggctgctgcggcgaaaatgactgcggcagttgatgatcttgctgttgttgctgctgcagctgctgctgatgatgttgctgctgtggcgagtgttggtgttgtgtttgttgctgctatggtggtgaccgcagttcctgctgatattgtggctattgttgtggacaacagcacggcggccattgccacttacaatgacgctgctgcagctcctcctcttctgaatctgactattgtaaactgttgatgttatctttgttgcttttactgttgttgttgcatctgcttttacttctgctattgttgatgttgaatttgctgattctgttggactgctgcaatctggaacgcatcacatagcatactttctagtccactctcgtgccagctcattgtatttttcccgatcggttttatatattctggcaatctctggaacaagaggatcgtctggattgggatcacagagtagagagcaaattgataataaaactgaaagagaatatggaaacacatgttagtatcattttcgatgtaagaactttagatgaactcaccttttgaaatagttaatgctggcgaccactgagatcttaatatatcgagacaaatcgatccattgctgttgatgtttggatggtatatgcgcgttgtaaaagccactttgggtggtttaaagggatagtctgttggaaaatgtatagttaagaagaatacacctccttgataagggctgtccggctgtaagaaaattgataacaaatactattagtacaagaacactagtttactacacacctagtttattttattttggtttatttggaggtcaaatcatagattgcgttcacttgaaaaatttggttaaaagaatgctttgaaataataagaagttctgaagtaaattatcgcgagcttcagacgcatgccacaatgtttacacgtttaatggattgttctacacatgtactggatttctatttaaacacacgattacaaatgtacttggctattatatattatctatcatttcaaagcatctaatcaactgacgtagcttatttataaatacaaatagagtattgttttattattgcattctaatttacattaatgatttattaatctgctatttttaactgtatacggcaatccctgatcagaccaaaaataaaccaatataaaatatttcaggctacaaattaagatagaatcgattcgatctttcggtgaagtcctcttaccgggcccattattgtagcttgccagtgaaatactgtaagaaaacaagagatacattaatcaaaactgttaaaaacgtagttgtgatataatcctaaagagcaaacataaactgcgctgcagttaaacgttttctgtttgctttgatatgagtcctatatctacctatatctgccctagatgggaaattactgtgtgtacgtaaagcatcttggatatttacatttgataatgagatgatgacagagtatattaaaattttcccttcgctcaaaactaaaacgtatttttccttgcccaagttatattcaagtaatgagtttagatacaggaactgatttgctaaataactaggtaaataaaattaagcttccaacaagccacagaaatgtaatcttcttgtagtacaataccactttcccctagttcgccacgtctaggccccactgtatatgcatccaatgcagcaaactcgctctcgtctaaataaatgcaccactctctcagcgccgcccaccaccccacttcaccacttccattctcatggccacgctctttagcgattcccccccacaaaagaacaaacacaaacaatgccagccaaagagccttggcaccgacaattggcagcagcgtcagcagcagaaaaagcaccaaatgctctcccccttgaaacaaaaacaaagtttttaaagtaaggaatatacctataccgagataccctgtaaccaaccaggctttaaagcacacatacgaaaaattcatttctatataaaactgagatatttttataaaatcatgttttcttaatggtggaacgcaatatattcgatttttcaaccgatttcatgctaaacaaaccttgactattattggcatacatttccatgagttctatatatcctttcacactgcagaacatcacatatgtatatatatacccttgtaccctgtgagagagcacaaaacgtgtggcagttggctcagaatcatggccaaaacagagctactggctatgccgtcaatgtcattctggtgaacgaatcgaatgcgactgggaaactctctctgttgtggcagagcactgagaactgaactgggaactgggccctcggtaaccagctgctgccttgaccataattacacgaaatgttcatttgtccatctgcagtagggagtttgggtctggaaaatgcgtcggcattgtttttgtcatagctcagacgaaagtaatctcatagctgcagccattttgattaataccacttagacaacaatcaataatttctgagcattgctaaggcaacaaaaaccctgcaaccagatgatattaataaaagcaatgcatatttagataaaaacatccttagtgcatttaaagaattgattaatccgaccatggtagcttagctcaaaagcattcaatcaatgttgagtttaaatgtttaaatacatgattaaatcataaggtttcctttgccatactacaattacaatggattaatttcacacacatacacacacacacacacacacacacagcgccacactgagctgaaaatggatgggagtttccattgcactcgagtgaaaattcgccacccacccaaccaacacctaaaaaaccaaagtaagccccgccctgagctgcaattcctttcttttaccccagttgctgggaattcgaaggcaagggttcggaacagccaaattgataataaaagcaaagtgataagaactgcggaaattattgagctgactcctcaataatcatagaaatattcacgcttatatacaaacatacttttaattgtatataatagcgacgtttaaacgctgttaatagaaatcgagtgaaatcgccacactggtcgttcattatcagcaaacgatgacaattattaatattattatttactctgcctcgcgggaacttgaatgagtttgatttccttacgaccagagaaactgggaaatgaaacacaaagaaatgagctaacgaaagtgctgggatatatataaaatatttcaatattttgccgttctgtataatattttcatttccacaaaagtgcgttcactaaattataatatatatataatactgcaaagcattacgaacaaaatttctataagttcctatagttaaaacaatagtttatatagctttttgcagaataatttcagttcctagccattttccctaaaactaagtatttagtttgccattttctttttaaaattttatcgcttacaaagtatgccggtgttttttttttttaaccgaaatcgtcgtcagcaagactatataatttacgatttcactttttgtgacgtcattggagagtgacccccatatggctggcacctcttcctcttcccgcttgagtggtgaaggggtgaagggagggggggggggtgcttttcagtaacggttgtctgtatgcagtacagctctacgtgctataacgtaaccgaatccgatccacaatcagcgtgaatttgttggctaattgcatgacggcttcgtgagttttttaaatcgagtttaagacagcgaagaaaaaagaaccaagtcatggcgatcagctgtttggaggccgtcgctatcacaaaataaaaagaaccgaatccaaacttggcgcaaaagaattccaaattagcaaagtccaaactaaaagtaacagccaataggaaaacaaacgatgtacaaatttagtgtgttatatgcctagtcacgatcgaaatctatgacgtggtgatggtcgatcgacaatatttgcattttttattaacaattccgagatagtggtattgtgaattttgcctaatatatatatagttcctattccttgcatcagactatatactatactgactcagacttggcaactcagaaatatttcacataatttcatgtcttggagctcccacacgatatggtgaaatcgaaacttgggttaaagcccccccaacataatacaactgactcacggcaaatcaacgagttgttgaataacattagcaatacttacaatcatctccaactggaccggctgaacattgtgcaggtggatctctgcccagatcttgcagttcctgttgaacaaagacattttcaaattagtcattgaaataaaagttaaatataggtatgtaagctcagtcaatttctgattgtttttaacagttatgtcaagtcctacaaaaagaactggtttttaaagagtatatctaatttctagtcaaaccttatatactacctactttctgaaagcataggtaacaaacctagcaattgcaatacaggaaaccccaaaaagaattctcgaaatgggaaatggtcaaaagtgcatttcatggatatctgcttatgttttccggtagtcggttcttttgttttgctctatgatccagctatatgtacatacatatgtatgtatgtaccacggttttccgggtgtgcgtacattttatgctgtgtggttggtatgcaaatgatgtaaattttaaatgcagaatttaaaaacagatatgtggggatacaaaataaacatttttatgcgagagcttcgttcgaagcgagtgcgagcgagagggagagacgtgaaaaatcaagttcgttggcccggaccacaaatggcgctgtctccttctgccccaccccccgaccagtcgctccatccctgttgcactcgcacgcacacagctgagcggctcccctccctctctcttacactccgactcttcttcacttatcacagctgccccacacacacacactccaaacggggagagagaatgaggtgtaaggtaaaccggcaaaaaaaaagaatatatatataaaaagaataatgaagatgagctgcgaaagagtagcgcgactcagtggagaagtaagaggaggagcagcaggaggaggaagaatgaaggagagtgagaagactgagcttcagtgtatgcgtgtgtttgtaacggcaccacaaaatcagagtggagcacaacaaaaatagccgtcgcgaaaaacaccgtgtttctttgccccatctcacttactcattttgggaattgtacctgttgagcaaaaataaattacaagaaattgttacatttcttttttcgttgggagtcggagcggttatgactcatatcagacgaacaaatgaagtaaaaacaaacacgcacacttgtgcacagcaagaaaattcgataatattatcaatattagaccaggtgcactaccaatacaaacttctatttaattcttattcgaataattaatattgtgaactttaagaattggttcagtaagactaaatgccatatgcattggttctaaagcccatttcgttcagtgtacggttcaagtgagctccgatcggcgtttaagccgttctctctcgctctttaactctcttttttggcaaatgaggccatctagagaaaaaaggcttttgaagaattgaccacaaaaagggggcgtgagtgattttaagagtttactacaatgtatacttttatttccggtttgccgcttgccatttcgttttcatttaggcaggcattaaaatgttataatggatagaaaactacgaaaaacgaggaaaactcaatggccatgacgccgacgcaggcagcgctgcttttgtcgagacagtcagcagacccccgccccacacattcaaacacaaatacacaccacgctcacacatacgcatagatatgaacaaattccgcattcgctgctcattttgtatgtaaattatgcttaattataatttataactaattatttgggggcccccttttggctgacggtgttttgcaacactaagccccgctagcactcacacacttgcgctctctttggctctgccccattgcgcgagcgggaccgaatgaggcctcagctgtcgcgggcaaagggaatgcgccagggccagagcgagatggcatgcaatggccatagccaagtgatggcgagactttgtatttgcgagcgttttaatgtgtgtgtgtgtggggtatgactatgataaccggcttcaaacgtaaaaaaagatcccaatttgccaagtaacatttccacaacttcgagatattactaatgcttttgaggaaggctgggatgactttgaaaaaatatcgggttgtcagggccttgaacattggggtgtaaaaaagcatttactggacaaggacaaacgacgcgcaggcactttaaaaataattatcgaagcacgcacgctagaaccactctacctaaatacatatataaatatatatgcttgggggcagcactatttctgaattatcagcgcaaaaagtagggttaggttaattttatacgcttcttgcttttgctctgttttattttttgctggatctttctgcggcgctggcagtgtgtgcgtttatgtgtgactgttgcgaggctgagagtgtgtgcgagtgccgtgtacagcgtgtattgggtaacagcgcccgtagagctgcgaaaactccgccgtatagttgcattaatgtaaatgcatccaggtgcccggcacacacgcacacaaacaatgcacatttgcattgcactttcacgcacacgcatcgcacacacacttatcccacactctcgcaaaagtaacggaagcgatgactgcactacacgttgccttgcccaccacacacacacatccttatacctttttcaccaccctcaaaatttctaatctgctcctaattactaacttattaattaaatggtaactccacagctcattttctcccttccctcttgcacgcttctttccccccgcttcttctttcttctcctcggttactacctacgtttcacatttcttgcataaaatttttctcccgttgaaaactgatgtctgttcgctttttttttagactatcattttggtgtatcgcaaagggttctgttctttctttttttagtccgtttcgcaaagttttttgagatattccttttttcacataccttattgattctttttaacgccattttctgattgaaatttgattttctgggttgtgtgtgtgtttggttggttgtgtgtgtgtttggttggttgtgtgctggtgttggtgtctcgcgtatttcttttgttcttcgcacagaattgggttttattcaatatataatcctcctgcttagaattgaacgaaaaacgaaacacaaagctgcgttgcgcctctagaactttgatgcttaaatatggctctttcggttgagtgtcccttgtcacgaaataaagcagcaccagcgcactgcaagtaaaaacggcgacccgacgaagactacggcgacgattattttttcacaatcaatgcggggcctttcgaccgtttgtgcgatagagacgaccgttagtgagctgagaacgcaacgaagcacaatcgttacaccgaagtgtaagcccgagcgagaggaatggtgtgtctgtgtcgtgtggtagtgttgtgaagcggaagtccagcagagcagtccagctatatgaccttttcgctaggggtggccagatcgattgggtggcaacgccttttaggtgagggatgaatcagttaattacaatttgattgccaatgcaagactcttcatactcactttagttcgggaacagccagaagaaatagttttaccggcagcgaggaggtgttatattttattcgaactaccttcttatcgatggtgcgtgcgcccaaaagcttgcaacttgtatgtaaatttgttaacacccaacgtgttgcaggctgccggaatgtttttactgagcaattttgagatgttggtaatccgagttcttgaaaactttccgactagctactgagttctacaactgaattgacagggcgttattttaaaatttaaattcactccagagcgctggtctggcaaggccgacgtgccaattcaggatacttgtcgatattttccgttgtgctatcgatagtttttgggaataacaggcgttagtagatttttagtatttagattttattatcataaggatgaaaatatttttaacaaaataaactggttcatttaatttaactttttattttctcactactccaaatggcgcttccgctgtctgaaactgccgttataatagtatgaacagttaaaacaatcgacggtagctgaatttaatcaatgcagccctcttaccctatacatcgatagtatcgcataaacatcgattttggttccagctctaactttaactgtctgcaaaatatttcaaacaaaagtgtttgttaattaagtaatatacttaatattagtggctgttttgcttcgacattgatcgaattgcggttgtgcaagtgttttgtttgatttgttggcgtgtttttcctagtttggcggccctttgaactcgttcgtg

SEQ ID NO: 16559 - DNA, 1920 bp, DROSOPHILA
cgttgcgttctcagctcactaacggtcgtctctatcgcacaaacggtcgaaaggccccgcattgattgtgaaaaaataatcgtcgccgtagtcttcgtcgggtcgccgtttttacttgcagtgcgctggtgctgctttatttcgtgacaagggacactcaaccgaaagagccatatttaagcatcaaagttctagaggcgcaacgcagctttgtgtttcgtttttcgttcaattctaagcaggaggattatatattgaataaaacccaattctgtgcgaagaacaaaagaaatacgcgagacaccaacaccagcacacaaccaaccaaacacacacacaaccaaccaaacacacacacaacccagaaaatcaaatttcaatcagaaaatggcgttaaaaagaatcaataaggaactgcaagatctgggcagagatccacctgcacaatgttcagccggtccagttggagatgatttatttcactggcaagctacaataatgggcccgccggacagcccttatcaaggaggtgtattcttcttaactatacattttccaacagactatccctttaaaccacccaaagtggcttttacaacgcgcatataccatccaaacatcaacagcaatggatcgatttgtctcgatatattaagatctcagtggtcgccagcattaactatttcaaaagttttattatcaatttgctctctactctgtgatcccaatccagacgatcctcttgttccagagattgccagaatatataaaaccgatcgggaaaaatacaatgagctggcacgagagtggactagaaagtatgctatgtgatgcgttccagattgcagcagtccaacagaatcagcaaattcaacatcaacaatagcagaagtaaaagcagatgcaacaacaacagtaaaagcaacaaagataacatcaacagtttacaatagtcagattcagaagaggaggagctgcagcagcgtcattgtaagtggcaatggccgccgtgctgttgtccacaacaatagccacaatatcagcaggaactgcggtcaccaccatagcagcaacaaacacaacaccaacactcgccacagcagcaacatcatcagcagcagctgcagcagcaacaacagcaagatcatcaactgccgcagtcattttcgccgcagcagccgctgctaccgccttcgcagcggcattagcattaggagcagcaaatttggcggcggtaccaagagcaacggcagcggcaaaggcgtccttggggccgcagcaacatcagcagctgcagcaacatcagcagcaacagccgctgcagctgtggcagtggcaattggagcagcaactggcggattggtggcgaacatgcgattaattgtgtgtttgaccgaacagaaacagaacagcataaacggaaataatttaataataattactgaaaaaatgatgtaagcattaaacattaaaagctagacagctaccaacaacagcatcaacataataagtttaaatacaaagaaaaacaaaactacaaataaaaatcagctggaaaaattattattattattattatattatatttaaagaaccggaaaaataaaaattgcaaaaattcaatttaacatcaagcgtgtagtagagaggtactgctttaagacacattcgcttttgatcaattaaattacaaatagggtcgattgcatgcgttgtccaaattgtttaacaattgcttcattttgtataaaataatatttaaatagatatcttgctctgtctgaaatatattattttaatttttgtaatgcctcaagaaagcttgttaaaatatttctttcggttaaccatttgttttgtaaattatttgagattgcgtataaattagtaaacggatgctgctgcattttgtttcacctg

SEQ ID NO: 16560 - protein, 147 aa, DROSOPHILA; identical to SEQ ID NO: 16539

SEQ ID NO: 16561 - DNA, 2636 bp, DROSOPHILA
cgccggcaaaatatttgggctcattacagaatgtgattcgttgtgtggcgcgagaaatcaaaaaggtaaatatgcctaatgctaacgagcacaatgctagcggagtgcagacgtcccaaagcggctagaaagttggcaaatgggttttggccaagtgttcatcgaccgtcccatgcgaggcgccataaaaacaacaagctatccgcgatgtttggcgcttaattaagcagatgtgcatacgcaacactggtggctgctggtgttttgattccgaatcgccgacttctttcactttgacccacacgcgaatttgcataattcgcccatctaaagtgtcttgccaatttggtgcacgaaagtgagttcagtgcgaaaaaaaaagagaatcgcaaatcgtgaatcgcgataaccggtagtggggcaaaatcaaaacacctgttgaggtattttccgcccagggcgaccagatgttttgaagattgtttttgcagcagggttgtcaagccaacttctgcttcatctttgtgcctatgaatatgtattgaagatattttgtgatctctttggatctttaaaattgtttatattaaaaaccgtttgaaatgaattttagacctataaaccaatatattattaaatatatattaaaaacaagtcatttttacttaaatacttcgtatttaaatagtttcgaaatatacatattatagacctggcttgatttacatatttaccatttgtttatttcttacctacgatctggtgaacgtgaaggtccaagggctaccctcctcctttcgatattcacattattaatagcctctggtgattaagagtcttggaaaaatgggtgcattagtgatacagctcttgggtcagcgaatgtcacatttggaatgggaatcggatgatgggggcgagcatttctcttcgcagtgacccacattaggcgccgtataaatagtagccgcagggcagagcattgtcatcagtttccgagctaagctcccacaacccacttcgaccatcgccaagtgccagttaaacccaagtgtaaccgacaacaatatgaaggtaggtgctccttgtgactcggaattagggtgcagcctcttgatttttgttccgtctccaggttttcatctgcctgattgcctgcttcagcctggcccaatccggattcatcggaggcggcgctagcggtggctggtcaactggaggaggtggtggctggtcatccggcggaggcggcgcccccaccatcgtcaaggtcatcagcgaggaggctggtcatggcggatgggccggcggctactctggtggctatgcccatgctcccgaggaggtgaagatcgtcaaggtgatcagcgaggcgggccactctcacggacatgattatggtcacagccacggccacggctcggatgttaagatcatcaaggtcatccaggaggagggtcacagccatggccatggccacggttacgactactccagcggaggccatggacacgcacaccacgccgaagatgtgaagatcattaagctgatcagctccggaatcgccgatggcagcagccacggtggctggtcgtccggcggcggctggttctccggtggctccggatggaactaagcagttcctcggagatgctcggacattccaacagatgccaggcaacccagtgcgctgatgtcaactcttttgttcctgttgtcggagttgtgcggcgatattggcctttttcgatgctcgaagttagtttaggacagcgcacgcgttttgtgtgtgcgcttagaaaccattaattttttttgctaatttttaaagaaatacacagaaaatgaaaaagataaccagtactgcctgattctttgtccatcgatttgggaagtcccaagagttgattactcatgatcgggggtttttgagagcatctttgttggccagtttcgctttccacttaacccatttggccacatttgtgttttgtttgcaattacagaaattattgtacttataaccagtttgccatataattattgaagtagcaaccgcaacaatagaaatggcatattatatcacaaaacggtatgaaattaccttgcatttctcgccgagcacaatcccctcatcagtggtatctatcagattatatgacatatttttcatatttgcgattacgatatcatatttttatgattttggaaactttccataggtgattggaaaatatgtaatttcagtaccgccggctcacagtgggttaagctcaaggtcaagtcgtggcaagcttcagcatcgcaaaggcaatgaatccattatcgtctcgtaattatgtctattctggacaagctgtgagatacaagtaattccccatcgaaataaataattgcggatgcgtcttgggtttgttttgaatttccatcattaaatttgtttttacgagtatttgatggtgccgtaactagttttctatgggccgaaaatggacttaagtctttcggttcttcgtattttgtctatattcacacgttcgtgagctgcgattttttgtgggcatattttatgtcttaattaatggatactcaggtggagatggtgactaattaagattgtatacatttaatatcat

SEQ ID NO: 16562 - DNA, 575 bp, DROSOPHILA
ctaagctcccacaacccacttcgaccatcgccaagtgccagttaaacccaagtgtaaccgacaacaatatgaaggttttcatctgcctgattgcctgcttcagcctggcccaatccggattcatcggaggcggcgctagcggtggctggtcaactggaggaggtggtggctggtcatccggcggaggcggcgcccccaccatcgtcaaggtcatcagcgaggaggctggtcatggcggatgggccggcggctactctggtggctatgcccatgctcccgaggaggtgaagatcgtcaaggtgatcagcgaggcgggccactctcacggacatgattatggtcacagccacggccacggctcggatgttaagatcatcaaggtcatccaggaggagggtcacagccatggccatggccacggttacgactactccagcggaggccatggacacgcacaccacgccgaagatgtgaagatcattaagctgatcagctccggaatcgccgatggcagcagccacggtggctggtcgtccggcggcggctggttctccggtggctccggatggaactaa

SEQ ID NO: 16563 - protein, 168 aa, DROSOPHILA
MKVFICLIACFSLAQSGFIGGGASGGWSTGGGGGWSSGGGGAPTIVKVISEEAGHGGWAGGYSGGYAHAPEEVKIVKVISEAGHSHGHDYGHSHGHGSDVKIIKVIQEEGHSHGHGHGYDYSSGGHGHAHHAEDVKIIKLISSGIADGSSHGGWSSGGGWFSGGSGWN

SEQ ID NO: 16564 - DNA, 2656 bp, DROSOPHILA
gctgattggacagctcaactactacctcaccatacacaatccgttcagacccatcgagggtttcctgatagatataaaagtgcgatatatattcacatttgctctccagattgtttcgttcatattggtttgtttcagactcgcagcaatatgcagaatccagatcgtctgcggccacatattgatagtttcattgattccacgtactactcggatgcctgtcttctgcatacgccttcgcaaattgcattggctgccgtcctccacgcggccagcagagagcaagagaatctcgatagctatgtgacggatcttctgtttgtctccgccagggagaagctacccggactcatagatgccgtgcgaagtaagtttgtgctgtgagatggtgcgcccagccctacatgcctttttcccgacagaaattcgcataatggtgaagcaatatcagcagcccgatcgggagaaggtcaaggccatcgagaaaaagttggacaagtgccgaaatcaagccaataatcctgatagcgaactgtaagacgccctaatttgttcatgcattccgaatttaataacccttatactttaaaagctataaggagcgcctacgccgattgtacaccgatgaggatgacatgcccgccgaagatgcctcattccacattgcagatgtgagctcggacacatctgctatgaacatcagccaatagacttaagaatatttatttaaatgatgtgatgatctactactgcgtggatttcatcgatattaaagcattttgtaatttaccatttcttgattgttaaaatgtatgcgtttagtgttagtttactaaacaaagttggattaggtacttcacttttccaatatataaaatattaaaaaaaaaaccttttgaaaatccgcttagcgctgcttggcaatatttcgttcgcagctaacggccacactgcgccccaagaaaaacaagaatagtgaactcagtcacaacaaatagcaaaaagagttcgaaatgcaggattttctgccttcgctggatgttctctttcttggactaccaggccactactcggtagcgctggtcacccttctgctgtgcgttttggtcgccttctacttcgccaacatcttcaaggacaaaggcgtgggtgtttttgccggaagaagtagacgtctcctggaatatttccttacattatcttgcaggaactggaggacgagggcctgggggccgacgagccgcgcgatgaggaggattccgagtcacggactccgcaaggggaggaaaccgacgatgacgaggcctacgaagagaactccaccgaaagcgaagttgagctaatcgaggaacagctgcccgagcacagctacaaccacctgatgggccagctcaaggccaagaggctccagcataagatggagaagaccctgactcccagccaaatcgaggaggagcgccgaatagagcgcgagcagctggcggccatctttgagctcctgcgcaaacaggaggcggaattgaacctccaggaccgaataagcgaccaggatctcaagcagcaggtgcggctctatcgctgaagtggcgccgagcctgggctcaccctacctgaatgtacagacttgtgtgatctattagtttaatgtttaaaattccaagatttggtgttgcctcatacggtccactaagtgcgggcaagtctttagtcagagagctatctcatcagtcgatgatgtcggaatataatatcttagttgtatgtaaattatatgtattccacttcgatctatgtattttgtgagttcctggtgttattaatatctgatttagatttgtagtaaatggctgttcggctcttagtctcttaaatcagctttcgaattaagaatatatgtatatattttaacgtgttacaagataaaaactcgcgatcagaaagtgtatagatttaaacacaattaatcgccaaattcgttggttagatttaaattgtgttcatataactttggatttatttgttcaataaagaatgtttagctgtgttaagatgtaatatatactctaaatatttcctaccgtttcctagccaaatatccgaaaataaccgctcatattttatatgccgcgattggatttttgaaaataattgttctaacatatagattccatcagcacaccttcgattggagcagtcgaaatgcttagcgtttctgttccaaattttttagtactaaaatgtttttaaattcacgtggagcagatattttgttggagttctaaatacgttcggtttggtttggttgatgtttaaacgtgtcgttgtggcgccaatgcccatgcatgtttactatcgcttatcgatacaccgcgtacacggcaaccgtgtgtgaccaattcaagcacgaaatcgttgaccaacactgattgtacatcagacgacacgacaacaaaaacaacagcaacaacaccaccgacgtgcttgttcctgtgtgtgtgtgcgtgtgagattggaagacaatggctgcagctgcggatctggttgttcctacccttgccagtgagtatagcccggatgcaatccccgccaggtggtcactgaggtgccgtcgactccttggagcatcgaaggcagccgattgggccgcccggttagc

SEQ ID NO: 16565 - DNA, 594 bp, DROSOPHILA
aaaagagttcgaaatgcaggattttctgccttcgctggatgttctctttcttggactaccaggccactactcggtagcgctggtcacccttctgctgtgcgttttggtcgccttctacttcgccaacatcttcaaggacaaaggcgaactggaggacgagggcctgggggccgacgagccgcgcgatgaggaggattccgagtcacggactccgcaaggggaggaaaccgacgatgacgaggcctacgaagagaactccaccgaaagcgaagttgagctaatcgaggaacagctgcccgagcacagctacaaccacctgatgggccagctcaaggccaagaggctccagcataagatggagaagaccctgactcccagccaaatcgaggaggagcgccgaatagagcgcgagcagctggcggccatctttgagctcctgcgcaaacaggaggcggaattgaacctccaggaccgaataagcgaccaggatctcaagcagcaggtgcggctctatcgctgaagtggcgccgagcctgggctcaccctacctgaatgtacagacttgtgtgatctattagtttaatgtttaaaatt

SEQ ID NO: 16566 - protein, 168 aa, DROSOPHILA
MQDFLPSLDVLFLGLPGHYSVALVTLLLCVLVAFYFANIFKDKGELEDEGLGADEPRDEEDSESRTPQGEETDDDEAYEENSTESEVELIEEQLPEHSYNHLMGQLKAKRLQHKMEKTLTPSQIEEERRIEREQLAAIFELLRKQEAELNLQDRISDQDLKQQVRLYR

SEQ ID NO: 16567 - DNA, 4030 bp, DROSOPHILA
tattcaattttttgatatgcatcaaatcttattaacatatatagttcagtaaatggattgactttgaaacacttaatttttataaacagactagttttataaaatatgattctcaggcagatgatgtttttcacaaatttcttaatacattcatatttctggcaaagaaagacgtctcctttcacatcaaaattattaattcgtccccaacaatttttatatcatatttatattccatgacatttatagaaaaattaaaataaaataaaaataaaactgccattaaaataaaactttatgcctaaagcgaaaattgagattggtaattttttaaaaatgcctttttggaaggacaactatttcttaactcgaaatttcttttaaattcatattttattatgaactcatcgtaattttctgttctacatgctgctatggacaagaaaatgtatatacattttaaaggttttaactttcgtacgttttttttactcttagttcattttgacgaacaaagtaagtccataatgtcttttttgatagatagaacagttgattgattatggtatttaatctgtaaccaaagatcttgccttgatttcagtgtcgtaaactattttggttaaatactatgtaagccactttgattggcagaaagctatttggctgtgctttaatttaatttgaagggggttttgcaactatcagttttcgcagaagtaatcgattagataaaaagggagattggccttttgacaccggatcaaattggacagtactcagaaatggttattgataggtagaattgaagtcataaattatcgcatttgttgcagaaaagctatcggtttactatgagttacggccacaagccaattggttaaataataaaatataaaattgtctattttccttagacgaagtttttattaattttttgaatacatgccaactttgctaacaagatcattaaatatttaacctacataagaattttcatttaattaatacaactgctcgtgaagatgaataccactaacagggtaaagactttcattaccccgatagtccctgaactggaagccttctcgtcctgccaccaagtccactcattatggtaaaatcgtggatcgcaattgggatcccccggcttgttattgggaggatgtgcctgtttggcaaattgctggattcgcgaccaaagatccagaaagattgtcgagttttgatactccgcatataggttgctccgctcgcagggatcagcctcaatatcgaagagacagggtccctcgagaggcaagcagggcttgactcctgtcgcaggatctgggcattcgatcctgctctgatctcttagttcgctgatgttgcgctctccgaatgacacctgctgcaactgcagccagacactggtattccgaacgagttcttcgtattccactgcgcgaggatccacttcactggtttccctatgaccaagccagccgtcgtagagaccctgattggtagtgccgctaatcaccttccactttccacgcgtataggacaaatgcggctccgccacgtcctcatcaatcacatggacaatctcccgttctaccgactcgtatccgtacttgagggcagaccacaggttcaatccgtccaaatggagcgccggatccggggatattccggctgctgccgccaacgtgggcaaaaggtcgccaatatagatctgctgcttccaaacacttcccagccgctcgaactcagtgctccaaatggccgctgaggatcgcagagcaccctcccagggggaattcttttgctaaaatataaattgattataatcagcgaactaaatatcaaaaaggaacatgttccaaaagtgtttgcatgaacgttttgggtgttttagtatttataaatagttaacaacggacatgggcagattacaaacgatatatccacttcttacatttgttaaacaaatttagttttatctacgattaacggtaatgacattgacattgtgttcaattattgaaaaaaaaagtagtacaagttttataatgaaattaaattagttcagtccgtagtcgttttatgtttatacgtagttttagcttatacataaatatcaaatagcatgacttacccccctcagtgggtaattagaggcagtggtagagtgttgtccctgtgttggcccaccattatcggatagaaagagtatgatgctgttttggagcatttcctgtctggctagggcgtcgattacagatcccacacttttatccagtctggaaaccatggcggcgtagtaacgatgggttttattgctaatgtattcaaatcgggacacctcctctgctggtgcctgcatgggatcatcatcatttgcagcatgtggagccagatgattcaaaagcagaaacaggggctggctactatttttcgatccatgatcctcaatttccttgacggcagcatcagtgagcaaatcggtgacataatgacccacgtgatcgtgggtggatttaagactgtctcggaaatcgtgaccattgtatcccttattctgaaaaaaacaaaaatattgaaggtttcaataaattacaatagaaaattgaaaaaatatgaaaaatgtgatgtatgtataaacaatatttgtaagcaagataattttgaatttttaccactgtaaaagtgttattatttttcgaaagaatttaaaagaaggaaacttgcactgcagctagctgagtaacacgggtatgcgtttttgaataatagattcgtttcctaacttatccttacctgttgttcataactctgggtgtagtagtccacataggccccaaggtatcccaagtgacgatcgaagcccctttccgtaggcgtaaaattacgctgtgacaaccccaaatgccactttccaaggagacttgttcgatatccgttttcccggaaaatctccgccatggtagtctcattgagtggaagaccccaaggctgatcgttcacaatcacataatgctgcattcctaaaagtaagttacagttataggatcactcgggaatatatttctattatcatcgaagcctaaacttgcccgtatttataggatattttccagtcagtagagctgctctactgggtgtgcacattggagctacatagagattattaaggatcactccgctatatgccaaagcatcaatgttgggagtgaggaaattattggaaccgcgaaagctaacgtcgtcaaaaccctgtcgtaagctgacgttaagtatttagatcgaataattatcacgtggtgcctaccagatcatctgccataataatgatgatattgggcttatcggatgtggcaacaattccatttgataaggcaatacataaaacaaagccagttaacaacgaggtagcactgctgaatttatccagatgagttgacatcgccgtgaatggagtgaggatgatgtgggacagcttgtagaaaaaaaaaacaaataaatgagaattagtgcatataagcgtttaaaaaattaacataccaaatgggcgacaacaagtcagcgggtaacactctgtcaatgatggatgagctcttcagatcgttccggatatattagcggtataatgcttttcaatttaaccaatttggtcaggcttttaataaatagttaattttgggaaatttctgccgctcaacaactaacttatcaactaaataacatctagctgaaaaataaataaagtacacccaatatatgtaaatactgatatacagtatgcaaacagcgtggcaatgtgcacttaggcaaatgttttcaacaaattaggcgtaattaaagatcacagcaactacgagtaaacgcaaatgagatgagtaggaagttgtttatgatcactgctaaaatatcggcctgggaaagcgttctctaccaactcaattgttttttttattattttgaagtattaaactcttcagcaatcgtttctcataatacatatgtttcaaactaacatgtttat

SEQ ID NO: 16568 - DNA, 1461 bp, DROSOPHILA
atgcagcattatgtgattgtgaacgatcagccttggggtcttccactcaatgagactaccatggcggagattttccgggaaaacggatatcgaacaagtctccttggaaagtggcatttggggttgtcacagcgtaattttacgcctacggaaaggggcttcgatcgtcacttgggataccttggggcctatgtggactactacacccagagttatgaacaacagaataagggatacaatggtcacgatttccgagacagtcttaaatccacccacgatcacgtgggtcattatgtcaccgatttgctcactgatgctgccgtcaaggaaattgaggatcatggatcgaaaaatagtagccagcccctgtttctgcttttgaatcatctggctccacatgctgcaaatgatgatgatcccatgcaggcaccagcagaggaggtgtcccgatttgaatacattagcaataaaacccatcgttactacgccgccatggtttccagactggataaaagtgtgggatctgtaatcgacgccctagccagacaggaaatgctccaaaacagcatcatactctttctatccgataatggtgggccaacacagggacaacactctaccactgcctctaattacccactgagggggcaaaagaattccccctgggagggtgctctgcgatcctcagcggccatttggagcactgagttcgagcggctgggaagtgtttggaagcagcagatctatattggcgaccttttgcccacgttggcggcagcagccggaatatccccggatccggcgctccatttggacggattgaacctgtggtctgccctcaagtacggatacgagtcggtagaacgggagattgtccatgtgattgatgaggacgtggcggagccgcatttgtcctatacgcgtggaaagtggaaggtgattagcggcactaccaatcagggtctctacgacggctggcttggtcatagggaaaccagtgaagtggatcctcgcgcagtggaatacgaagaactcgttcggaataccagtgtctggctgcagttgcagcaggtgtcattcggagagcgcaacatcagcgaactaagagatcagagcaggatcgaatgcccagatcctgcgacaggagtcaagccctgcttgcctctcgagggaccctgtctcttcgatattgaggctgatccctgcgagcggagcaacctatatgcggagtatcaaaactcgacaatctttctggatctttggtcgcgaatccagcaatttgccaaacaggcacatcctcccaataacaagccgggggatcccaattgcgatccacgattttaccataatgagtggacttggtggcaggacgagaaggcttccagttcagggactatcggggtaatgaaagtctttaccctgttagtggtattcatcttcacgagcagttgtattaattaa

SEQ ID NO: 16569 - protein, 486 aa, DROSOPHILA
MQHYVIVNDQPWGLPLNETTMAEIFRENGYRTSLLGKWHLGLSQRNFTPTERGFDRHLGYLGAYVDYYTQSYEQQNKGYNGHDFRDSLKSTHDHVGHYVTDLLTDAAVKEIEDHGSKNSSQPLFLLLNHLAPHAANDDDPMQAPAEEVSRFEYISNKTHRYYAAMVSRLDKSVGSVIDALARQEMLQNSIILFLSDNGGPTQGQHSTTASNYPLRGQKNSPWEGALRSSAAIWSTEFERLGSVWKQQIYIGDLLPTLAAAAGISPDPALHLDGLNLWSALKYGYESVEREIVHVIDEDVAEPHLSYTRGKWKVISGTTNQGLYDGWLGHRETSEVDPRAVEYEELVRNTSVWLQLQQVSFGERNISELRDQSRIECPDPATGVKPCLPLEGPCLFDIEADPCERSNLYAEYQNSTIFLDLWSRIQQFAKQAHPPNNKPGDPNCDPRFYHNEWTWWQDEKASSSGTIGVMKVFTLLVVFIFTSSCIN

SEQ ID NO: 16570 - DNA, 3729 bp, DROSOPHILA
taaacattctttacctttaataaaatgatgttacacatagactattataacggtttctatcaatcttattgcgatctcaaaataattttcccatcatccatttaaagtaaatatttattgcagtctaattatgaattcattatttaaaatcgctgattctttaagttgtcccaatttgccgagaagaaagcaatcctcagacttgtgccgcgccgagtgccgtggcaattgtccttgtctaatgggggctctgcagcattggcaggattccttcattgcccgccttctgcgccgtgttcgtcatgtgggatgttgggcggctacactgccacgccccccattctcgcgggcgcatgaaaaggcgcatggccacttaaggcgcagttcgcccaccgcccacactgcgccccttcgagtggctttaattgtgaattaagacggtattgtgcagcgagcgactgggacgacgacaggtatcgctgtctatgtcctgcggccagggttgccaggctgcattcggacttgctttcgatggctcccaatgccgaggctatccattgtcgacggcaaatgccccattgtctcttggtctcggcccctattttatttacttggttaagcggcataattgttactattttcgtgccaatcgctctcgatgcattgtcaatgccaagacgacccttcgaaagcctttgatcctttccacctgatggcaaggtcacggacgataccggaatatcgtttcaagttgtttgcatcggcgtagtcccattgtcaccctttgggcaggaagaaccatgaaactaatgctcattcttattgtaaataggcttcaggaaggtctcgcggaaactcaatatatacgtaaaaaaggaatatataaaaggatttgttagtgttgttgattagggatctttatggcaccttataccttaaatctttaaaattagaaattatataatagtatattttccacacagaaagagctcacattaaaatggtgttccaaataataatcctggtgatctgcaccatctgcatgaagcactacgccaaaggggagtttcagtgagtataaacttaaagaacgaacgaatatcgaactgaagttatcctgttcaaccagacaaagtctggccataaccgacatcctgcccgaggacatcaagcgttacgacaagatgagaccgccgaagaaagagggtcagccgacgatagtctacttccatgtgacggtgatgggtctggactccattgatgagaactcgatgacttatgtggcggatgtgttctttgcacagacgtggaaggatcatcgcctgcgattgccggagaatatgacacaggaataccgcctgctcgaggtggactggctaaaaaatatgtggcggccggattcgtttttcaaaaacgccaaatcggtgacctttcagaccatgacaatacccaatcactatatgtggctgtacaaggataagaccattctgtacatggtcaaactaacactgaagctgtcctgcatcatgaacttcgccatttatcctcatgatacacaggagtgcaagctgcaaatggaaagccgtaagatttcgttaactggttttcaccggtgaatcagctgaatagaaatcgctgatgcgtcattgctttccatttatagataatatttaaatctaaaaccttttttttagtgtcccacaccacggatgacttgatattccagtgggatccaacaacgccccttgtggttgatgaaaacatcgaactgccgcaggtggccctcatccgaaatgaaacggcggactgtacccaagtttattccactggcaacttcacatgcctggaggtggtgttcacccttaagcgtcgtttggtttactacgttttcaacacctacattcccacctgcatgatagtgatcatgtcatgggtatccttctggatcaaaccggaggcggcaccagcccgtgtgactctgggtgtcacctccttgctaacgctttccacgcaacacgccaaatcgcagtcgtctttgccacctgtttcctatctcaaggcagtggacgcctttatgtccgtttgcacggtgttcgtgtttatggccctcatggagtattgtctaataaacatcgtcctgagcgacacgcccattcccaagccgatggcctatccacccaaacctgtggcgggagatgggcccaagaaagagggcgagggtgctcctcctgggggcagcaactcgacggccagcaagcaacaagccaccatgttgccactggccgatgaaaagatcgagaaaattgagaagatctttgacgagatgaccaagaatagaagggtaagttgataatccttcagttgatacaaaggaataacattgatagatagtttgcagtgcagaagtttcttttttaatatcaaataattttgtatattttcagattgtaaccaccacacgccgcgtggtgcgtccgccattggacgccgatggtccgtggattccgcgacaggagtcgcggataatactgaccccgactatcgctccgccgccaccgccccctcagccagcggcaccggaaccggaactgcccaagccgaaactcacacccgcccaggagcggctcaagcgggctatatatatagatcggtcctcgcgcgtccttttccccgccctcttcgccagtctgaatggcatctactggtgtgtgttctacgagtatctataaggactacgacgactgtgccctgtaaatactttcgctagctctctggcactccatccgagtgttaaacgttgattgttcgcatatatcgaaacgtgtatcgcaaatttaatcttaagctttcacgcacaagctttaagtcaatgaattttaaacatagattattgttaaaccagaaggatggaaaaatgggacagatggagatctgattacaggataaattacaaattatcaattcaattcctaaaatgcttaaagttaatcaagtgacgtagtagctgatgtagcctaagtgaattgtaatttaatgtctcaaacaaatgcttttaattgtaaataaatagagaatccatttaacaatagttgttgttgcgtatatcattgtactaaaactttgggacaagataatttgtaccaaaacccttgatattgaaagctttttcaattcaaaagcttaaattaagctctgcgaaaaggattcctttatttagatacaacttatgtgtaatcttggcttgcgtgcccatttgcattactatttctcagccggttggctagcccattcattttttagcaccattttcttcttttatttttatagtgccagttatatctttatttcgcgctgctttttcttttaaaggtgtcaactttggatggaacaatggaacttgctcgattttctaccgcctgcagtcttcaaacagccgcagggtgaagagaaacagacttatgaatacccaattaattatgttggtcacacgctccacacttttgccttttcacggtcgttagtgacgctcgagcaaaaactatgatagggttaaaaaacgaaaacaaaatcaagcacttgggctaaagatgtgatgaagactaccagctgggagctatagatacatatgcgcgatggcagttgtagattaaagccaaagccttgccaccatatttccactcaaattttcttaatttttatgggtttctcccccctattcaatgatcaatc

SEQ ID NO: 16571 - DNA, 1458 bp, DROSOPHILA
atggtgttccaaataataatcctggtgatctgcaccatctgcatgaagcactacgccaaaggggagtttcaacaaagtctggccataaccgacatcctgcccgaggacatcaagcgttacgacaagatgagaccgccgaagaaagagggtcagccgacgatagtctacttccatgtgacggtgatgggtctggactccattgatgagaactcgatgacttatgtggcggatgtgttctttgcacagacgtggaaggatcatcgcctgcgattgccggagaatatgacacaggaataccgcctgctcgaggtggactggctaaaaaatatgtggcggccggattcgtttttcaaaaacgccaaatcggtgacctttcagaccatgacaatacccaatcactatatgtggctgtacaaggataagaccattctgtacatggtcaaactaacactgaagctgtcctgcatcatgaacttcgccatttatcctcatgatacacaggagtgcaagctgcaaatggaaagcctgtcccacaccacggatgacttgatattccagtgggatccaacaacgccccttgtggttgatgaaaacatcgaactgccgcaggtggccctcatccgaaatgaaacggcggactgtacccaagtttattccactggcaacttcacatgcctggaggtggtgttcacccttaagcgtcgtttggtttactacgttttcaacacctacattcccacctgcatgatagtgatcatgtcatgggtatccttctggatcaaaccggaggcggcaccagcccgtgtgactctgggtgtcacctccttgctaacgctttccacgcaacacgccaaatcgcagtcgtctttgccacctgtttcctatctcaaggcagtggacgcctttatgtccgtttgcacggtgttcgtgtttatggccctcatggagtattgtctaataaacatcgtcctgagcgacacgcccattcccaagccgatggcctatccacccaaacctgtggcgggagatgggcccaagaaagagggcgagggtgctcctcctgggggcagcaactcgacggccagcaagcaacaagccaccatgttgccactggccgatgaaaagatcgagaaaattgagaagatctttgacgagatgaccaagaatagaaggattgtaaccaccacacgccgcgtggtgcgtccgccattggacgccgatggtccgtggattccgcgacaggagtcgcggataatactgaccccgactatcgctccgccgccaccgccccctcagccagcggcaccggaaccggaactgcccaagccgaaactcacacccgcccaggagcggctcaagcgggctatatatatagatcggtcctcgcgcgtccttttccccgccctcttcgccagtctgaatggcatctactggtgtgtgttctacgagtatctataa

SEQ ID NO: 16572 - protein, 485 aa, DROSOPHILA
MVFQIIILVICTICMKHYAKGEFQQSLAITDILPEDIKRYDKMRPPKKEGQPTIVYFHVTVMGLDSIDENSMTYVADVFFAQTWKDHRLRLPENMTQEYRLLEVDWLKNMWRPDSFFKNAKSVTFQTMTIPNHYMWLYKDKTILYMVKLTLKLSCIMNFAIYPHDTQECKLQMESLSHTTDDLIFQWDPTTPLVVDENIELPQVALIRNETADCTQVYSTGNFTCLEVVFTLKRRLVYYVFNTYIPTCMIVIMSWVSFWIKPEAAPARVTLGVTSLLTLSTQHAKSQSSLPPVSYLKAVDAFMSVCTVFVFMALMEYCLINIVLSDTPIPKPMAYPPKPVAGDGPKKEGEGAPPGGSNSTASKQQATMLPLADEKIEKIEKIFDEMTKNRRIVTTTRRVVRPPLDADGPWIPRQESRIILTPTIAPPPPPPQPAAPEPELPKPKLTPAQERLKRAIYIDRSSRVLFPALFASLNGIYWCVFYEYL

SEQ ID NO: 16573 - DNA, 5040 bp, DROSOPHILA
gaggcctacgaagagaactccaccgaaagcgaagttgagctaatcgaggaacagctgcccgagcacagctacaaccacctgatgggccagctcaaggccaagaggctccagcataagatggagaagaccctgactcccagccaaatcgaggaggagcgccgaatagagcgcgagcagctggcggccatctttgagctcctgcgcaaacaggaggcggaattgaacctccaggaccgaataagcgaccaggatctcaagcagcaggtgcggctctatcgctgaagtggcgccgagcctgggctcaccctacctgaatgtacagacttgtgtgatctattagtttaatgtttaaaattccaagatttggtgttgcctcatacggtccactaagtgcgggcaagtctttagtcagagagctatctcatcagtcgatgatgtcggaatataatatcttagttgtatgtaaattatatgtattccacttcgatctatgtattttgtgagttcctggtgttattaatatctgatttagatttgtagtaaatggctgttcggctcttagtctcttaaatcagctttcgaattaagaatatatgtatatattttaacgtgttacaagataaaaactcgcgatcagaaagtgtatagatttaaacacaattaatcgccaaattcgttggttagatttaaattgtgttcatataactttggatttatttgttcaataaagaatgtttagctgtgttaagatgtaatatatactctaaatatttcctaccgtttcctagccaaatatccgaaaataaccgctcatattttatatgccgcgattggatttttgaaaataattgttctaacatatagattccatcagcacaccttcgattggagcagtcgaaatgcttagcgtttctgttccaaattttttagtactaaaatgtttttaaattcacgtggagcagatattttgttggagttctaaatacgttcggtttggtttggttgatgtttaaacgtgtcgttgtggcgccaatgcccatgcatgtttactatcgcttatcgatacaccgcgtacacggcaaccgtgtgtgaccaattcaagcacgaaatcgttgaccaacactgattgtacatcagacgacacgacaacaaaaacaacagcaacaacaccaccgacgtgcttgttcctgtgtgtgtgtgcgtgtgagattggaagacaatggctgcagctgcggatctggttgttcctacccttgccagtgagtatagcccggatgcaatccccgccaggtggtcactgaggtgccgtcgactccttggagcatcgaaggcagccgattgggccgcccggttagcggaaaaactggaaaaaccgcgcgacctcgtgtttccacctgctaatcggggtcacctctcgattctcatcaacagttcgctctagcgtggccgtggaattgtggtcctcggcgggctccaagcagcccttcgagcacaagccccacctgccgcgcgaggagacgaagagctcgcgctcgatctgcttcagctccaacggccggtacttcgcctactccaacgggcaggaagtcaaggtgctccaggccagccgggacagcgcagccagctggccagtgatatgcgtgctgcccaggccgaaagccttctacctccaattctcgccacgtggcagctacctgtgcacctgggagcactatgccatcactaaggaccggccggaggggtcacccaatctgctcgtctacgaagtggccaccggtgtcgaagtgtttgccatcgtccagaagaaccaagcggactggcagccctcctggtcggcggacgagtccatcttcgctttggtagtcggcggcgaggcactcttctatgacctcggcgagggagcggagaagggattcgccaccacatcgcgcaagataggaggcagtcgcggcggtatgctgtcgctgggtcccggtaactgccccccgttccttgcgttctacacgccgggagccaagggcgctccgtccatgtgcaagctctacaagtacccggcgcttggccagaatcagaccgtagcctgcaagagctttttccaggcggatcgcgtcgagatgttgtggaacaagcgaggcagcggactgcttctcctaaccagcacggaagtggataagagcggtgcctcctactacggcaaccaggcggtgcacttcatggcaaccaagggcgacacctgctcagtgcccctctctaaggagggaccggtgcattgtgtcaagtggagtcctaaggcaactgagtttgtagtcgtatacggcttcatgccatccaaggctgctctctacaacctcaagtgcgacgtagtcttcgacttcggtgagggtccacgcaactgtgcctacttcaatccatttggcaacctcatagctctcgccggcttcggcaatctgcctggagccgtcgaggtgtgggatgtgtccaagcgcgagaagctggctaacctcaagtgtgctgataccacggtttttgagtggcatcccaatggcgagtggttcgtcacggccaccaccgcgcccaggctgcgcattagcaatgggtaagtggatccatccaagtgcatattgtgcatactaccattaaagcaaatttctcgcaggttcaaggtgtaccactactccggggccctgctccacgagaccatgtggccccagggtcaggaattgttgggaattgagtggcagcagtttgcggataagacgttcagcgagcccaagattaccaaggccaagcacgagggcatcaagtccagccagccagaggccagcaagaaggcttacacaccgcctcatctgcgcttgttgaaggagggcaagaatccggaaaagtatctgccccagccgagtattcccggactggcaccaacggcagcagcaggtaatacgacgcggaagttttggcacaggcaatacgacctggacaatccgattatgcggcgaggcgagcagggccagtgccagctggtgggggcgattggcgcggaaagaccaccactgtctaccgggtcctcgaccagccgccacaacaggcgctatcgaccctaccagcacaaacgctactaggctcacgacacacgcagcttgtcagctcctaggctccactcacctctttcacacacattttgtattagcatgccattaggattagggattgcgcggtcgtaagtaggctcggctgtgtgtttgctaattgctgtttgcatttctatttacctgcaggtggtgtcaacggaaacaagaggaataacaagaacaaacagcgaagcgctaggaaggatgtgaacgttgtaaatggtggcgatgcggattctgccccgactgaggtggtcgatcaagctgctccggttgctcgccagtcgcccgttttcgtggctgcagaggagcggaagccgcagcatactcccagacagaagtaccagccagataacgctgccgatcagccaccgaattcgtatggacagggtcatcccaatggccagcacatcagcgataaggagcgcaagattcgcagcgtcgccaagaagctgtcggacattaagaagctgaaggtccgacgcagccagggcgagaatctggagctgaaccaactgaacaagattaagatggaagcacagtacctggatgagctcaaggctctcaagcagtctgcctaggaggacgttaatggcgttgacgatgacgacggcggcgagaaggctgagggatgcgaggagtaattgctcttgtgattgtgatacagcacctcttctcagctccactccactctactcacctcctgttcgtccccttcctgctgttttacgctcagtttgtggcccatttgccgcataagtttcaagttaaaacatttttctactattgtgatttcccaactaatttcggcaaaacgtacagtaactcccgtaaacaacaaatttatgtaccaaattgtgctaccaagtaataaagatgtttccaccaaaatctgcggattactgctcccaattcgacttcttcttgatgaacttctcctgtccgttctcctggacagccacatagtatcccaagctctcgtacttgtacctcatatacgcgatgtagccgaagaccccggcaatcgcggtcagtcccaggcccatgataatcttgttctgaaagccaatatggtatattgtacaattcgttacaatccaatcaaagtttaaatgaaaccgcaccggcttggtgtacaactcgaagttgatcagccggaagactccggtgcttcgcatggatcggatgccatcgccaggaccctgctgctttccttcgctcatcctcgtcgtcttctccactaaatgctctgcacaattatattgtaaacacaaacatgtgaaaggaatgggatttggaatagtgtgaccatcgaactgcaaagtaccctctatgtaaggcacagtgaagattgccactgatgtgacaccttggttccttctaaaaaattgtaatcattaaaaatctacttaacaatccatttgaaaatgaaaatgctatttgtctaaaaagtaatgtttccaaggatcaaatattaattgggggatgtttttggaacacacaactgttgaatattttgaaacagctgactgtgtaagtaatgtttccaaggatcaaatattaattgggggatgtttttggaatacacaactgttgaatattttgaaacagcttactgtgtaagatagccattcacagtgaaatttcaatttcgaaaaaaaaaaacagcttataggaccaatatcaacaaaatgcctttgaaccgcgctatttatcttaatttacttgaatactccgatgaagacgagggcttatggcctcggaagctaaggatccaccaaagtacacacaacttccaagagcttcaaaagccagtagattagtggttttacaaaaaatatgaaaacggttggagcatccgaattcgggttcgtttgttgactgacttcaagaggaaccctctttgacgcac

SEQ ID NO: 16574 - DNA, 2467 bp, DROSOPHILA
ggttgatgtttaaacgtgtcgttgtggcgccaatgcccatgcatgtttactatcgcttatcgatacaccgcgtacacggcaaccgtgtgtgaccaattcaagcacgaaatcgttgaccaacactgattgtacatcagacgacacgacaacaaaaacaacagcaacaacaccaccgacgtgcttgttcctgtgtgtgtgtgcgtgtgagattggaagacaatggctgcagctgcggatctggttgttcctacccttgccattcgctctagcgtggccgtggaattgtggtcctcggcgggctccaagcagcccttcgagcacaagccccacctgccgcgcgaggagacgaagagctcgcgctcgatctgcttcagctccaacggccggtacttcgcctactccaacgggcaggaagtcaaggtgctccaggccagccgggacagcgcagccagctggccagtgatatgcgtgctgcccaggccgaaagccttctacctccaattctcgccacgtggcagctacctgtgcacctgggagcactatgccatcactaaggaccggccggaggggtcacccaatctgctcgtctacgaagtggccaccggtgtcgaagtgtttgccatcgtccagaagaaccaagcggactggcagccctcctggtcggcggacgagtccatcttcgctttggtagtcggcggcgaggcactcttctatgacctcggcgagggagcggagaagggattcgccaccacatcgcgcaagataggaggcagtcgcggcggtatgctgtcgctgggtcccggtaactgccccccgttccttgcgttctacacgccgggagccaagggcgctccgtccatgtgcaagctctacaagtacccggcgcttggccagaatcagaccgtagcctgcaagagctttttccaggcggatcgcgtcgagatgttgtggaacaagcgaggcagcggactgcttctcctaaccagcacggaagtggataagagcggtgcctcctactacggcaaccaggcggtgcacttcatggcaaccaagggcgacacctgctcagtgcccctctctaaggagggaccggtgcattgtgtcaagtggagtcctaaggcaactgagtttgtagtcgtatacggcttcatgccatccaaggctgctctctacaacctcaagtgcgacgtagtcttcgacttcggtgagggtccacgcaactgtgcctacttcaatccatttggcaacctcatagctctcgccggcttcggcaatctgcctggagccgtcgaggtgtgggatgtgtccaagcgcgagaagctggctaacctcaagtgtgctgataccacggtttttgagtggcatcccaatggcgagtggttcgtcacggccaccaccgcgcccaggctgcgcattagcaatgggttcaaggtgtaccactactccggggccctgctccacgagaccatgtggccccagggtcaggaattgttgggaattgagtggcagcagtttgcggataagacgttcagcgagcccaagattaccaaggccaagcacgagggcatcaagtccagccagccagaggccagcaagaaggcttacacaccgcctcatctgcgcttgttgaaggagggcaagaatccggaaaagtatctgccccagccgagtattcccggactggcaccaacggcagcagcaggtggtgtcaacggaaacaagaggaataacaagaacaaacagcgaagcgctaggaaggatgtgaacgttgtaaatggtggcgatgcggattctgccccgactgaggtggtcgatcaagctgctccggttgctcgccagtcgcccgttttcgtggctgcagaggagcggaagccgcagcatactcccagacagaagtaccagccagataacgctgccgatcagccaccgaattcgtatggacagggtcatcccaatggccagcacatcagcgataaggagcgcaagattcgcagcgtcgccaagaagctgtcggacattaagaagctgaaggtccgacgcagccagggcgagaatctggagctgaaccaactgaacaagattaagatggaagcacagtacctggatgagctcaaggctctcaagcagtctgcctaggaggacgttaatggcgttgacgatgacgacggcggcgagaaggctgagggatgcgaggagtaattgctcttgtgattgtgatacagcacctcttctcagctccactccactctactcacctcctgttcgtccccttcctgctgttttacgctcagtttgtggcccatttgccgcataagtttcaagttaaaacatttttctactattgtgatttcccaactaatttcggcaaaacgtacagtaactcccgtaaacaacaaatttatgtaccaaattgtgctaccaagtaataaagatgtttccaccaaaatctgcggattactgctcccaa

SEQ ID NO: 16575 - protein, 638 aa, DROSOPHILA
MAAAADLVVPTLAIRSSVAVELWSSAGSKQPFEHKPHLPREETKSSRSICFSSNGRYFAYSNGQEVKVLQASRDSAASWPVICVLPRPKAFYLQFSPRGSYLCTWEHYAITKDRPEGSPNLLVYEVATGVEVFAIVQKNQADWQPSWSADESIFALVVGGEALFYDLGEGAEKGFATTSRKIGGSRGGMLSLGPGNCPPFLAFYTPGAKGAPSMCKLYKYPALGQNQTVACKSFFQADRVEMLWNKRGSGLLLLTSTEVDKSGASYYGNQAVHFMATKGDTCSVPLSKEGPVHCVKWSPKATEFVVVYGFMPSKAALYNLKCDVVFDFGEGPRNCAYFNPFGNLIALAGFGNLPGAVEVWDVSKREKLANLKCADTTVFEWHPNGEWFVTATTAPRLRISNGFKVYHYSGALLHETMWPQGQELLGIEWQQFADKTFSEPKITKAKHEGIKSSQPEASKKAYTPPHLRLLKEGKNPEKYLPQPSIPGLAPTAAAGGVNGNKRNNKNKQRSARKDVNVVNGGDADSAPTEVVDQAAPVARQSPVFVAAEERKPQHTPRQKYQPDNAADQPPNSYGQGHPNGQHISDKERKIRSVAKKLSDIKKLKVRRSQGENLELNQLNKIKMEAQYLDELKALKQSA

SEQ ID NO: 16576 - DNA, 2375 bp, DROSOPHILA
tttttttatgtgtacccttttgtgagttcaactaacgcgtttcctgccaatctcttgcaggttttcgtctgcttgctggcggtgtgcagtatggcccatgcgggtttcctgggcggcggcggcgcaggaggtagtgccctcagctccggctggtcatccggcggaggaggaggaggatatagcggcggatacagtggtggccatggaggaggtggtggctacggcggtggtggctacggcggtggtggctacggcggcggtggccacggaggcggcagcacgattaagatcatcaaggtgatcaccgattccggagctggtggtggtggctacggaggtggctacgggggtggccatggaggtggctatggaggtggctacggaggcggctcctccggtggttacagtggcggccacggaggcggttggtcatccggcggtggatacggcggtggtggctacggaagcggtggcaacgtcaagatcatcaaggtcatctccgacgccggatcgagcggcgggtatggcggcggctacggcggtggtcacggtggtggatactcctccggcggtgcctccagctactccgccggcggttgggctcctcagggcggttgggcccagagcagttggtaaatgctctccgttggtcaacggatactaacttgttactgtttctcactgaccttaattgtaaatacttcccaacattaaccaataaaacagtgcggtatagaagagccatttccactatcaaaacagaaactaatgtttcttttttagtaataatccgatatagagattctcgatataaatccaccttgtaattccaagaaaattcgttttcaagattgtaagagctgctgatgcatcgcttacaatcagtcagctagcaaatgaacctatcaaaaggttacactaaaaatttgcaaaatgtacaataggtggatctcccatatatgatgccctgtcaggagttacgaggacatccccaaggacctcagtcccgcgccaggagccgtctaatgtcctcctgctcggcggcctccgcgtagctctgcccctcgggcgtgcgctccgtgcggctggctcccatccggagcaggaactcgacgcagcgtgtatgcccctcccatatggccgccaggagcggtgtgatgccgtacttgtccttcctgtccacctccgcgccgatccgcacaaagaactccagcagcttcagctggccaaagtcggcggcgtagtgcaaggggaaccggacgcccatctgatcgttcacattaagcgatccggctaggaaaattcgctccacctcgtcgtacacgccgttcttgattgtccagatgatgtcctcgattttgtgtccatcgcccatcgtgatccgtttgactcagtttttatccgtattttaagcaatgcgattcataaaatctaatgatttcaatagtagtacgtacgtatgctcaattctaaagttgacgtgctgggttactttgatgtttgtgttcctaaacaaaagtgcccttttacatcgttaaagctgcgttcggcaagcaattagaggcattaaaagtttgccgtttgtaggtgcttttaaaactataacaacatacatcccattgaatctgtcaaagttttctatgacctcgtcccgtcgtcataaaattgtcccccattttatttatcgatggtaacccacagaatttgacagttgtcaggtgctgccgttgttggcaatgttttatatttgtgttttttcattcgggctttggttttttgtgttgtgttaacccttcgttaaccccatacgcatgtcgggccatctgtccccgtcctccagtcagtgttcatggtacatatagcccgccaccgcccaccaaatggtagggcttcctacgcgccagacgcaatttgtatgcaaatttccatgagaatctcaacacatgcaataacagcaacaacacaaaggacacacgagcagcagcagcagcggcagtggcaacaaaaaattgactgagcgtgaatgcagagcggggggttttggcaaccaattggttacaaatacataataagaaacggacagatataaaatggcagagaatggggtatgagtatcgggatgggcaaagattaccattccgaaagtgaaacgttaaaaagtgtccaacaagttgaaatcttaaggagagcgcactttaacagcaaccgagtttaggtagttgaagtttgagataccagcggttcctagaaataggatatagcaaattcaacggagtggacccaggacgtaaatgctttgaaaagcgcatagaagagcgtatattaagcggagattaaagacgaaatagtttacgtttaagataccatatacggtt

SEQ ID NO: 16577 - DNA, 375 bp, DROSOPHILA
atgggcgatggacacaaaatcgaggacatcatctggacaatcaagaacggcgtgtacgacgaggtggagcgaattttcctagccggatcgcttaatgtgaacgatcagatgggcgtccggttccccttgcactacgccgccgactttggccagctgaagctgctggagttctttgtgcggatcggcgcggaggtggacaggaaggacaagtacggcatcacaccgctcctggcggccatatgggaggggcatacacgctgcgtcgagttcctgctccggatgggagccagccgcacggagcgcacgcccgaggggcagagctacgcggaggccgccgagcaggaggacattagacggctcctggcgcgggactga

SEQ ID NO: 16578 - protein, 124 aa, DROSOPHILA
MGDGHKIEDIIWTIKNGVYDEVERIFLAGSLNVNDQMGVRFPLHYAADFGQLKLLEFFVRIGAEVDRKDKYGITPLLAAIWEGHTRCVEFLLRMGASRTERTPEGQSYAEAAEQEDIRRLLARD

SEQ ID NO: 16579 - DNA, 4282 bp, DROSOPHILA
ctttttccggatggcttccaacctctggctctccgtcatcagctaccatacgtggaaagtcttgacgtcgctcaatcgagtcgaccctaactatcggttcctgcggtacaacgccttcgtctggagcacagccgcaatcatgacgggaagtatttatatagttaatcagatttgggaaaacgatcccagtaaatggaactggttgcctctggtcggttttattcggtgctcggtcaaaggtaaactttcaatgcgattgcttttaaatcgttaccatggttacgtattgcttttccatatcagattggcacccatccgtctggatctatataagtggaccgtcgctggccctgagcactttcaatgtcgccatgttcgccctgacagccatttacattaggaaagtgaaggggggtataaataagttcacaaatgaggaggagggaaggattaactgcataaactttgacagccagacgtaagatatgataaaaccttggaccttggtaaactagttatccttgccgtattatccacatagttacctacagttcctgcggctctccatcgtgatgggccttacttggatattcaatgtcattccgtattctgcacggctccacattttctgggaatgggtcgggataatatccgagtattttcacagcgcgtttggaattgttttgttcgttctgctcgtcctgaagcgcagcacatggactctaatgatggattcttaagcttgtttctatataattctaataattgtttacaattaaagctttaaacaattaaagcccctcattttattaatatcctttgctgaacgaaggaattgaattgaattttattgaactcaataaataaatatagttttagaaaacgatgtactttaaactgccaagaggtcaccgcgacaagcttttcacttcgccaccctctggtaacactgattctccagccactttcgattctttaaaaaacatcgataggtatcgccaaaaaaatcagctgctctgcttgtagttttgcgatttcattgcaattttaatttgctttactgttcaaaaagaaatacagtgcaaaatatgccgaacgaaaacgcagaggacctctcgggtcaagagctaaagcagaaggccaaggaggtggccgacgcatcggaggcaatgctcgaaaaggttgttgccggcttaaatatccaggacacggcatcgacgaatgcagcaggaaacgaggatgcggagcagcctgatggtgccaagaatgaggcttcagtgtctgcgaatgcaagtaagttttcaatatgcctgtgaaaagtcatttagaggctcctcctgcggctgaaaaaatgaggttaggttttgtcgggaactacagtccaacctctctaacttgaactgctgtgctattcatttcaattcaattttcaattttcattttctgtgcaattactccaaagattagccctaacggaaaaataaacaactcataaatcataaatacatatttgattttgatgaaatatgaatatacttacatagatacaattgagttttttattacgaataaaatatgtgtaatataagatttctaccttgttgattccattgattgatgcttcattgaaaccccaaaattgggcaaatttgttgtcatgggaaactagtccactgtcgtgatgccttaagctttttttggggcagattagtcattccagtttaaactaatcgaaaaatgttataatactattcaacgcatcatcgtttctttcaggcaaacaggccttgctacaagccgtttccgatgctatggccagcacccgtcagatggccaagaagtttgcattttggtccacacagccagtcaccaagctggacgagcaggtgaccaccaacgaatgcattgaaccgaacaaggaaattagtgagattagagcattgccatacactctgccaggcggcttcaaatgggtgacactagacctgaacgacgccaatgatctcaaggagctgtacacgctgctcaatgagaactatgtggaggacgatgatgccatgttccgtttcgattaccaacccgagtttctaaagtggtcgctgcagccacctggctggaaacgcgattggcatgttggcgttcgtgtggagaagtccggcaaactggttggcttcatctcagccattcccagcaagctgaagtcgtacgacaaggtgctaaaggttgtggacatcaacttcctatgcgtccacaagaagttgcgcagcaaacgggtggctccagtcctgattcgggagataacgcgtcgcgtcaatctgacggggattttccaggcggcctatacagctggagttgtgttgcccacgccagtggccacctgtcgctattggcatcgatcgctcaatcccaagaagctggtagacgtgcgtttctctcatctcgcacgtaacatgaccatgcagcggacaatgaagctgtacaagctacccgatcagcccaagacgaagggctatcgccgaatcacagcgaaggacatggacaaggcccacaagctgctggaggactacctaaagcgctttcagctgagcccggtgttcagcaaggaagagtttcgtcattggtttacccccaaagaaggtattatcgattgcttcgtggttgccgacgaaaagggcaacatcactgatctgactagctactactgcctgccatcgtccgtgatgcaccatccggtgcataagacggttcgtgccgcatattcgttctataatgtgtctacaaagaccccgtggctggacctgatgaacgatgcactgatctcggcccgcaatgtccagatggacgtgtacaatgccctcgacctcatggagaacaagaagtactttgcaccgctaaaattcggcgccggggatggaaacctgcagtactacctctacaattggcgctgtccatcgatgcagccggaggagattgctctgatactcatgtagtcaccttgtcacctaagctcacattctcgccctgcctttcacagctcccctcctccgctttcttcaccctgctggaagtgccgtgcggctgctttgctttgctcctatttacgtagctattacctgtaatcttcagttattccagcgaggaaagccctttgcgagcatacacctaaatagcatcattgtgaaaattgcattttgcaacggccaagcttcgatattttttactacaagaacgaacacaaattgtataaaatgcgcagcaatatcaataaaaatgtaacgtttacttggacctttattgcctataattgacaataaattattttgctgctcttttaaagatgacaagtttttattttttttaagcagattattgtatttttgcccactgtcccagcatgtgatagtctggccactctgtcacatggccattggtctggcaaggtcggtgaaaaagcgcgcgctaagcaaaacagctgcacttgtgttggtttattagttaacgaaatctgattccaatgttggtttcctcataatattgacaattaaagacagccgccgacatggacgattcggtgttcaagctaaaataccaaaagtacaagttgcgcgtcaaggtgtgggagaaggacttcaagaagaagaatggccgtgttccatcgaaggtgagattgggatgcggatatgacaagtatgctaactggttgacctgttgcagtatgatataagggacgccagtcaggagattcgggactcatacaaaatgtactacaaactgaagacatccttcctggaagagacgctgaacgatgttctcagcgaagatggatacgatattctggagatgtcgcaggccagtgatttcggtgtgagcatgctggaccaggacgtcagtcttaatgaaggtcctcagctaccgttggatatatctgcactggtggggccgcagagctctggtaatcttgaggaaattccacaatcggtggagggctcattctcaaatctcatcgacctgcccaatcgtcaagtactcaccaatctggtcaatcgcgatgaaaaccatgtcattcgcaaattcgaggcggtggaggagctgccaatcaaccaaaatgcctggggcttgaatgtgagtaagaagccaccagctccaccacagcctgtagaggcctccaaatccgctccggggcacggaaagcaacccaaagcgggcgctagtcttaagcccagcttgagtgccaagttattccaatcctcacgcggttttgctaaacgaaatccccgaaagc

SEQ ID NO: 16580 - DNA, 1799 bp, DROSOPHILA
aaaaaaatcagctgctctgcttgtagttttgcgatttcattgcaattttaatttgctttactgttcaaaaagaaatacagtgcaaaatatgccgaacgaaaacgcagaggacctctcgggtcaagagctaaagcagaaggccaaggaggtggccgacgcatcggaggcaatgctcgaaaaggttgttgccggcttaaatatccaggacacggcatcgacgaatgcagcaggaaacgaggatgcggagcagcctgatggtgccaagaatgaggcttcagtgtctgcgaatgcaagcaaacaggccttgctacaagccgtttccgatgctatggccagcacccgtcagatggccaagaagtttgcattttggtccacacagccagtcaccaagctggacgagcaggtgaccaccaacgaatgcattgaaccgaacaaggaaattagtgagattagagcattgccatacactctgccaggcggcttcaaatgggtgacactagacctgaacgacgccaatgatctcaaggagctgtacacgctgctcaatgagaactatgtggaggacgatgatgccatgttccgtttcgattaccaacccgagtttctaaagtggtcgctgcagccacctggctggaaacgcgattggcatgttggcgttcgtgtggagaagtccggcaaactggttggcttcatctcagccattcccagcaagctgaagtcgtacgacaaggtgctaaaggttgtggacatcaacttcctatgcgtccacaagaagttgcgcagcaaacgggtggctccagtcctgattcgggagataacgcgtcgcgtcaatctgacggggattttccaggcggcctatacagctggagttgtgttgcccacgccagtggccacctgtcgctattggcatcgatcgctcaatcccaagaagctggtagacgtgcgtttctctcatctcgcacgtaacatgaccatgcagcggacaatgaagctgtacaagctacccgatcagcccaagacgaagggctatcgccgaatcacagcgaaggacatggacaaggcccacaagctgctggaggactacctaaagcgctttcagctgagcccggtgttcagcaaggaagagtttcgtcattggtttacccccaaagaaggtattatcgattgcttcgtggttgccgacgaaaagggcaacatcactgatctgactagctactactgcctgccatcgtccgtgatgcaccatccggtgcataagacggttcgtgccgcatattcgttctataatgtgtctacaaagaccccgtggctggacctgatgaacgatgcactgatctcggcccgcaatgtccagatggacgtgtacaatgccctcgacctcatggagaacaagaagtactttgcaccgctaaaattcggcgccggggatggaaacctgcagtactacctctacaattggcgctgtccatcgatgcagccggaggagattgctctgatactcatgtagtcaccttgtcacctaagctcacattctcgccctgcctttcacagctcccctcctccgctttcttcaccctgctggaagtgccgtgcggctgctttgctttgctcctatttacgtagctattacctgtaatcttcagttattccagcgaggaaagccctttgcgagcatacacctaaatagcatcattgtgaaaattgcattttgcaacggccaagcttcgatattttttactacaagaacgaacacaaattgtataaaatgcgcagcaatatcaataaaaatgtaacgttta

SEQ ID NO: 16581 - protein, 472 aa, DROSOPHILA
MPNENAEDLSGQELKQKAKEVADASEAMLEKVVAGLNIQDTASTNAAGNEDAEQPDGAKNEASVSANASKQALLQAVSDAMASTRQMAKKFAFWSTQPVTKLDEQVTTNECIEPNKEISEIRALPYTLPGGFKWVTLDLNDANDLKELYTLLNENYVEDDDAMFRFDYQPEFLKWSLQPPGWKRDWHVGVRVEKSGKLVGFISAIPSKLKSYDKVLKVVDINFLCVHKKLRSKRVAPVLIREITRRVNLTGIFQAAYTAGVVLPTPVATCRYWHRSLNPKKLVDVRFSHLARNMTMQRTMKLYKLPDQPKTKGYRRITAKDMDKAHKLLEDYLKRFQLSPVFSKEEFRHWFTPKEGIIDCFVVADEKGNITDLTSYYCLPSSVMHHPVHKTVRAAYSFYNVSTKTPWLDLMNDALISARNVQMDVYNALDLMENKKYFAPLKFGAGDGNLQYYLYNWRCPSMQPEEIALILM

SEQ ID NO: 16582 - DNA, 4045 bp, DROSOPHILA
aatatacatacataaatatatacaaggcataatatacatacatgagcgtgttggttagtaaaagcattgtagattagccttcggtaataatcaaacccagatccatgcccaaagagctacgctactccgttgcacagatcacgctgtaatcaaatatgcattctggctgcctgaaaaaccgtcaagttatacatgtaaatttatgcaattccaaacattatgattgttaaatctaatcgcatatctaaagagaaagtgctgttttattaagcttctctacactcgaaaaagtattatatatgtgttatgtttgtcaatatcttagttaacaagcgaaattctctgtgctttactatatatcctataattataaacgtaagtatgaaattgttaatcctattatctatatattcagcgaaggcgtttccaattattatctaatatatttgctgcaattattatgttaccaaatttttcgtgcaatttttgaaagtcaattaaaagaatattgcttgttacatttaaggcaaaactttgaaacaccaaggcgcttgatagctaaaaaataacagataaatattgttgaaaacgtacaatacaataattaaaaagtaaacaacgatgatttttaggttttcagcaaacaaacaatgttgtaatatgaaaagcgaatttttaaacaccaactattatactacataattacaaatatatgatcaaaattaaaacaacaaaaccaaattaagttcgatttattttgtatttcattagattgcccgtccagctttgaaaatcagatcgagatggtaagtgctttaaattatatttgtgagcttttctacgtaaaaggaatagaggtgatttgatttcaagagttctattatctgagttcatttatagatgatcaagtatttgttactcatttgttcaatgatagtgcataatcactttagagagatttcgtatgtgagagcgaggtgaactttagacttcagcgattattatttacaagactttattggcattcatactaggttaacaatcaagggcttaaaattcgtataaaagtatattggtctagttttgatccaagattccagtcgtagtcacaccgccattttccaaagtggtcttggcgatggtggaaatcttctcattgagagacctatgatgactggatgtggcagcctgtagattcttaatcactcgatcagatgcctgaatagtgagtgccttggtcatgttgagctcgtgttgtgcagttggcagattcagattgactgcacgggatgatcgcgattgcgtcacaaccattgcataaatatcaatggctgcatttgccagtcgtgttagcaaaatttgttcgttaactatgtttttgttgtatcgcagcaatagttcttccaccgattgtccaaaaagatcaatacaatgggccgtttttttggcataaggcaagagttcacccactacgtggccactcagatcggtgccgcccaagccgacagtggaggccgcccgcctggaggcctctttgaaaatcagtcccaaattggccgagggattcttgaatgcgcgctgcagttccttaaggtgggatcccgcatattgaatgccagtcagggcaatgaacagccggagaatgtcattggtgccctcgaatatgcggaaaatgcgcaggtcacgcaggactcgttccaatccattatccaccatgtatcccatgccgcccagaatttgtatagcctcgtcgcaaacataccacgcgctctccgaagcatagatcttcgagatggcggcttccaagtgatagtccttgctgccggcatccatgttttgtgaaatagtaaacgccatcgactccgtggcgtactgcagaatgttcatctgagccaatttctcttggatggatccatagttctttagtttttgaccaaactgaactcgattgttggcatgctcggtggcctgttcgatgcatttcttcattgttcccgatagcgtggcgcccattccaaaccgaccgttgttcaatatgttcatggcaaccttgaatccatcaccttccttgccgagcacattttcaattggaatctttacatcttcgaaatacacttcggccgtgttcgatgccttgatgcccattttcttctccggtggtccattggttacacctccgaaggatcgttccacaatgaaggcagtgaccttgtccttcttctcgccagtcttcgggtccacctgctcggtctgtgcgaaaacggtcataatttcggcaattccgccattggaaatccagatttttgagccattaaggacgtagtgctttccatcggcactcttcacggcacggcatcgaatggaacccgcatcagatccggagctgggttccgtaagggcaaaggcagcgtacacctgctcggcggccaccttgggcaggtacttctccttctgctcgggggtgccgtacagcagtattcccttgaagccaatactctgatgggcgccaatcgtgatgcccagtcccagatcgttgacacccacaatggcgcacagcctgccgtactgggtattgttcagaccgaggccaccgaattcagatggcacttggattccgaaggccccgagctcccacagagccgtcgaagtggtgtcatctattttagagttggcatcgttgcgggcagcgtcattgacatcggagaagaaacgctcgaacggatctatcaggctgttggtcagctccttctgctccgcggtcaggacatccggatacgggaacacttggcttgacaccagtgatccacggaagatgttggccataaaggactcattctcacttgccttttccttgctgcgattgctttccgcccccagtttgggactgtgcgtcgctatttgcctgcaaagcgaggcgtttcctgccaggtacctggtactttggatcgtgtgcctccacatagtttcgaaattgtttggtaaatcgccctttggaccgagagtctgcagtgtgcccacattcccgatcacccacgacgacgtcatcaccgcgacttgcgcagtccaaatctggtatatttcctcagagcaccgagtaccggagtattcatcgtttggcatattaaattcagttggtttccaaatcacttaaagagttttttaaatttcgaaaagtttctgggggagtgtttttagtcgtattacttgttttatataactgttactgcttttgagaatttttgtattgtatagaacttatccaaaaatcgtttagcatcttcaattctctttgttttcaaatctctggaagcgtttttagaaatacaaaatgtatttgaacctaacttaaatctcgatctggatgtggaagagaagcattttgaaccagatattataaatctgatccatctgatgaagaagattaaagaaatggttttggagtaatattattatcaatcctgctgtatattgcaaatagttaataatttaccgctgttgataaatactaactgcccccaactccaaattaaaacacaaatgacgctcttaaactgcagtttaatgtcgataaatatgcggcttttgaaaagcttacaaaagttcccttgtcggttgaccttttctttctaaatcctaactcatttctgttcagttaaataaatatttacaaaatgtacacggttttccattacaattaataatatctagtttcagttgatgcgacgttgcttaaagtcttttcttatctagtatcgataataaattaattgctgccagcagcatttttgctaaatagaatagttcctcaaatctttttacaattccttaggataagttaccgtagactaaagcgaaattcagttgcagaattcagatatgtatctctggagctggagctgtctatgttctcatggtgagcgtttggccgactgtcatgatagaatccaggagtgtataatacctgcacatcgaagatgatcaattaatccagttgggcaattatttatttatctacttacgattttcgcccggcgatagcgttata

SEQ ID NO: 16583 - DNA, 2045 bp, DROSOPHILA
atgacgtcgtcgtgggtgatcgggaatgtgggcacactgcagactctcggtccaaagggcgatttaccaaacaatttcgaaactatgtggaggcacacgatccaaagtaccaggtacctggcaggaaacgcctcgctttgcaggcaaatagcgacgcacagtcccaaactgggggcggaaagcaatcgcagcaaggaaaaggcaagtgagaatgagtcctttatggccaacatcttccgtggatcactggtgtcaagccaagtgttcccgtatccggatgtcctgaccgcggagcagaaggagctgaccaacagcctgatagatccgttcgagcgtttcttctccgatgtcaatgacgctgcccgcaacgatgccaactctaaaatagatgacaccacttcgacggctctgtgggagctcggggccttcggaatccaagtgccatctgaattcggtggcctcggtctgaacaatacccagtacggcaggctgtgcgccattgtgggtgtcaacgatctgggactgggcatcacgattggcgcccatcagagtattggcttcaagggaatactgctgtacggcacccccgagcagaaggagaagtacctgcccaaggtggccgccgagcaggtgtacgctgcctttgcccttacggaacccagctccggatctgatgcgggttccattcgatgccgtgccgtgaagagtgccgatggaaagcactacgtccttaatggctcaaaaatctggatttccaatggcggaattgccgaaattatgaccgttttcgcacagaccgagcaggtggacccgaagactggcgagaagaaggacaaggtcactgccttcattgtggaacgatccttcggaggtgtaaccaatggaccaccggagaagaaaatgggcatcaaggcatcgaacacggccgaagtgtatttcgaagatgtaaagattccaattgaaaatgtgctcggcaaggaaggtgatggattcaaggttgccatgaacatattgaacaacggtcggtttggaatgggcgccacgctatcgggaacaatgaagaaatgcatcgaacaggccaccgagcatgccaacaatcgagttcagtttggtcaaaaactaaagaactatggatccatccaagagaaattggctcagatgaacattctgcagtacgccacggagtcgatggcgtttactatttcacaaaacatggatgccggcagcaaggactatcacttggaagccgccatctcgaagatctatgcttcggagagcgcgtggtatgtttgcgacgaggctatacaaattctgggcggcatgggatacatggtggataatggattggaacgagtcctgcgtgacctgcgcattttccgcatattcgagggcaccaatgacattctccggctgttcattgccctgactggcattcaatatgcgggatcccaccttaaggaactgcagcgcgcattcaagaatccctcggccaatttgggactgattttcaaagaggcctccaggcgggcggcctccactgtcggcttgggcggcaccgatctgagtggccacgtagtgggtgaactcttgccttatgccaaaaaaacggcccattgtattgatctttttggacaatcggtggaagaactattgctgcgatacaacaaaaacatagttaacgaacaaattttgctaacacgactggcaaatgcagccattgatatttatgcaatggttgtgacgcaatcgcgatcatcccgtgcagtcaatctgaatctgccaactgcacaacacgagctcaacatgaccaaggcactcactattcaggcatctgatcgagtgattaagaatctacaggctgccacatccagtcatcataggtctctcaatgagaagatttccaccatcgccaagaccactttggaaaatggcggtgtgactacgactggaatcttggatcaaaactagaccaatatacttttatacgaattttaagcccttgattgttaacctagtatgaatgccaataaagtcttgtaaataat

SEQ ID NO: 16584 - protein, 655 aa, DROSOPHILA
MTSSWVIGNVGTLQTLGPKGDLPNNFETMWRHTIQSTRYLAGNASLCRQIATHSPKLGAESNRSKEKASENESFMANIFRGSLVSSQVFPYPDVLTAEQKELTNSLIDPFERFFSDVNDAARNDANSKIDDTTSTALWELGAFGIQVPSEFGGLGLNNTQYGRLCAIVGVNDLGLGITIGAHQSIGFKGILLYGTPEQKEKYLPKVAAEQVYAAFALTEPSSGSDAGSIRCRAVKSADGKHYVLNGSKIWISNGGIAEIMTVFAQTEQVDPKTGEKKDKVTAFIVERSFGGVTNGPPEKKMGIKASNTAEVYFEDVKIPIENVLGKEGDGFKVAMNILNNGRFGMGATLSGTMKKCIEQATEHANNRVQFGQKLKNYGSIQEKLAQMNILQYATESMAFTISQNMDAGSKDYHLEAAISKIYASESAWYVCDEAIQILGGMGYMVDNGLERVLRDLRIFRIFEGTNDILRLFIALTGIQYAGSHLKELQRAFKNPSANLGLIFKEASRRAASTVGLGGTDLSGHVVGELLPYAKKTAHCIDLFGQSVEELLLRYNKNIVNEQILLTRLANAAIDIYAMVVTQSRSSRAVNLNLPTAQHELNMTKALTIQASDRVIKNLQAATSSHHRSLNEKISTIAKTTLENGGVTTTGILDQN

SEQ ID NO: 16585 - DNA, 3938 bp, DROSOPHILA
cttggaaaattgggcacagcttcctcagacgcctccacgagacccagggaaatgtcgttggatgttacgccccatattttcttggccagctgactggatatgttgactgaggaggggtaaattggtagcattataagcatcaatgagaccctgaagttcactcgaaagttctaccttgagtggcggccgcagtctcatcttcgtctaggtcattagatataagctggctcttgttgctggcattctcggacatcgtgcggcttctaaaaacataaactataaatttggaggaacgaacaatatgcctgacttcaataaagttgatcaaccgtcgcctgctgtgtaccgcagctcactgaataaaaacaatagaaaagccttggtaatcgagcaaaagcccagtcaatatgcacccagtttgtttatgaagactggcttggattacgcagtaaacaattaattaacttaccccgcaccacaacgaacgtcacctactggcgaagtgaagcaagaagaaaagaaatgtgaccggtaaaaaagattctggcataaggatgatgggcagcactggactattttgcaacactgattggttggtcttaatgttattaaagaaaagccttcagatatggcagttaaatatgatatgaccataataagagagttcatttaaatatctaactcataatcggaatatttaggaaactatgtaaatatcaaatcatgttcatacgtgtgaccgcaatgtgaccgttcatatgtgtgtagccgcccaacaaagagcttctagtaaatttaaataagtgcttgacgtaaaagtgtcatcagaattagtataatatatcaaggataactcggtttatttcactatttgtagttccaactcgtgctttttcatttcatcaataacagtagtatttttatttaaaagttttaacaaagccgtacacgaacattttacaatgggtcataagctaaaccagaaggacatcacatggacttaaagttagattacgggctctgtgatcgcgtaacaaaatcctgctcctgcgccgcacaatttcactggtggcagttgtaaaagagttggggtgcaactggaaaagtaaattaatgtaaatatgtacttatttttgtggactaaggtcggttcctacacattttcggtgctgttgttgccgcagttcccatgctcgttccatccccaggtgtagacctctcctgccgtagtcctcagtagaccgtgctcggcgcccatgtgaattctggcaggaccctgatcctcaggaagcttcaggcgaagtggcgtgggtattgcctgctgttcgctgaacgaacccattcccagctgaccgtagcaattgcgaccccatacgaggatctcgttgtttttgagcacagctgcattgtgggtccaacccacggccaactgacgcacatcctcctcaaactgaaaggcgttggactggccaaacttgttgtcacccaaggtaaggattcttttggtgctgcctccacccgtttcgcttagatccgcgcacttgagcaccatgtggttctgaccactcgaaatggaaactatccgcagttcgttgggattgtggacctgtatcttcaccgtattgcagcggtgcaggcaggtggccgtgatatccagctcgatgggcggagggtccataatcctcaatcgtccgaaaacgtagattttgttgtcttgcgtaaggacggcacagtggcgcaggccgaagctgatcctctgggcgggttcttcgcgtggaagctttactggcattggtcttctcacggcagtaaagccgcgctgacaaattcccagctgctgaaaggcattggagccccagacaaacaggcgtttggtcaacgtgatggctcccgaaatgtcccagccacagctaatggtttccacaggaacatcctgtaattttattgttagagattatgggtttctaggagaagcgatcataggcttactcaccccgaagtattccgtggggatcatcttgaactcgctgtggcactcctccgtggaatccagtcccagttgaccacgattgttccatccgcaggcatgaatccgtccgcttgtgtcgaggatgagaacatggccaccacctccacgaatcaagcgaacctgggcgggggcgaaggagcacttggccacccgttgcggtgtcatgcacaattcggactcaaagccaaggccgagctggccgtgagaattggcaccctaagacatggcgaaaaaaggggcgagaacccaagccaaggaaatcactcattaatttgcaatgcaaatgcaccgtggcgatgtctctgtttctttcttgtcatacccttgcagagagtaatgtagtttcagacgcaagttgataagcaattatcgttagaatggctaagagatataaagatattaggcttctcagataggctttttatatagtataagaaaagtggtaaaacaatgatttcgaaggtttaacgaggacttgaatgatatgttataggaagtactacgtagtagttggcctttaggtaagatattggttttggatctacaggtggcacagagatacgattaattcgaaccaactcgttctctgcaagggtatttcagtggtcggctccttatcgagagttctactgcggctcctacccaggcgtaaacctccattctggtgaccaccagttgctcgtttcgcgccgaacttccggttgctgttcgtcgccgcgattttccgggtgatttaatgcaccgcagtcacgccaggaatgcgcctgctgatccgatggtttcgactcctcgatggcctccagttggctccgaaagcgctgctctgcctttgccagcacatgtaaaactgaggcttggttctgctttggatttacttttatatttcgcgttctattagtttcagcgtcgcatgctaaaatgtaaacaatgcaaatgaggcagcgttgccagatcttggcgcacagctgtttggcttacatgactctgctagataacagacacatgtgtactttttttactttcccgccaatatgacatttaaattaggataactgcttaatatttgtgctcagcgcctctcagcaatatgtaattaatatttaaatcatagcacggctgacctcctaggacccaactaataacactttgcttccatttaatgtctcatttggttatggccataacgattatataatcccgccggatgggcgtgaaaatcgtgtcaagcgcatataaatatattctaattaaaagcaatggaagttcagggcgaaggttaaagtgcatgcaattttaattaagttttaattgtcgtgctgggccatgtaagccacaatagttagccacaatgtgagttggcctaagaaaaatgcagtcgagagttaatgaaatacgagagaaacgaagtggaaattgcctaggactatttgcattctagtggactggtattatatcaatatattaaagaaatacgatgatattaatccaatattataacaaaaaatagttaagtcacagtgtccttacgcttcaaaagatcatgcattatatagcaatattcgtaatcgccaagaagctcattcgaaatcacccactcacaggtgagcttgttttaattacaccgaaatcacggcgctagaaaatcggagctacacaaatgggcaactggcgctaacagcaggacattacaaagctgcaacgttcgcctggcatgctatgtggccaggacctcctcgtcctcctggaaagtcaacccctctcacgtgaagaatgcactgtggtccgcatttgcaattcaaaaattgcctggcacacacaaagggtgagcgcccctaaacgctagaaatgaaaactgatgattttcacttgatatccgcaaacgaagaaaagccatgcaagaaagactgct

SEQ ID NO: 16586 - DNA, 1392 bp, DROSOPHILA
cgacgctgaaactaatagaacgcgaaatataaaagtaaatccaaagcagaaccaagcctcagttttacatgtgctggcaaaggcagagcagcgctttcggagccaactggaggccatcgaggagtcgaaaccatcggatcagcaggcgcattcctggcgtgactgcggtgcattaaatcacccggaaaatcgcggcgacgaacagcaaccggaagttcggcgcgaaacgagcaactggtggtcaccagaatggaggtttacgcctggggtgccaattctcacggccagctcggccttggctttgagtccgaattgtgcatgacaccgcaacgggtggccaagtgctccttcgcccccgcccaggttcgcttgattcgtggaggtggtggccatgttctcatcctcgacacaagcggacggattcatgcctgcggatggaacaatcgtggtcaactgggactggattccacggaggagtgccacagcgagttcaagatgatccccacggaatacttcggggatgttcctgtggaaaccattagctgtggctgggacatttcgggagccatcacgttgaccaaacgcctgtttgtctggggctccaatgcctttcagcagctgggaatttgtcagcgcggctttactgccgtgagaagaccaatgccagtaaagcttccacgcgaagaacccgcccagaggatcagcttcggcctgcgccactgtgccgtccttacgcaagacaacaaaatctacgttttcggacgattgaggattatggaccctccgcccatcgagctggatatcacggccacctgcctgcaccgctgcaatacggtgaagatacaggtccacaatcccaacgaactgcggatagtttccatttcgagtggtcagaaccacatggtgctcaagtgcgcggatctaagcgaaacgggtggaggcagcaccaaaagaatccttaccttgggtgacaacaagtttggccagtccaacgcctttcagtttgaggaggatgtgcgtcagttggccgtgggttggacccacaatgcagctgtgctcaaaaacaacgagatcctcgtatggggtcgcaattgctacggtcagctgggaatgggttcgttcagcgaacagcaggcaatacccacgccacttcgcctgaagcttcctgaggatcagggtcctgccagaattcacatgggcgccgagcacggtctactgaggactacggcaggagaggtctacacctggggatggaacgagcatgggaactgcggcaacaacagcaccgaaaatgtttgcaccccaactcttttacaactgccaccagtgaaattgtgcggcgcaggagcaggattttgttacgcgatcacagagcccgtaatctaactttaa

SEQ ID NO: 16587 - protein, 355 aa, DROSOPHILA
MTPQRVAKCSFAPAQVRLIRGGGGHVLILDTSGRIHACGWNNRGQLGLDSTEECHSEFKMIPTEYFGDVPVETISCGWDISGAITLTKRLFVWGSNAFQQLGICQRGFTAVRRPMPVKLPREEPAQRISFGLRHCAVLTQDNKIYVFGRLRIMDPPPIELDITATCLHRCNTVKIQVHNPNELRIVSISSGQNHMVLKCADLSETGGGSTKRILTLGDNKFGQSNAFQFEEDVRQLAVGWTHNAAVLKNNEILVWGRNCYGQLGMGSFSEQQAIPTPLRLKLPEDQGPARIHMGAEHGLLRTTAGEVYTWGWNEHGNCGNNSTENVCTPTLLQLPPVKLCGAGAGFCYAITEPVI

SEQ ID NO: 16588 - DNA, 4558 bp, DROSOPHILA
tttaattatatatgatttataattaaatggcccgccttatgttttattcgttatcgaaattgcttgaattggttgaaccgttttcaattataaaatacttaatgtacacacctatgtatgtgaaatcaaacgacaatacattctgaatactaaatgtgaaagatcatgaagagataaagtgaaacctagttacatgtaacgtaagcatcaaattcatattaataaatataacaaagaattaaaaagaattatttgggttccgttttcaacatttcgtttaacccaaaatgctatccgcatcgattggggcagttcctttacccgaaataagatgagttcttagagattagaaacccgtagaatttaaacttcaaaacttgatggtctgaagagaacatgcaaaggtttagtttcatttgattcaaatttgtaatcaaactacaaacaattctgttattaaaaaatacatgtatttctttccgtgttttcttagttcaattaaatacattgtccaatgtgacaaaacaaattaatcttttacatattgaagttgtcataagcattcataaaccggctatcaccacaagttagcggaaaattcaacccttcatttaacccaagcgtctgaaaaataccttggcttactctttatgaaccttataaatatatataatatacaatagaaatgtataggggtttaactcttaaaggcttataaaaaatccacgaaacgcattcgggtttcattccgtccgatcaggaaaaaaaaagggtttaatccgctaaagtcataataaccatttgcttggtcacgggtttgtcgaccgccaatttgcattcgaataattcacattaaaacggaagtacggacttcccgaagtcaatcaagagtttggaaagaatttacatgttggcggaactattgcgtaaggcaaatattttacttaaactagttagttatatccgttagaataaggattattttataggtgtaataaatctagtcaaattttattgaattgactcctacgtcaatttggccacctcggtagctgccgcgcttcttcttggtcttctcgtgtttgaaggacttgccgcgcgtgtgcttcagatctttgttggctcgctcgccccaggatccggcagcgtttttctatcgtggtgagcaaataataaaattgggttaatccgataatataactgcatctagtgtgtgtgtgtgtgcttgcgggtgggtggcgctaactaactatttctaattgtcgaaggtgatcttcttgttttgctttggcgccgacgagtcgaaggatttgttgccgaatccgcctccacgtccgcctccaccgcggcccccgcgtcctccaaagccgccgcctccgcgtccgccgccaccacgtcctccgaagccaccaccgccgccacggccgccaccgccacgaccaccgaagcctccgccgcctccacgaccgccaccaccacgtcctccgcgctggttgttatcaaagcctccaaagctcttgcgatcgccaatcttcttgaagccgcctccatcaccgccgccctcgccgttgaacttgttggtctcccaagtgctgcgatccggtcgtccggagaagcctgagcctcctcggccgccccgtccgttgttgtgcttcttaaagtcgttttcctgaaatggtagaaacgccgaaaggggcaaaccacaaattagcaacgatttgatttgatatataagttcaaaatgtattgggaaagtgccacaagtggtttgagattcttcgaggagcaacttgctaatttgtgtgtctgcccctttcagcctcgtagaaagatccccctcgcctaatcctcaacagccgtcgcaaacacacacacccacgcgactcaaatccattgcggcacttaccttcgcctcgaaggacatgtcctggactcgggagtccaccaccacgtcctcggtgcgtacccttcggaagggcgaccgtcgcccacttccccctccgctattgttcatattatggtttcggctgaaggtgttgttaggtgtggaggtgaagtcattcttctgcgaatggcaatgaagttatgtaaaactgtctgcacaggaatcggacaaggagccaaaattatgtgctgtttaaagttcggctcaaatttcaatagggctttaaaaagctacttttaagggaatcctttaactcaggaattatttttatccgacattcaaaattgatgtctgaaggaaaacatgcataagcggactgcggataattttagatgtacatagataagttacaccgccttacctgttgctctcccgatttgacgaagttgttgtacttcttgttgggagtggcctcgtcctggtcgccaccactaaacttgcgcttctgagcggtcttctcattgccattggtagctgagttgggcttgacctcgccggactcttcaccagagtcactctcgtcgctgctgctgtcagccttcttcgcaggagcagcagtcttcttgacagctggcttcactgccggcgtttcttcatcgctggaatcgtcactgtctgaggaggcagcctttgcagacttggccagagccttgggagcagcctttgctggcttttcgtcttctgagctatcgctatcttccgaagaagcagcctttgcaacggccttcgcggctggtttcttgggagcttcctcctcatcggagtcgctgtcttcgcttgaagacttggcctttttggccggtgtcgcctttgctggggcggcagccttcttgggcgcctcttcttccgaggagctgtcatcgctggaagctgccttcttggcaggagttgccttagctggcgtggcctttgctggagctgccttcttgggcgcctcttcttccgaggagctgtcatcgctggaagctgccttcttggcaggaattgccttagctggcgtagcctttgctggagctaccttcttaggagcatcgtcttccgaagaactatcctcagtggaactgtcggcctttttggtgggagcagccttagaaatgggctttgcgagagttgctgcctttttgggtgcctcgtcttcagaggaactatcatcactagaggaagcccccttcttagcaggagccaacttggcagcagatttagcagcgggtttgacctcctcctctgagctgctgtcttcggaactagaagcggctgccttaggagctggctttgcggcaggctggacggcaggcttcttggcggctggctcgtcatcggagtcgctttcctcgctggaggatgctgctttctttgccggtgcagccttggctacaggcttggcagctggcttagtctcctcatcggagctgctttcttcgctgctggagtcggccttcttggcgggagcaaccttagtcgttgtggccttgacggcgggctttgccggttcttcctcggaactgctatcctcgctgctggactcaaccttcttcgcgggagccgccttggccggaggtgccttcactggagcagcttttttgggtgcttcttcctccgaggaactgtcctcgctggaggattttgccttcttgccgacagccttggccggcgtggcctttgctgctggcttcttctcctcctctgaatcgctgtcctcgctggttgaagaagctgcctttttgacagccttgccgtttgttagtgcaggagctgtcgctggcttcttaggcgccgcatcagactcagagtctgagtcgctgtcttcgctggagtctccggctgtcgccttgattgctgggatctttttggggcttttggtctggtagaactgaaggatttcactcaactttgggctgcttttggcgacactggcctgcaagttagaaaaaggcagaaattcttggttatctggacgaagcacgtggcacttgcagcaagtggcaggtggacagctcgatgagccatcggcggacagcaaggccctcggattctagatcaggaggacgcagataccacatgtttcgggtgcatccaaaccgcacatattgcacttgccgctctgcactgaaacttaccgccttcgtcttctgctggaaaaccttggctaggttcttgtccttggactgcaagtactccaggacgattgcatcggctatctttagcaggtctgtcatgattaattcaactattcgtcaatattttccgtccgcaaataattactagccgcttgtcccacaaaaaagaatgcgcactcacacgtgttttctacttatcagtggtatggcagcactacgcggctgccaacggtgtggccacccctgcaccccgtttctcaacactgtcaatgcagcgggtattcttcccaagaataactcgaaaatgccaatcaattgtaatcatttatttatgccacaccgacaaagatcttgaaattagaaataacgctaggctacgttagacaaaactaaaattacaaatttattggtatatatgtctatgtatatatatatatgtatatatatatatgtatatgtatatatgtagacatatataacaataaatttgtattta

SEQ ID NO: 16589 - DNA, 2052 bp, DROSOPHILA
cacgtgtgagtgcgcattcttttttgtgggacaagcggctagtaattatttgcggacggaaaatattgacgaatagttgaattaatcatgacagacctgctaaagatagccgatgcaatcgtcctggagtacttgcagtccaaggacaagaacctagccaaggttttccagcagaagacgaaggcggccagtgtcgccaaaagcagcccaaagttgagtgaaatccttcagttctaccagaccaaaagccccaaaaagatcccagcaatcaaggcgacagccggagactccagcgaagacagcgactcagactctgagtctgatgcggcgcctaagaagccagcgacagctcctgcactaacaaacggcaaggctgtcaaaaaggcagcttcttcaaccagcgaggacagcgattcagaggaggagaagaagccagcagcaaaggccacgccggccaaggctgtcggcaagaaggcaaaatcctccagcgaggacagttcctcggaggaagaagcacccaaaaaagctgctccagtgaaggcacctccggccaaggcggctcccgcgaagaaggttgagtccagcagcgaggatagcagttccgaggaagaaccggcaaagcccgccgtcaaggccacaacgactaaggttgctcccgccaagaaggccgactccagcagcgaagaaagcagctccgatgaggagactaagccagctgccaagcctgtagccaaggctgcaccggcaaagaaagcagcatcctccagcgaggaaagcgactccgatgacgagccagccgccaagaagcctgccgtccagcctgccgcaaagccagctcctaaggcagccgcttctagttccgaagacagcagctcagaggaggaggtcaaacccgctgctaaatctgctgccaagttggctcctgctaagaagggggcttcctctagtgatgatagttcctctgaagacgaggcacccaaaaaggcagcaactctcgcaaagcccatttctaaggctgctcccaccaaaaaggccgacagttccactgaggatagttcttcggaagacgatgctcctaagaaggtagctccagcaaaggctacgccagctaaggcaattcctgccaagaaggcagcttccagcgatgacagctcctcggaagaagaggcgcccaagaaggcagctccagcaaaggccacgccagctaaggcaactcctgccaagaaggcagcttccagcgatgacagctcctcggaagaagaggcgcccaagaaggctgccgccccagcaaaggcgacaccggccaaaaaggccaagtcttcaagcgaagacagcgactccgatgaggaggaagctcccaagaaaccagccgcgaaggccgttgcaaaggctgcttcttcggaagatagcgatagctcagaagacgaaaagccagcaaaggctgctcccaaggctctggccaagtctgcaaaggctgcctcctcagacagtgacgattccagcgatgaagaaacgccggcagtgaagccagctgtcaagaagactgctgctcctgcgaagaaggctgacagcagcagcgacgagagtgactctggtgaagagtccggcgaggtcaagcccaactcagctaccaatggcaatgagaagaccgctcagaagcgcaagtttagtggtggcgaccaggacgaggccactcccaacaagaagtacaacaacttcgtcaaatcgggagagcaacagaagaatgacttcacctccacacctaacaacaccttcagccgaaaccataatatgaacaatagcggagggggaagtgggcgacggtcgcccttccgaagggtacgcaccgaggacgtggtggtggactcccgagtccaggacatgtccttcgaggcgaagaaaaacgctgccggatcctggggcgagcgagccaacaaagatctgaagcacacgcgcggcaagtccttcaaacacgagaagaccaagaagaagcgcggcagctaccgaggtggccaaattgacgtaggagtcaattcaataaaatttgactag

SEQ ID NO: 16590 - protein, 654 aa, DROSOPHILA
MTDLLKIADAIVLEYLQSKDKNLAKVFQQKTKAASVAKSSPKLSEILQFYQTKSPKKIPAIKATAGDSSEDSDSDSESDAAPKKPATAPALTNGKAVKKAASSTSEDSDSEEEKKPAAKATPAKAVGKKAKSSSEDSSSEEEAPKKAAPVKAPPAKAAPAKKVESSSEDSSSEEEPAKPAVKATTTKVAPAKKADSSSEESSSDEETKPAAKPVAKAAPAKKAASSSEESDSDDEPAAKKPAVQPAAKPAPKAAASSSEDSSSEEEVKPAAKSAAKLAPAKKGASSSDDSSSEDEAPKKAATLAKPISKAAPTKKADSSTEDSSSEDDAPKKVAPAKATPAKAIPAKKAASSDDSSSEEEAPKKAAPAKATPAKATPAKKAASSDDSSSEEEAPKKAAAPAKATPAKKAKSSSEDSDSDEEEAPKKPAAKAVAKAASSEDSDSSEDEKPAKAAPKALAKSAKAASSDSDDSSDEETPAVKPAVKKTAAPAKKADSSSDESDSGEESGEVKPNSATNGNEKTAQKRKFSGGDQDEATPNKKYNNFVKSGEQQKNDFTSTPNNTFSRNHNMNNSGGGSGRRSPFRRVRTEDVVVDSRVQDMSFEAKKNAAGSWGERANKDLKHTRGKSFKHEKTKKKRGSYRGGQIDVGVNSIKFD

SEQ ID NO: 16591 - DNA, 2861 bp, DROSOPHILA
agctataactatgtatttatgtatattattcgttttttttcactttaaaaatgaaatttcaaaacatttaaatatgcacacaagttttttgaaagaaacttcagttctatttcatttttaaactaggcgccaagttaactgtgttaagttacgtgagaaataccaaatttttggatcagcttgatgttgagcgaacaatatttagtatcgtcagtcagcctggcaacccagaaaagtactaaaataaaagacggctggtgaaaataaaataatggatgcaactgcagcaatcaccggcaatgtggacaagacccaggtatgggacttatattcaagggtgaactgcacctgcagctctcaactctgttcctccagataccgccgctgaaccagaaacgcatcctggccttcgttaaccatttcctcgtcagcacctgcacctttctaaatgaatttgccctgggctgtgagacgaagttcgtggagatggaacggcagctgcagaagacggaggccgccctcatcatcctggaggccaagctggcgtctatacccaccgagcaccatgtagcgactgaggctaccgaagcgccagcgatatcaaaccagcaacgcaacgaagaagcatccatggtggacaccacggaaccaccgaccaccgagaatcctacggagccggaactcccgcctgaatcggttggtgtgcgcgcctgtgaagatcaacgttacagaaagttcttcaaaatggtgcaagtgggtgtgcccgcaccggcggttaagcagaaaatgcaatccgaaggtctggagccgcgtattttagagtaagttccgtggagaggtttggccaaattgaaagctcatcaagctcatttccattgcagcacacccgatctgatcctggcggatggccagcgagagtgagctgcctggcgcagagcgtgatctgatcttgtgatatagcacatgttgctacaccttgcaattaaacattttttaaagcttacgtctacaagtttattttgttttatttgccgccgtgcagcgacgcgaaaacaacataaaaccacttcgttagcgaaaaaaggatttttaatggtgtaaagaaggtgcctagaactggatcatctgtcccttgcgcttcttgtcaccgcccagctcgaagtgcttgcaacgcttcaggggagtctgcttgcggtatttgcactcggtgcactccatacgcagcacaatcttcttggtggtcttggcctaaaatggaattagaactccagttagcaagcggcatacaaatggtggtcatgaattcatttggattgtctgaagttgccggtggggcgttgtgggcatggatgccacacaacgttgccttcacggccgcaccagtgcaacaacagttttgatctggcacagttttttcccaccaaaaagcataatgctcaacgagcgcagcgatttagttctacgaagcgccattccagggattccaatctagccgccattagtgtcgatggcaatccggcggcaagcgatcccggtagcattagacgaatgggggcacttaccttcttcctgaagatgggcttggtctgacctccgaaaccctgctgtttcctgtcgtaacgacgcctgccctgagctcccttgcgctccttggacttcttgtactgcgtcaccttgtgcagcttgtggaccttgcacttcttgcagaaggtgcggcgttgtttcggtacgttcacctggaaaacacacaaatcccattagtacaaaattccttgggcagcgacaccgaatttttaagccgaacagcaacgcacttgttggccgtcgcgatccgcgatagaccactccttgggtcaatcatttcggtattcccgctcttttggcggaatcacttaatttcgggcataacaattgcggatgttcaacgatttcgggaaacgcttaccatcttgatttcgtgaaggcgaaaaaagaaggaaatcacatagcgatggcagcgtgccgtcaagccatgcgctatcgataggttttcgtttcattgttgtgacttgatatgcatatcgatgtttgtatagttcttaagcactgtttaaactattttctactttttgaagtaaaatcaattgtttttacatttgttttgaatgtgcatatattgaaacttagtacagaagaatactattattattagttaatgaagtttgtaaacgccttatcaattaggtataccatgtttgtttgttttatgtatttttagtgtcacgaaactttatctgcgaacctacgtataatacatttttgccccacattaattattttcaagtaatttttaatgttcatggaactgaatgcttggttttttcatcgatctccacagaaatatgctaataaaatgacaaaataatatatttcatatataatatttcgatatcttaacggtcacttgatgctgagcgctgccagatcaatcagattttaagaaaataccaaaaagtgaaagtggcattgccatcgagggcgaaacatatgttttgttttgctcgcgacttgcagcgataggcggcgacaagcaacgtcgttatcgaagaccgatagggcccgatacaaaaaaaaaataaatcgaaatattttcaacaattttctgtggaaaataattggaaatatagcgaatctccagcagccgaaaccggatgcgctggtggcccgggcccagcggcaagtcgtgagcaatggcagcagccagcgtgcgctggctagagcaaatctaaacggccaaaacggcaaccagttagatagccaaaaatttgcataaaaagtgagcgattaaaatgcagaaaatgtacgcgttgctagcaaccttg

SEQ ID NO: 16592 - DNA, 479 bp, DROSOPHILA
atgattgacccaaggagtggtctatcgcggatcgcgacggccaacaagtgcgttgctgtgaacgtaccgaaacaacgccgcaccttctgcaagaagtgcaaggtccacaagctgcacaaggtgacgcagtacaagaagtccaaggagcgcaagggagctcagggcaggcgtcgttacgacaggaaacagcagggtttcggaggtcagaccaagcccatcttcaggaagaaggccaagaccaccaagaagattgtgctgcgtatggagtgcaccgagtgcaaataccgcaagcagactcccctgaagcgttgcaagcacttcgagctgggcggtgacaagaagcgcaagggacagatgatccagttctaggcaccttctttacaccattaaaaatccttttttcgctaacgaagtggttttatgttgttttcgcgtcgctgcacggcggcaaataaaacaaaataaacttgtagacgtaa

SEQ ID NO: 16593 - protein, 122 aa, DROSOPHILA
MIDPRSGLSRIATANKCVAVNVPKQRRTFCKKCKVHKLHKVTQYKKSKERKGAQGRRRYDRKQQGFGGQTKPIFRKKAKTTKKIVLRMECTECKYRKQTPLKRCKHFELGGDKKRKGQMIQF

SEQ ID NO: 16594 - DNA, 4908 bp, DROSOPHILA
acaagaaataaggaaataattttaaacagaaatagaattaagaattttcaatgttattttcacttatttctttgaacggtgtgacatgtttttgggtcaaaatgcataaaagtatgatcaacaatgaaccaaaaagagcgcacgtatccataacgaatgtgcttagtctgtctagggcctccggggcattcacttttcccaagaaatcatttctatataagccctataattggccaatatttcattgtgttgaggcgagcagcaacaaagtgaagcagtgccatttggtatgggcaattttattccgagtgaaagtggcaaagttgcagtgcacacctcgaaaaatgttaatgagccgcgttcgaatctggcataaaagcaaaataagaaattcaaaataaagcaaaaaaaggcgaaataaaaccgaaactatagcagcttaacccaaatcactttaagataatcaattttgttttccttcgctgcgaggtgaaatcttttggcgaccttggcgcccattaacttacataaagaatcatccgggaggaagttcctcatcgcggagatcttctccttctaaaaatgccaagtcattagggtaaatggagacaagcccaccaaaaaaccgagcaaaccaagcccgacgaactgagattatgtcacggcagtcaagccaaataaactcacaactaaataaacattaaacgcttcagttgaacaacgacatactttcccattaagggacaagatgggtgcgggggagggggcgtaccgcagatgcgtaatgccaatttgtgacattactcaaccggcgacaaagccgaaagactttgcataggaccattgttgaagtgagtttggccagctgggcgctcgcggatctccaatacttcctgctttcaaactctataagcatggtttccccaacagtgcgtttcataactagcaagtgcatcaggcaaatgtattttaaagaaaatagggttgtacttcttctagaatgggtacattacattgtaacttagctggctacattttaaattagaggtaaccaatggcattttttgatacataacatgaacaaaaaaaaaaaatcaatattaatatataacttttcgttactaagtaatatcaataatttatcaatcaagcttccttatcaaagcacttaattttaaaaagctgataatcattttatttaattattatattttattgaaagtcagaaaatgatttaccagcggcttttgaaaaagttattgactcactgtttatctttaaaggcaaagagtgttgttatctttaggtgttttacaaaaatttctttgactgtatgtatattgcttactagttgttttagttatcacgtttctagaatcctgcataggtatatttattgaagtcagaagcttaatttgtcttaaagtagcgaaactatatcaaatatattttatcattgtttcagtactttccttgggaacatttccgaccgctcagggacaatcggatgccgggaacgatgaggagcaaccactccatttgaccaacgacggtaagtgtgatcaagatgcaggatgctgtgcacggacattcataactttaacccttaaggcagcgtctttctttcagccacatttgcacgatcgacgactgggtcgccagttgatcgaggatctcgccgagagccagagctcggccagcagtgtcagcagcggcagcagtcagtccggctccgcctacgaggatgacgatgacgacgtcgagggttccagtgagtactacgatagcgacgaggaacagtccgagggcagcaacgaatccctgcctcgtttgctctcccaatccacctttaatcgcatctctgagaccttgggagcgctcaaccatgtggggcacatgctggtggacataactcgcggtggacaggatcaggccaaaatggagggggcggagaagagtgaggatacaagccaggacaatagtcagtcgggtggatcgtccagcgcaaccgcaagtgcttccagcaccaccgaagtggttccctcttccacatcctccccacgaggaaattccgagcaactgccaggagtctcagacaaacttatggatcctctaccgattacactctctgccaatagtttactaccagctggcaagcctgcgaatctgagtgtcatccaagtggcaactaaaagaatcggtatggatgactctgctcccatgtttgtggagaacaaggagctgaagctaaagaagaaaaagaagaagaataagaacaagcagaaggtcaagaagcccagtgaagaaggtgtcctggttccggtagcccagggtgctcagcaatcgcagcagaagatcaagatacccactactccgcgcaccacaactacgtccaccaccacagaggcacctattactctgaccccattggatcagttggcagaggctagtgatgaggcaggaaccgggaaagatgtggaaaactactgcaaaacgccaagtggaaggcgaggacgttgcgaggatctcagcagttgtcccgctctgctgctgaatctcagcagcttgagagagtccctgtgcttcaagagtctctatgtgccgggcgtgtgctgccccatttcctcatcctccactgttttgaccactcagaaacctctgaggctgaccactcgtcccacgacgaccaccagcaccaccaaggctacgcaacccacgaagaaaagcactgttcgacccaccacgcgccccacatctggtctcgtgctcattccccagaagaaaccgcccactaccacgacgaccaccacgacggaggtgcctctggagccggagggtctggacgagatcggcaacaacattgtggaccccgatgagtgcggtcagcaggagtactcaactggtaggattgtgggcggagtggaggctccgaatggtcagtggccatggatggcagccatttttctccatggacccaagcgcacggagttctggtgcggtggttcgttgattggcaccaaatatatcctgacagctgcgcattgtacgcgggactcgcgtcaaaaaccgtaagtcatagtgagtcctgcatttgatgggcactaatatcgactttttcttctagatttgctgctcgacagtttacggttcgcttgggtgacatcgatctgtcaacggatgcggaaccctctgatcccgtgaccttcgccgtcaaggaagtgcgcacccatgagcggtaggttatggacctcctaatgtgaatagtattggtaacgtgtgtatcctcagattctcccgcattggattctacaatgacattgccatccttgttttggataagcccgtgaggaaatcaaagtatgtaatccctgtctgcctgccaaagggaatcaggatgccgcccaaggaacggcttcccggacgtagagccaccgttgtgggctggggcaccacctactacggtggtaaggagtccaccagccaacgacaggcggaactgcccatttggcggaatgaggattgcgaccgcagttacttccagcctatcaacgagaacttcatctgcgcaggatactccgatggcggagtggatgcttgtcaggtgagttaataaaggagtttccattcatagaggatcaaaactaatttaaccgttttgcagggcgattctggcggtcctttgatgatgcgatatgattcccactgggttcaactgggagtggtgtcctttggcaacaagtgtggtgagccgggatatccaggtatgttgcgctacagaaacattactttaaagagcatttactaatttttatgcccatccaggtgtctatactcgagtcactgaataccttgactggatacgcgatcacacgagggattaatcgcattcccgttccaccgatccaccttagcagtaactatagcctaggtttaggtacgcactagtctatgtactcttaatgaacttcccctcctgatcaatggagtgtactatttattaaccgcatcccatcgccatgatgattggcatttgttgactaaattaatatatatattatatttaattttgataaataaaatgtgtaaacaaaatatagagtgtttcaagacaccggaaattcgtagatataatattttggtatttcaagctgctgcttacttactaattactgtgacttactaattaactgtgtcttgctaactagtaatacatcctattagcagctagcattccctagcaagattttcttaaatgatagcctgaatttatatggtatatggtgattttaaaatcattttccatatatggtcatatgctctgcagcagtaggagaaaattcgctgtattgtagtggttgaaatcgtaaaatgatcttacgcaatcaaaagccaatgatccaaagctaattgactttggataaaacaatagtaatcgtttcagtttatatgaatcgaagcgtgggagcggcaaacaattatttacagtttgtaacttttggaattacgagtgtcaatgaaataaagtggggggatttaattctataatttcgatagctatgcccctttgttcagacattctggaaactatcaatggggaagtgactaaatgatagataagtttcattcattattatttatcacttactgggaactacttggtaaacaaacgtgagcaattgcataaggcttttttctcgatgccggttctctcagttggcattaagctttcacagctgacggacgcgaattgttccctccaaccggcgagttctttaagtttctcgggaatgtttgtattatctcaaaaaattgactacatcaacgaattctaagtggtataattacagtttgtgcttgctgtgaagatttacagctcgaataaatcataatattgtacaattaacgctg

SEQ ID NO: 16595 - DNA, 1377 bp, DROSOPHILA
atgggtacattacatttactttccttgggaacatttccgaccgctcagggacaatcggatgccgggaacgatgaggagcaaccactccatttgaccaacgacgaggcacctattactctgaccccattggatcagttggcagaggctagtgatgaggcaggaaccgggaaagatgtggaaaactactgcaaaacgccaagtggaaggcgaggacgttgcgaggatctcagcagttgtcccgctctgctgctgaatctcagcagcttgagagagtccctgtgcttcaagagtctctatgtgccgggcgtgtgctgccccatttcctcatcctccactgttttgaccactcagaaacctctgaggctgaccactcgtcccacgacgaccaccagcaccaccaaggctacgcaacccacgaagaaaagcactgttcgacccaccacgcgccccacatctggtctcgtgctcattccccagaagaaaccgcccactaccacgacgaccaccacgacggaggtgcctctggagccggagggtctggacgagatcggcaacaacattgtggaccccgatgagtgcggtcagcaggagtactcaactggtaggattgtgggcggagtggaggctccgaatggtcagtggccatggatggcagccatttttctccatggacccaagcgcacggagttctggtgcggtggttcgttgattggcaccaaatatatcctgacagctgcgcattgtacgcgggactcgcgtcaaaaaccatttgctgctcgacagtttacggttcgcttgggtgacatcgatctgtcaacggatgcggaaccctctgatcccgtgaccttcgccgtcaaggaagtgcgcacccatgagcgattctcccgcattggattctacaatgacattgccatccttgttttggataagcccgtgaggaaatcaaagtatgtaatccctgtctgcctgccaaagggaatcaggatgccgcccaaggaacggcttcccggacgtagagccaccgttgtgggctggggcaccacctactacggtggtaaggagtccaccagccaacgacaggcggaactgcccatttggcggaatgaggattgcgaccgcagttacttccagcctatcaacgagaacttcatctgcgcaggatactccgatggcggagtggatgcttgtcagggcgattctggcggtcctttgatgatgcgatatgattcccactgggttcaactgggagtggtgtcctttggcaacaagtgtggtgagccgggatatccaggtgtctatactcgagtcactgaataccttgactggatacgcgatcacacgagggattaatcgcattcccgttccaccgatccacct

SEQ ID NO: 16596 - protein, 449 aa, DROSOPHILA
MGTLHLLSLGTFPTAQGQSDAGNDEEQPLHLTNDEAPITLTPLDQLAEASDEAGTGKDVENYCKTPSGRRGRCEDLSSCPALLLNLSSLRESLCFKSLYVPGVCCPISSSSTVLTTQKPLRLTTRPTTTTSTTKATQPTKKSTVRPTTRPTSGLVLIPQKKPPTTTTTTTTEVPLEPEGLDEIGNNIVDPDECGQQEYSTGRIVGGVEAPNGQWPWMAAIFLHGPKRTEFWCGGSLIGTKYILTAAHCTRDSRQKPFAARQFTVRLGDIDLSTDAEPSDPVTFAVKEVRTHERFSRIGFYNDIAILVLDKPVRKSKYVIPVCLPKGIRMPPKERLPGRRATVVGWGTTYYGGKESTSQRQAELPIWRNEDCDRSYFQPINENFICAGYSDGGVDACQGDSGGPLMMRYDSHWVQLGVVSFGNKCGEPGYPGVYTRVTEYLDWIRDHTRD

SEQ ID NO: 16597 - DNA, 4303 bp, DROSOPHILA
ggttccgttttcaacatttcgtttaacccaaaatgctatccgcatcgattggggcagttcctttacccgaaataagatgagttcttagagattagaaacccgtagaatttaaacttcaaaacttgatggtctgaagagaacatgcaaaggtttagtttcatttgattcaaatttgtaatcaaactacaaacaattctgttattaaaaaatacatgtatttctttccgtgttttcttagttcaattaaatacattgtccaatgtgacaaaacaaattaatcttttacatattgaagttgtcataagcattcataaaccggctatcaccacaagttagcggaaaattcaacccttcatttaacccaagcgtctgaaaaataccttggcttactctttatgaaccttataaatatatataatatacaatagaaatgtataggggtttaactcttaaaggcttataaaaaatccacgaaacgcattcgggtttcattccgtccgatcaggaaaaaaaaagggtttaatccgctaaagtcataataaccatttgcttggtcacgggtttgtcgaccgccaatttgcattcgaataattcacattaaaacggaagtacggacttcccgaagtcaatcaagagtttggaaagaatttacatgttggcggaactattgcgtaaggcaaatattttacttaaactagttagttatatccgttagaataaggattattttataggtgtaataaatctagtcaaattttattgaattgactcctacgtcaatttggccacctcggtagctgccgcgcttcttcttggtcttctcgtgtttgaaggacttgccgcgcgtgtgcttcagatctttgttggctcgctcgccccaggatccggcagcgtttttctatcgtggtgagcaaataataaaattgggttaatccgataatataactgcatctagtgtgtgtgtgtgtgcttgcgggtgggtggcgctaactaactatttctaattgtcgaaggtgatcttcttgttttgctttggcgccgacgagtcgaaggatttgttgccgaatccgcctccacgtccgcctccaccgcggcccccgcgtcctccaaagccgccgcctccgcgtccgccgccaccacgtcctccgaagccaccaccgccgccacggccgccaccgccacgaccaccgaagcctccgccgcctccacgaccgccaccaccacgtcctccgcgctggttgttatcaaagcctccaaagctcttgcgatcgccaatcttcttgaagccgcctccatcaccgccgccctcgccgttgaacttgttggtctcccaagtgctgcgatccggtcgtccggagaagcctgagcctcctcggccgccccgtccgttgttgtgcttcttaaagtcgttttcctgaaatggtagaaacgccgaaaggggcaaaccacaaattagcaacgatttgatttgatatataagttcaaaatgtattgggaaagtgccacaagtggtttgagattcttcgaggagcaacttgctaatttgtgtgtctgcccctttcagcctcgtagaaagatccccctcgcctaatcctcaacagccgtcgcaaacacacacacccacgcgactcaaatccattgcggcacttaccttcgcctcgaaggacatgtcctggactcgggagtccaccaccacgtcctcggtgcgtacccttcggaagggcgaccgtcgcccacttccccctccgctattgttcatattatggtttcggctgaaggtgttgttaggtgtggaggtgaagtcattcttctgcgaatggcaatgaagttatgtaaaactgtctgcacaggaatcggacaaggagccaaaattatgtgctgtttaaagttcggctcaaatttcaatagggctttaaaaagctacttttaagggaatcctttaactcaggaattatttttatccgacattcaaaattgatgtctgaaggaaaacatgcataagcggactgcggataattttagatgtacatagataagttacaccgccttacctgttgctctcccgatttgacgaagttgttgtacttcttgttgggagtggcctcgtcctggtcgccaccactaaacttgcgcttctgagcggtcttctcattgccattggtagctgagttgggcttgacctcgccggactcttcaccagagtcactctcgtcgctgctgctgtcagccttcttcgcaggagcagcagtcttcttgacagctggcttcactgccggcgtttcttcatcgctggaatcgtcactgtctgaggaggcagcctttgcagacttggccagagccttgggagcagcctttgctggcttttcgtcttctgagctatcgctatcttccgaagaagcagcctttgcaacggccttcgcggctggtttcttgggagcttcctcctcatcggagtcgctgtcttcgcttgaagacttggcctttttggccggtgtcgcctttgctggggcggcagccttcttgggcgcctcttcttccgaggagctgtcatcgctggaagctgccttcttggcaggagttgccttagctggcgtggcctttgctggagctgccttcttgggcgcctcttcttccgaggagctgtcatcgctggaagctgccttcttggcaggaattgccttagctggcgtagcctttgctggagctaccttcttaggagcatcgtcttccgaagaactatcctcagtggaactgtcggcctttttggtgggagcagccttagaaatgggctttgcgagagttgctgcctttttgggtgcctcgtcttcagaggaactatcatcactagaggaagcccccttcttagcaggagccaacttggcagcagatttagcagcgggtttgacctcctcctctgagctgctgtcttcggaactagaagcggctgccttaggagctggctttgcggcaggctggacggcaggcttcttggcggctggctcgtcatcggagtcgctttcctcgctggaggatgctgctttctttgccggtgcagccttggctacaggcttggcagctggcttagtctcctcatcggagctgctttcttcgctgctggagtcggccttcttggcgggagcaaccttagtcgttgtggccttgacggcgggctttgccggttcttcctcggaactgctatcctcgctgctggactcaaccttcttcgcgggagccgccttggccggaggtgccttcactggagcagcttttttgggtgcttcttcctccgaggaactgtcctcgctggaggattttgccttcttgccgacagccttggccggcgtggcctttgctgctggcttcttctcctcctctgaatcgctgtcctcgctggttgaagaagctgcctttttgacagccttgccgtttgttagtgcaggagctgtcgctggcttcttaggcgccgcatcagactcagagtctgagtcgctgtcttcgctggagtctccggctgtcgccttgattgctgggatctttttggggcttttggtctggtagaactgaaggatttcactcaactttgggctgcttttggcgacactggcctgcaagttagaaaaaggcagaaattcttggttatctggacgaagcacgtggcacttgcagcaagtggcaggtggacagctcgatgagccatcggcggacagcaaggccctcggattctagatcaggaggacgcagataccacatgtttcgggtgcatccaaaccgcacatattgcacttgccgctctgcactgaaacttaccgccttcgtcttctgctggaaaaccttggctaggttcttgtccttggactgcaagtactccaggacgattgcatcggctatctttagcaggtctgtcatgattaattcaactattcgtcaatattttccgtccgcaaataattactagccgcttgtcccacaaaaaagaatgcgcactcacacgtgttttctacttatcagtggtatggcagcactacgcggctgccaacggtgtggccacccctgcaccccgtttctcaacactgtcaatgcagcgggtattcttcccaagaataactcgaaaatgccaatcaattgtaatcatttatttatgccacaccgacaaagatcttgaaattagaaataacgctaggctacgttagacaaaactaaaattacaaatttattggtatatatgtctatgtatatatatatatgtatatatatatatgtatatgtatatatgtagacatatataacaataaatttgtattta

SEQ ID NO: 16598 - DNA, 2150 bp, DROSOPHILA
tgtgagtgcgcattcttttttgtgggacaagcggctagtaattatttgcggacggaaaatattgacgaatagttgaattaatcatgacagacctgctaaagatagccgatgcaatcgtcctggagtacttgcagtccaaggacaagaacctagccaaggttttccagcagaagacgaaggcggccagtgtcgccaaaagcagcccaaagttgagtgaaatccttcagttctaccagaccaaaagccccaaaaagatcccagcaatcaaggcgacagccggagactccagcgaagacagcgactcagactctgagtctgatgcggcgcctaagaagccagcgacagctcctgcactaacaaacggcaaggctgtcaaaaaggcagcttcttcaaccagcgaggacagcgattcagaggaggagaagaagccagcagcaaaggccacgccggccaaggctgtcggcaagaaggcaaaatcctccagcgaggacagttcctcggaggaagaagcacccaaaaaagctgctccagtgaaggcacctccggccaaggcggctcccgcgaagaaggttgagtccagcagcgaggatagcagttccgaggaagaaccggcaaagcccgccgtcaaggccacaacgactaaggttgctcccgccaagaaggccgactccagcagcgaagaaagcagctccgatgaggagactaagccagctgccaagcctgtagccaaggctgcaccggcaaagaaagcagcatcctccagcgaggaaagcgactccgatgacgagccagccgccaagaagcctgccgtccagcctgccgcaaagccagctcctaaggcagccgcttctagttccgaagacagcagctcagaggaggaggtcaaacccgctgctaaatctgctgccaagttggctcctgctaagaagggggcttcctctagtgatgatagttcctctgaagacgaggcacccaaaaaggcagcaactctcgcaaagcccatttctaaggctgctcccaccaaaaaggccgacagttccactgaggatagttcttcggaagacgatgctcctaagaaggtagctccagcaaaggctacgccagctaaggcaattcctgccaagaaggcagcttccagcgatgacagctcctcggaagaagaggcgcccaagaaggcagctccagcaaaggccacgccagctaaggcaactcctgccaagaaggcagcttccagcgatgacagctcctcggaagaagaggcgcccaagaaggctgccgccccagcaaaggcgacaccggccaaaaaggccaagtcttcaagcgaagacagcgactccgatgaggaggaagctcccaagaaaccagccgcgaaggccgttgcaaaggctgcttcttcggaagatagcgatagctcagaagacgaaaagccagcaaaggctgctcccaaggctctggccaagtctgcaaaggctgcctcctcagacagtgacgattccagcgatgaagaaacgccggcagtgaagccagctgtcaagaagactgctgctcctgcgaagaaggctgacagcagcagcgacgagagtgactctggtgaagagtccggcgaggtcaagcccaactcagctaccaatggcaatgagaagaccgctcagaagcgcaagtttagtggtggcgaccaggacgaggccactcccaacaagaagtacaacaacttcgtcaaatcgggagagcaacaggaaaacgactttaagaagcacaacaacggacggggcggccgaggaggctcaggcttctccggacgaccggatcgcagcacttgggagaccaacaagttcaacggcgagggcggcggtgatggaggcggcttcaagaagattggcgatcgcaagagctttggaggctttgataacaaccagcgcggaggacgtggtggtggcggtcgtggaggcggcggaggcttcggtggtcgtggcggtggcggccgtggcggcggtggtggcttcggaggacgtggtggcggcggacgcggaggcggcggctttggaggacgcgggggccgcggtggaggcggacgtggaggcggattcggcaacaaatccttcgactcgtcggcgccaaagcaaaacaagaagatcaccttcgacaattag

SEQ ID NO: 16599 - protein, 688 aa, DROSOPHILA
MTDLLKIADAIVLEYLQSKDKNLAKVFQQKTKAASVAKSSPKLSEILQFYQTKSPKKIPAIKATAGDSSEDSDSDSESDAAPKKPATAPALTNGKAVKKAASSTSEDSDSEEEKKPAAKATPAKAVGKKAKSSSEDSSSEEEAPKKAAPVKAPPAKAAPAKKVESSSEDSSSEEEPAKPAVKATTTKVAPAKKADSSSEESSSDEETKPAAKPVAKAAPAKKAASSSEESDSDDEPAAKKPAVQPAAKPAPKAAASSSEDSSSEEEVKPAAKSAAKLAPAKKGASSSDDSSSEDEAPKKAATLAKPISKAAPTKKADSSTEDSSSEDDAPKKVAPAKATPAKAIPAKKAASSDDSSSEEEAPKKAAPAKATPAKATPAKKAASSDDSSSEEEAPKKAAAPAKATPAKKAKSSSEDSDSDEEEAPKKPAAKAVAKAASSEDSDSSEDEKPAKAAPKALAKSAKAASSDSDDSSDEETPAVKPAVKKTAAPAKKADSSSDESDSGEESGEVKPNSATNGNEKTAQKRKFSGGDQDEATPNKKYNNFVKSGEQQENDFKKHNNGRGGRGGSGFSGRPDRSTWETNKFNGEGGGDGGGFKKIGDRKSFGGFDNNQRGGRGGGGRGGGGGFGGRGGGGRGGGGGFGGRGGGGRGGGGFGGRGGRGGGGRGGGFGNKSFDSSAPKQNKKITFDN

SEQ ID NO: 16600 - DNA, 3474 bp, DROSOPHILA
agacacacacactcgcgtgcctcgatcgcgatttaaggggtattactaaatattttaacaccgaaaaaatcgttgtaacaatatcaatcagccgaacggtcacattactagcgatgacccctgatgctgctcaagttatcgaatcacggcagtggtggcactccaatcttaagattaatttgctattggcggggcgtttgaaaatataaataacaacattatgtaaaagcaaataaaaaaacccgtttcagctttaagaattgaaggttgcgtcttcagttaccagctgtttttgatccagaatatataagcaaattatcgattttaaacagtactcttcagtgtgaccgaagaaaagctattccaccttgttgaacttttttcaaatattttcacactaaatgtttggaaaatgaaaataattatttattttttaaagtatgtgtaggtacagttatgtaacattgcaaagtaaacatttttaatcatcaagaaatttacttattgttagaaaacaggtgatcgaatacactttacttcaaaaaaaaaaaaaaaaccaaaaatttcatcaaaataatagcattcgagttttatttcaaaagggaaaattatttcaatttgtatttatcaatgatagaagaacgtaaaaattacaaaatattaggtactaaaataataccagagggatgtgatttatgtctagtcataagcaacgaaataaaaattcatttagatttctaaatttaagcttgaaaatgttacgcttatattccacaatttctatttatttctaacggatgaactagatgttgtctaccactatcaatttcaatgaataggacgccggggacttacatttactaactttatttatttattatgacgcttttatagagaaaatgtaaatttaccggccgtgcttagattctccgttatttagaataatcagaataaaagcaaatctatcattaatgagaatacaatacagtgtaacaattcgttagccatagttcatgtttgtactgtgcgaggtctggtaggcgctggatatgttcttttgggagctggagctagcactggactgctgctggtagccggatgccggcgaggagtcctccttgagatgatcgttctcctggcaccactccacaaagtcgtctattagaaccggccaggcgccctccgaatcgtagttgctcatccggtcgtcgatgttggtggcaaagtcgagcagcaggttccacgtatctcgcgagatggcccgcttgtgtttctcctcgaggaactggcaccagatgtccaagaacttgaagcgcccactaagaacgatgcaccagtaggcgattgccatttccaggtcaatgcccttttgccccggatccttggcgtagttgaaggtaaagtggtaaaagtccttgaacttgccggcgtcgttcagctcctgctcaaggatgggcagcttggtctttagcttgtcgatgctatcgatgcccaggtcgcacatgccattgataaactcatcacgcgagaactcgcactgcacctcggcgtggaatttccacgctatgatcagcaccagttttgagtctggcttcaggtccaagtcctccaggaagtggattacgccctgggatccgatctttaggggatcactgggatcccgatagcgcatgaatagctgctcgatgcgcttgcgatccaactcccggtaatagtactccggattctggaagtaattgtcgctggccaactcgaatttccagtcgttctgttgcaaacagaatattgccgtctgttcccccgtgtgtgtcagcgatatgaacttcttcaccttatcgcggtgcgtgctggatttcagtttgttctgcaaaatcataatggggcgttactgcagatggttatgatgcgtgtgacttaaatatctcgggatctactcgatctttagctgtgtgacttgggatgctaacctatgtgcgttaattaataatatttaaatactactcgtttgaatataaactattttgaatgaaatatattcacatatctctctgcaagctggaatatttacatatcccggtggttcccaggtaaaggcttgaatataagtttcctgtcgagatgatagccattgattaatgggtaacttatagtcaggaagggtactatacgattctaggggtttttttttcttgtttactatggattttgctgcccaggcgaattgcataaatacaacagcagcagcaacaacaactacaactagtgtgcccaagctggcactccaagaagaagctgctggggatgagaaaatggatcgtgttagccacgttctccacggttctcatttgatgctaactgggccagcatagttgttgacaatttgaagaagtactcaccattgcactgcctgccactggttcgattttcgcacttgtctagagctgtggtttccgactattaacaacaagaaactgcggactgcaggtgttggaaaacgacgtttgtttgcctggagaaactaaaccaaacacgtatcgcacagttccgttaggtttaattcgcgaagaaatttttcttggtttggtaaacctgtgttgattgcttacacatattatacatatttagccatattttccaaagggatatttttatttagttttgttcactgatgagtgaccttcacttgacagttgaaatataccataaggttccgaaatataccgaagcgtaattaatgaataccgaaatcacgttggaaacttaaatttaaatattttaattaaaatactttacaaatgttagaacccataaaaaatatataattaaagaaattaattcgattagaaaatgttggaaagtattattgctattaggaatattttattacatatctattaaaaacttatatgaatgatatgaaacaattaaattttatcaaataatggaatgtcatatttatatatattttaaagcaaaatttttctcaaataaacggactgcttgaaacgcagtggaaacacatttaaaacttatcgattactatgcgacgcgactgtggatacgcagtcaacaaaatatcgctcagcccatctgattcactattgattttcttcaataacaaagcagaggaaagtagacaaaaaataacgcaatttgggaaatacaaaacttggaaattctgaaattcggaatgacgagatgcagtcttgtattgggtctcctgctggccctgggcaacctgattcacgccagtaatatcactgataaagtttttgcagacattaaagagggcattgtggcagctttcggagatttcaattccgacgaactcacggatgtttttgtaattcgcgatgggatgaagaggttgcagatactcttcggtatgttattggagccgggaaggtctatatccaaaggtttaattgtctgttttacatagggcactatacggagcctctgcttaaactggga

SEQ ID NO: 16601 - DNA, 954 bp, DROSOPHILA
cagtttcttgttgttaatagtcggaaaccacagctctagacaagtgcgaaaatcgaaccagtggcaggcagtgcaatgatgattttgcagaacaaactgaaatccagcacgcaccgcgataaggtgaagaagttcatatcgctgacacacacgggggaacagacggcaatattctgtttgcaacagaacgactggaaattcgagttggccagcgacaattacttccagaatccggagtactattaccgggagttggatcgcaagcgcatcgagcagctattcatgcgctatcgggatcccagtgatcccctaaagatcggatcccagggcgtaatccacttcctggaggacttggacctgaagccagactcaaaactggtgctgatcatagcgtggaaattccacgccgaggtgcagtgcgagttctcgcgtgatgagtttatcaatggcatgtgcgacctgggcatcgatagcatcgacaagctaaagaccaagctgcccatccttgagcaggagctgaacgacgccggcaagttcaaggacttttaccactttaccttcaactacgccaaggatccggggcaaaagggcattgacctggaaatggcaatcgcctactggtgcatcgttcttagtgggcgcttcaagttcttggacatctggtgccagttcctcgaggagaaacacaagcgggccatctcgcgagatacgtggaacctgctgctcgactttgccaccaacatcgacgaccggatgagcaactacgattcggagggcgcctggccggttctaatagacgactttgtggagtggtgccaggagaacgatcatctcaaggaggactcctcgccggcatccggctaccagcagcagtccagtgctagctccagctcccaaaagaacatatccagcgcctaccagacctcgcacagtacaaacatgaactatggctaa

SEQ ID NO: 16602 - protein, 291 aa, DROSOPHILA
MILQNKLKSSTHRDKVKKFISLTHTGEQTAIFCLQQNDWKFELASDNYFQNPEYYYRELDRKRIEQLFMRYRDPSDPLKIGSQGVIHFLEDLDLKPDSKLVLIIAWKFHAEVQCEFSRDEFINGMCDLGIDSIDKLKTKLPILEQELNDAGKFKDFYHFTFNYAKDPGQKGIDLEMAIAYWCIVLSGRFKFLDIWCQFLEEKHKRAISRDTWNLLLDFATNIDDRMSNYDSEGAWPVLIDDFVEWCQENDHLKEDSSPASGYQQQSSASSSSQKNISSAYQTSHSTNMNYG

SEQ ID NO: 16603 - DNA, 2653 bp, DROSOPHILA
ctatagggtacaagtgcaacttactgctgagaatacaatttacgctttcccaggcatttttcatgtgattcgcagctgcagttggggaaactctttatggccgccacagcatccggcaagtgcgttcttgtttttgggttttctgttttaaccacccacatgtgtgctgcccgcataaaatgtgcgtttggttgacaaaagttctttaaaacaattaggagagccgtattcgtatattaatggaaacaacagaccagctttttataattattttgcattttagactactacactgattgcttctaatacgactataatttagagatatttatgcaaaatacgaaatcacatccccagcatagaggaaccatccaaagaggataattggcttggtgtgaaaatatggccttttggcggcggatttgttggtttcattccgcctaatcatttcccaaacgaatattttaatgccaggggaagtcaagtccccgtcgtactgctgaacttcctccccattttccagccatatgaggtttggttcataccgaagctcatagtcgttgcatatggtttttgcgaacttgcaattgagctcagcaaaacaaatgttttccttcgacttgaacgatttggccatgtcagtccaggtagtttcgaaatcgtggcagcccatgcaattcggctcatagaactttacgaagaacgtcccatcttcggtggtttcgaagaaattgtccactctcagcttaagtatcgtgccaggagtgcactgatctgcggatcttgccttcacactcaaatttgtaattgtggttacatttccggactgtttcgatagagatttatccgattgagcactccagatcaatagtgaaaatagaaagtaaatacaccgaaaggtagacatttttggcaatttttacataacaaactttttttgatcgcaatgtgatttccactgtagattgttagctcccagttttacatttaatgacacaaataatttttaatttttgtttttatttcagatagacttagtatggttagtatggcttatggagttttagaaacttgaggagacattgcttacgatctaatttcacatgctcagagtatgtaagtatagttgggggggtgtgtatatgaatacgatagcgtttagatgggcgattagattctggagttccatttaatcggacttcagtgccatttgccgtcctcgttgagtttccggggatcgatgtgcaagccgagcttctccagtttgcgcaccttcctcatttgtttggtcagccgccgcttgaagtttatctcctggttgagattcataatctcgatggtgtcatactgccggatgttcttgatcgtctgcaggatgaggttgtccgtgagatgcagcttgatggtggacatcttcatgaacggggcatcgcggcgtcgcaactcctccctgtaggcaaacagggtgtagtgcagcgatggcagcgagggcaaaggacgctccagttgtggaaaaagtagctcggccattatcgaatatatgccaactgatttactgggaatatgagtgctgcgcagagatctgttcgctttgagtgtccagagtgcagtgctgcctgaagtcgggttgtcctggtatttaagcccacccatcggctacctgctgctgtttactgagaaaacaccgacactctgccactggaagatcttctggggaaatcccggaggaaaaggcagctggcgctagacagtttagctacctgccgggacagctgcaagagatgttttcttgcgagcacgcgattagactggatttccttcaacccgcaaaaatttcacaaagtccgtgtacagtctaacttcgctaaaggtgtcacaaggaaaactaatgtttctagaaagtatacgaaatacaaaatcattaagagtacctatttagcaaattcatattacgaagtgtggtgaaataagttgcagttcatatcagtaagttatagggcaaacttaagaaattataaaattaaagaattttaaagaagttataataacagaccgtgaaggaaaaagaaaaagtgaatgtttccagcattgtcctgcagcaattaaaaaaaattgcattccctcaaaggattgactactgccaaaatctgcatggccatgtggagcggccaaaggtttacgagaaaatatagtatggaattacacatatattgatataattagttgaacttacccaaaacaagctaaaataaatatgttaaagtacatttatcgtgtatatgcattactttaatagcgatgttctcatatatatatttttcacccttaaacattaccacttaaaaaacttaatcacttaaattccaaaatatttgcgtgcgtaccaatccatttgtcatcagatcgccgtcaataaatttatgttatgtatacgttgtttgtaaccggaatatgttgtaaattagtcaagcatataatagctactgtcgccacagttttaattagttagaggaatagccaattaaaaccaaaaataatagtaatagttcggttgttttctttttttgtaccatattctgtggtgtttcggtcacaatttagactagacttcaatgaccaacgatgagaatcagtctgaattcacacatatggt

SEQ ID NO: 16604 - DNA, 653 bp, DROSOPHILA
atgggtgggcttaaataccaggacaacccgacttcaggcagcactgcactctggacactcaaagcgaacagatctctgcgcagcactcatattcccagtaaatcagttggcatatattcgataatggccgagctactttttccacaactggagcgtcctttgccctcgctgccatcgctgcactacaccctgtttgcctacagggaggagttgcgacgccgcgatgccccgttcatgaagatgtccaccatcaagctgcatctcacggacaacctcatcctgcagacgatcaagaacatccggcagtatgacaccatcgagattatgaatctcaaccaggagataaacttcaagcggcggctgaccaaacaaatgaggaaggtgcgcaaactggagaagctcggcttgcacatcgatccccggaaactcaacgaggacggcaaatggcactgaagtccgattaaatggaactccagaatctaatcgcccatctaaacgctatcgtattcatatacacacccccccaactatacttacatactctgagcatgtgaaattagatcgtaagcaatgtctcctcaagtttctaaaactccataagccatactaaccatactaagtctatctgaaataaaaacaaaaattaaaaatta

SEQ ID NO: 16605 - protein, 150 aa, DROSOPHILA
MGGLKYQDNPTSGSTALWTLKANRSLRSTHIPSKSVGIYSIMAELLFPQLERPLPSLPSLHYTLFAYREELRRRDAPFMKMSTIKLHLTDNLILQTIKNIRQYDTIEIMNLNQEINFKRRLTKQMRKVRKLEKLGLHIDPRKLNEDGKWH

SEQ ID NO: 16606 - DNA, 2751 bp, DROSOPHILA
aagggattaaggattgcgattagttacaaacttttgggatagatgttgtatctgaatggcagatctcttaggcaagtggttctcatgttacacatatctattattgtacaaataaaattcctaattaaactattattgtataagacggagactttaagatgctagtttgcaaacaaatattataacttaaggtttaaacatagtctataaatttattagacaaatacagggaatagtttacggaatgttgtccttggataatgtcatattttatgtcaagaacttagcaacctagcataaacacaaaattctaaaaaatggaacttacacaatcaaaacattgaaatataaggcgactacgctgaatcacggatcttgcgcggggtttaatggcttagcttagggttcggtactgcgacttcactccttcttgggaacactcagctcgtagaaaagcttgcccatgccaccgatgccgacgagggcgagagcgacggtgacgcggtagagcacgttgtccacgacggatcccttgaggaagacgggcttgccgtccttcttctgaaagtgctcctgcaccttgcggatctcgaagtatcccttctcgatctggtccttgggcacggcggcggaccggcggccagcggtggtagcgaagctacggacaacagcctgccgaggagtacaaaatgtgcggttagttctgaggctccagggaacttacgtaattggatgtaggtaatgggatctccagtgtttcggaactcatgctgttcctccagaaaggtgtgtagagtaatgtaaattacttactctcgacaggttcatcattttgctggggtttatttttaagatttagcaaaaagtgagcagttttcctgggcgaaaaatatcggtctgaaatatgacagctgacaactggagatatatcgatgtattatcgatacatcgatgtcgatatttccagcagtttggcattcacctggaaattcctatttagtttaataaacaatttaagcagctgccaataaaaacatttgtttataattccatagcgttactaaaatacagacgttgtcatgggcttcctcacagtattaaaaaagatgcgacagaaggaaagggaaatgcgcatattactgctgtgagttccatggaattataaaaaaataaatagtgattcatgtatcgactttcttatagaggtctggataatgccggcaagacgacaatcctgaagcgctttaatggcgaacccatagacaccatctcacccacactgggattcaatattaaaaccttggagcacaacggctacaccctgaatatgtgggatgtcggtggccagaagtctctgcgatcctactggagaaactacttcgagtccactgatggtctggtctgggtggtggatagcgctgacaggatgcgcctagagtcctgcggccaggagctgcaagttctgctccaggaagagcgattagctggagccacactcctagttctctgcaacaaacaggatctaccgggagccctctcatccaacgaaattaaagaggttcactctcattgattttttattgaaacaacacatttaatatactttatatttaaagatactacacctagaggatatcaccacacatcattggctggtggccggagttagtgcagtgactggcgagaaactgcttagctccatggactggttgatcgccgatatagctaagcgtatattcactttggattaaatacaatttattttacttccttatttctcgaccaagtacattttgtatagcttttcctgcttttcgtccgcaaaattgggcttaaagttcaccttgtgtatggatataaatccttcgtctagggcgggttcctggtactttttcttcatcatgttaaataccatgtccttgatcttggtgcgcgcggagtctgatagctctcggaaagctatattgtgcttcacttgggcgacgggcacattcatcacaaggcagcggcatggaatcatcttttcgctggccaactgcaagaatttttttcgagaagctgcatccacattggtgttatccaccacacatgattggcccgagtccaggaaccgtttacaggcagtcaggcagttttgagtgctacccaatgtatctgcattgacgattttgtagccccgcggttgaaaaaagctggaacaaaagtggctctttccggatcctggcagacccaccatgatgaccatttcgcaggggtggtcatcgagggtcaagtcatccggatcaagcagagatacttggtcctgaacgctagtgggttcaaagtccggcttattccactgctccacttgtttgcccaggaaatgaacctctggagtgtagaatgaaattcccacgttggctgcaaaaagtctgtctactaaagagtgatctttgcgccgcttggtggctcccttgcccgtctccggtcttccggctgcatcgccgacgaagaaacatcgatcttcctgaatctcaacgccatcattcatttcactctttaagtgctgccacattcccgtcaaaggtttgcgataaaatccatcacctatggctataaatacttgaattggaactcccagtttagccacaatatgcttgatcttgaccttaaagtcatctaggttgatttttccacgagcaatgcctccttggttggtgaagagacagattttaaacccatccttgtggagattctttagtttctccggca

SEQ ID NO: 16607 - DNA, 634 bp, DROSOPHILA
tttaataaacaatttaagcagctgccaataaaaacatttgtttataattccatagcgttactaaaatacagacgttgtcatgggcttcctcacagtattaaaaaagatgcgacagaaggaaagggaaatgcgcatattactgctaggtctggataatgccggcaagacgacaatcctgaagcgctttaatggcgaacccatagacaccatctcacccacactgggattcaatattaaaaccttggagcacaacggctacaccctgaatatgtgggatgtcggtggccagaagtctctgcgatcctactggagaaactacttcgagtccactgatggtctggtctgggtggtggatagcgctgacaggatgcgcctagagtcctgcggccaggagctgcaagttctgctccaggaagagcgattagctggagccacactcctagttctctgcaacaaacaggatctaccgggagccctctcatccaacgaaattaaagagatactacacctagaggatatcaccacacatcattggctggtggccggagttagtgcagtgactggcgagaaactgcttagctccatggactggttgatcgccgatatagctaagcgtatattcactttggattaa

SEQ ID NO: 16608 - protein, 184 aa, DROSOPHILA
MGFLTVLKKMRQKEREMRILLLGLDNAGKTTILKRFNGEPIDTISPTLGFNIKTLEHNGYTLNMWDVGGQKSLRSYWRNYFESTDGLVWVVDSADRMRLESCGQELQVLLQEERLAGATLLVLCNKQDLPGALSSNEIKEILHLEDITTHHWLVAGVSAVTGEKLLSSMDWLIADIAKRIFTLD

SEQ ID NO: 16609 - DNA, 7448 bp, DROSOPHILA
agcatgcggctgaacaaaaaaaaactcgaggaatggccgcaatttcggtgagccatataaacaacataacatatagttttcccatccatctacgctgtctgcgccactggccaagtccaagttgtcttgacggcccggcaaaaagcaacatccaaggaaaatgttgccattttagatgcgccgcccgctgagcggaaaagtcgcgcggaaattactaaatcgatacgtgctgcgtatcagattttccatgggttctgcatgcaaaaataccttgaaatccttgcctgcagtcgcacacatacacgtattgccatctttgtacagacaagcttgactaagtcgaactttactatgttattctactaaaaggttttaaagcaaatgatctatactatactatactattaacttcaatagaattcctattttctctggctagcaaacaaatttggatcataaaaagattttcatggcatttatgagatacgtagattgtgtggctcaaccttttatctatattatttccataaatttaagcaccaatggaaatgtttatctccaaagcttaggaaaatttggaagtatatataataaaaaccttttatgtctgcaaataagagatattacgtgtatactgagtttcgcttgagtttcggagttaagaggcttccctatagactgtttgaaaatcctataatgccttggcatttctaaaaggtcaactgaaagcagtggaattgctggtgggcgaggttcgtctcctaagtggcaaaatgatccagaatcggaagcaaaccctgacgatgaaataaactatacgagaaactggagaacaattacacatggactgtgggtgcaattagggaccacacctttttcgctgccgacgcgtctaaagttaatgaatatgttaataatatgttatgcgcgtgcaaatttgttcagggcttgaggggttttctgtgtttctgtttccaggcgagtccagtccaatccaactctatcgcctgatggacatggtgttcgtggggaactgtggcttctggccggcgctgaagaagcgtttgcaggtgaggcgccagaaggccgcccggaagtcgacgctgtagaaggcgtagatgaagggattaatggcgctattgaaccaacccagccaggtgagggccttggccagcatttggctggcctggtgttcggccaggaacggggtgatcagatagttgataaagaagggcagccagcaggcgataaagccacccaccacaatgctcagggtttgagtggtcttgttctccttcttcagcgacgtaatccgattggacagcgatttactgttggtgttggcactggtgttcccgctagtcgatgtcgtggttacgcccgcctggtgatgataatgaggatggtggtgatggcttcgcagtctctcgcggtcccgctccccatgcgaatgcctaaagctgtgtgttcgcggtggctgcgatagggagtgggtctgcacctggcccgtttggcccggcggctgggactgccattgcgcatccaggagactactgcctgggcccatgccactcgtcattgtggtaatggtcgttgaggcggtggaagcgcgcttcagcgaggagggtcgtgtgagttcgtagcacccattcttggcgcagcccatggagccacctactccgccggagggaagggccagcagggattgacagtgtgtgccgccagtggcactacttgctcctccacccccaccacctgctcctccagcgcccatcgccgcacaattgtcgctgtcgctgagcatcatgtcttggagctccttggctatcgtctggttggagaacgttcgcgatgtggcctgtctctggcgctggcccaccgagctgtgctgctcctgctccgacagctcattctccacgtccgctgccgtgtagcgcttgaatttctagacacgcaaagtgcacaaggcggttaagtcaatgtcgatgataaataactaaaatagagtcaatgggcggcaaaaggcggcaaagataaaagaaacggaaacggaagtcacgctaggaaaagccgaagctttaaacactcttgtaggcatcatcatatactttaaagggaaccacactggtaagcagatggctttaagctgatttaagactacatacccaaatgccatgcggccattgttctatcaactgcacgatgtgctaatctctctaaacataaaactgaatttcagaccggttttaatgcgtatggagctgcctggacttgattcagtttaagtgaattttaagcctattttaaaatgcacaccaggtacacatacaaatgtatatatgcagatgcaattttcgaagcgagcatcgtttagtgttagctatttagtgatgctaacttaaagctcgacataaatgagtcgaatatgtaattaccctggtattcaaggatgtagcaacattagcaacatttcataactaacatttttgaaaagtattcaactctaaagcgccaaactgctctctcgttagaaaacggttagttgaaaactcattaattcagctatacgggctgccagagttgaagtgaaaaacttgttttatagcggacactggaccggaaattggcacataccccgatgcgagggtatggtatttaaatctgtgtgagctcctggcatttgggaattatgaggcaaacgtgccacagtttgtgccgcacgtggagtgtcctttaagccggagtggttcgcaatagagatgactttcgctggtcgggccagcgtttgttgtttgcagctgccgtggttttcctattccatattccgtatttgtgcactatgttggctttggggttttggatggcgggagacgtgcgaatgtttgcaggcaaacagaaggacatgcggacattgggacatggttgcggatggctgcgacggagcttaccttgttgtgaacacttatgtcggtcatattgtcgtgcctggatgcaatgacacaggaaattcttgcatacacataaatcatgactgccatgggtatgaagaaggagcccatggccgagaagatgacgtagccctcgttctggttgtatcggcactcgcgcagatcccttcgtcctggctcgtacctgcgggaaatggaagtgagcaggatacgcttaatgggccaccaagttagtcaactaatgcaggaagttcccaattatttgactacggagctgtgaccctcggaggggtcagaggtcgcaagagcagcagacaattgccagctaattatattcgtttgttcagctgggtgtcgccagtcagtctgctcggaggtctcgaaatttattctaattaatttacactcacactcggcgacatttgtaatgcttaaaatggaccaaaaagatacccaaagtggtccttcaaaattatgcaatggcatcttttgacacaattttctgcagtcaacaaaattgttgatttaatttcatttaagcaaattaagctttaattatttttgtaagttaaataaattaaacatctcttggttacatttcggaattctgctgcctacaggaacatttagtatatttcttcaaaaaatctgttgactgtgctaacgaagttagatataaacaaagcactttaattaattctccttttagttagttagacaaaagtagagagaacaaaatttgttcttaaagctagcagatgcggtataccaacaaggaagttgatgtttaggttaaaattcggtgcatctatttagtgtgtggactgttgaccaacttagaagacttcttgctgcactccttcttcgttatggaaataaccctacatactgattatttcttcaagtgtacttaccatcccagcatggggggacaggtgatggccaacgcgagcagccagacgattaggatcatgatgagggccaatcgtttggagcgccgtttacgggagtacgtgagcggtctggtcacggccaaatatctgtcggatggacgtgaaggatgcaaagatttacgatatcaggggaatactatggatgttttggataggcctatgctcacctgtccacactgatggcgcacaggctgagaatggatgccgtgcagaggagcacgtccagggagatccaaatgtcgcagagcacccagcccagttgccacgagcctgcaatcaagattccaaattaaaaactttccgccagccttttgcagcgcggagtggggcagccaacttaaaattccggtccaaagtcaatttgattagcaacattttccatggctttcagcaaatgcctcacctaaggccaattaaagcggccagctcggcaaattttggcaatgtttcaggtccccttcaacccgttagtggtttaattctataccgaaaaagcaccgatttctccatttgaccccaacacttcgagcttctacagtgctttctcctcgtcggtggcttgtcaagcgattaatttttaaatcaagtgccccttaatggtctcccggcgccaaatgaaaagttgtttttgtgaaaggcgctaggagcgaaggaaccaaggagctcattacacggatattgcctatgggccagcacacttgggttggtctagttcaatgtaaggttgctgaatttgctgaatctccaaggactcggattgaagcagttaaaggcaaaatttggagtgaattagaaaaacacaaggattacttaattaattatgggaatgcttgttcagttgtagtgtatgtgtatgtttttatctaaaaactggagtaggaactggcacaaagcagtcgtcatatcagcactttcagtgcctaccccaatttcaactggatgataaggctccaaaaagcaaactataaatcccgaccgtgtgggtgtattacgtcctaacttaatgatatatgtgcgtatactttggacaaaaatgaactgaatgtggggcttggtaaattgtttgcctcgaaaaaacctgggggcatgagtaattatgaatgagattcaaaaggtatctccacagagagaaactagtggatgaaaatcggaaaacaagcttaatgttccataagacagaagccaagtgagctcaaatcagaagggtttagcatattttccattcaacttcacgagttcagcaacaaagatcaactattttctgacgagaataattcattccgattcggattgtcagtggtccggatgattatgacaaactttcgacatgccgttgcctttaaagtatttccacaaagttgggctcgggaattttcccctttttcggctttttttttcgtgctgaggaaattgcacgagagccgaggcaaaaaaatgaaagaaattctttcagttcaaagaatacaaatccataaggcgagagagatacatactcgcatatttcacctagcagcatttacataaatacacgccccctttgccccgccccaccatctgacacacctcctcctcgagttcctgttcgtgtccgtgctgctattcctgttcgtgctactttgttgggatacacttggagaaaaatatatatatatgctagtcctcctagaaatccctacacattgctctaaacagaatctcattgatatttacaggttcgaaagttccttaaatacctcaagaaacattgctactacatttttacttcatgagatacaaattacaaagacttgtattggatttgttctcagtgcattcgcttggttctgggcgccaagcttttgttagcaattttttgagggatttaccggaatggcatcttcatcttgtaatcacgcgaaaagcccggctagaggcgcctcctttcgcggaaggactctaatgccttaatggcgctgccacacactcacacacacacttacacactcacactcatacacacatagactcacctatgagatggacggcgacggcggggggcatgacgaagatgcccacgagaaggtcggccaccgccaggctcatcacaaagcagttggtaatggtgcgaagccggcgagtggtcaatatggccagtatgaccagggtgttcccgatgacggtgaccacgatgaaggtggcaaagactgcaatcaggatgatgccctgccaggagagcaccagatcgtagaagtgcgcccattcggcggccgccgccgactcgttgtagtaattaaatgtggtcacgggcgccgtgggtccgggttcggtgagagccactgcatccgtaccgttcggtccgctgggatatccacctcctactcctcctactcctcctccacctgtcccattgcccgcatcctcatatacgatggatatgttttccggcagaccacccactcccactcccgatcccagtcccaatccccgcagggaggaggaggaggcagccacatacatgagcgacggataaatggcgcttaaattattcagctgcaagttgacagccatggatcggccagttgggttcacaatcgagtgtggctagctccggcagcaggccgcctaggcccatccatatcgtgccatatccctggagttgacggagcaggaacacggcccaactgtggtcattgtgtccagttgcacgtcgggttaactggaattaaaggaaagttcgacatttagcaaagtcctttgcatggtaataaaaacgaagtcaagaggaaacaataaccatttgcatatcccttttatgctgaaatctatttgtgtttgttttaattttttatgtatgcacgcattatctgatttattccttgtgacaatttccgaaattaaattgatttcacagcattccatacaatctcatttaaattgcaatcgtcgaaattgtcaatttcattcattcgcttgcaattaagcattcaacaatctcaaggcaaaaagtgcacagcattgaatatacccgtctgtgtaaattacgttgaaagttgtcaacggtgtcaaaagattcttaagatggcctttgtattgggttgccattaccgcgatacagttaaatactttactttctaagtagataaacgttaatcctttagttagtcatgctttcaacgaaaatgccgaagtgcgctactgtgagcaataaatcaaattaagtttaccttatcatctagaagcacccactggcttgatttaatttaaaatgtatgattccatttgctttggattaggtaccgaacttagagacttaagaataaataattcgtggaggtattttctatcagaaaattaaaaatttttatacaaatattcacggtttgatttggtgaagaaaattcaagaaaatcatcaacttcggaattcctggcgcattctaataatcattatatgaaaattacaaatataatgagctttatacaaagtaagcactattactacaaagtggcgaaatgtattaccaataaatttgccaagggaatggctacattttgggaatattttattt

SEQ ID NO: 16610 - DNA, 1896 bp, DROSOPHILA
atggctgtcaacttgcagctgaataatttaagcgccatttatccgtcgctcatgtatgtggctgcctcctcctcctccctgcggggattgggactgggatcgggagtgggagtgggtggtctgccggaaaacatatccatcgtatatgaggatgcgggcaatgggacaggtggaggaggagtaggaggagtaggaggtggatatcccagcggaccgaacggtacggatgcagtggctctcaccgaacccggacccacggcgcccgtgaccacatttaattactacaacgagtcggcggcggccgccgaatgggcgcacttctacgatctggtgctctcctggcagggcatcatcctgattgcagtctttgccaccttcatcgtggtcaccgtcatcgggaacaccctggtcatactggccatattgaccactcgccggcttcgcaccattaccaactgctttgtgatgagcctggcggtggccgaccttctcgtgggcatcttcgtcatgccccccgccgtcgccgtccatctcataggctcgtggcaactgggctgggtgctctgcgacatttggatctccctggacgtgctcctctgcacggcatccattctcagcctgtgcgccatcagtgtggacagatatttggccgtgaccagaccgctcacgtactcccgtaaacggcgctccaaacgattggccctcatcatgatcctaatcgtctggctgctcgcgttggccatcacctgtccccccatgctgggatggtacgagccaggacgaagggatctgcgcgagtgccgatacaaccagaacgagggctacgtcatcttctcggccatgggctccttcttcatacccatggcagtcatgatttatgtgtatgcaagaatttcctgtgtcattgcatccaggcacgacaatatgaccgacataagtgttcacaacaagaaattcaagcgctacacggcagcggacgtggagaatgagctgtcggagcaggagcagcacagctcggtgggccagcgccagagacaggccacatcgcgaacgttctccaaccagacgatagccaaggagctccaagacatgatgctcagcgacagcgacaattgtgcggcgatgggcgctggaggagcaggtggtgggggtggaggagcaagtagtgccactggcggcacacactgtcaatccctgctggcccttccctccggcggagtaggtggctccatgggctgcgccaagaatgggtgctacgaactcacacgaccctcctcgctgaagcgcgcttccaccgcctcaacgaccattaccacaatgacgagtggcatgggcccaggcagtagtctcctggatgcgcaatggcagtcccagccgccgggccaaacgggccaggtgcagacccactccctatcgcagccaccgcgaacacacagctttaggcattcgcatggggagcgggaccgcgagagactgcgaagccatcaccaccatcctcattatcatcaccaggcgggcgtaaccacgacatcgactagcgggaacaccagtgccaacaccaacagtaaatcgctgtccaatcggattacgtcgctgaagaaggagaacaagaccactcaaaccctgagcattgtggtgggtggctttatcgcctgctggctgcccttctttatcaactatctgatcaccccgttcctggccgaacaccaggccagccaaatgctggccaaggccctcacctggctgggttggttcaatagcgccattaatcccttcatctacgccttctacagcgtcgacttccgggcggccttctggcgcctcacctgcaaacgcttcttcagcgccggccagaagccacagttccccacgaacaccatgtccatcaggcgatag

SEQ ID NO: 16611 - protein, 631 aa, DROSOPHILA
MAVNLQLNNLSAIYPSLMYVAASSSSLRGLGLGSGVGVGGLPENISIVYEDAGNGTGGGGVGGVGGGYPSGPNGTDAVALTEPGPTAPVTTFNYYNESAAAAEWAHFYDLVLSWQGIILIAVFATFIVVTVIGNTLVILAILTTRRLRTITNCFVMSLAVADLLVGIFVMPPAVAVHLIGSWQLGWVLCDIWISLDVLLCTASILSLCAISVDRYLAVTRPLTYSRKRRSKRLALIMILIVWLLALAITCPPMLGWYEPGRRDLRECRYNQNEGYVIFSAMGSFFIPMAVMIYVYARISCVIASRHDNMTDISVHNKKFKRYTAADVENELSEQEQHSSVGQRQRQATSRTFSNQTIAKELQDMMLSDSDNCAAMGAGGAGGGGGGASSATGGTHCQSLLALPSGGVGGSMGCAKNGCYELTRPSSLKRASTASTTITTMTSGMGPGSSLLDAQWQSQPPGQTGQVQTHSLSQPPRTHSFRHSHGERDRERLRSHHHHPHYHHQAGVTTTSTSGNTSANTNSKSLSNRITSLKKENKTTQTLSIVVGGFIACWLPFFINYLITPFLAEHQASQMLAKALTWLGWFNSAINPFIYAFYSVDFRAAFWRLTCKRFFSAGQKPQFPTNTMSIRR

SEQ ID NO: 16612 - DNA, 2603 bp, DROSOPHILA
gttgtagaccagctggttctcgtttgcaacggtggcaaaagttaataactttcacttggcattttcattttcgaaccgttctcgctgctggcagcatttttgatttcttaactcagttttgcgaactacaccgcacagaattgaaagcattttcgtttctacaaaccattacaaatccactgccgacaaacacaagctgcacgcatgcgttttgtttcaacaaagaccgagaattcggatcagcaatgaaattctcaaaaaaaaaaaaattgctaacaaaaagtaatgtaattctccaaacaaatacaaatacaaataataaataaaacgcggatccgatttggcattccaactaatacttaagccgcagaaagcgacgccgagatgggcacgataagcattatttaactaagtcaaaataaaagttcattgtagatttgagcatagtgagaaggtcccaggtcctaatggaacacccagcacataagtttatacatacatatataaataataatgtcaaaggaaatgcatattaactgaacgatacttttataataaattgacgaagaagtgcataatactcggagaaataacattcacacatttcatgttaagatacaataaagtgaataaataaaatatttaaaacaaaatggtggatttgttgttgaatgggtttctaagctataactatgtatttatgtatattattcgttttttttcactttaaaaatgaaatttcaaaacatttaaatatgcacacaagttttttgaaagaaacttcagttctatttcatttttaaactaggcgccaagttaactgtgttaagttacgtgagaaataccaaatttttggatcagcttgatgttgagcgaacaatatttagtatcgtcagtcagcctggcaacccagaaaagtactaaaataaaagacggctggtgaaaataaaataatggatgcaactgcagcaatcaccggcaatgtggacaagacccaggtatgggacttatattcaagggtgaactgcacctgcagctctcaactctgttcctccagataccgccgctgaaccagaaacgcatcctggccttcgttaaccatttcctcgtcagcacctgcacctttctaaatgaatttgccctgggctgtgagacgaagttcgtggagatggaacggcagctgcagaagacggaggccgccctcatcatcctggaggccaagctggcgtctatacccaccgagcaccatgtagcgactgaggctaccgaagcgccagcgatatcaaaccagcaacgcaacgaagaagcatccatggtggacaccacggaaccaccgaccaccgagaatcctacggagccggaactcccgcctgaatcggttggtgtgcgcgcctgtgaagatcaacgttacagaaagttcttcaaaatggtgcaagtgggtgtgcccgcaccggcggttaagcagaaaatgcaatccgaaggtctggagccgcgtattttagagtaagttccgtggagaggtttggccaaattgaaagctcatcaagctcatttccattgcagcacacccgatctgatcctggcggatggccagcgagagtgagctgcctggcgcagagcgtgatctgatcttgtgatatagcacatgttgctacaccttgcaattaaacattttttaaagcttacgtctacaagtttattttgttttatttgccgccgtgcagcgacgcgaaaacaacataaaaccacttcgttagcgaaaaaaggatttttaatggtgtaaagaaggtgcctagaactggatcatctgtcccttgcgcttcttgtcaccgcccagctcgaagtgcttgcaacgcttcaggggagtctgcttgcggtatttgcactcggtgcactccatacgcagcacaatcttcttggtggtcttggcctaaaatggaattagaactccagttagcaagcggcatacaaatggtggtcatgaattcatttggattgtctgaagttgccggtggggcgttgtgggcatggatgccacacaacgttgccttcacggccgcaccagtgcaacaacagttttgatctggcacagttttttcccaccaaaaagcataatgctcaacgagcgcagcgatttagttctacgaagcgccattccagggattccaatctagccgccattagtgtcgatggcaatccggcggcaagcgatcccggtagcattagacgaatgggggcacttaccttcttcctgaagatgggcttggtctgacctccgaaaccctgctgtttcctgtcgtaacgacgcctgccctgagctcccttgcgctccttggacttcttgtactgcgtcaccttgtgcagcttgtggaccttgcacttcttgcagaaggtgcggcgttgtttcggtacgttcacctggaaaacacacaaatcccattagtacaaaattccttgggcagcgacaccgaatttttaagccgaacagcaacgcacttgttggccgtcgcgatccgcgatagaccactccttgggtcaatcatttcggtattcccgctcttttggcggaatcacttaatttcgggcataacaattgcggatgt

SEQ ID NO: 16613 - DNA, 543 bp, DROSOPHILA
atgggacttatattcaagggtgaactgcacctgcagctctcaactctgttcctccagataccgccgctgaaccagaaacgcatcctggccttcgttaaccatttcctcgtcagcacctgcacctttctaaatgaatttgccctgggctgtgagacgaagttcgtggagatggaacggcagctgcagaagacggaggccgccctcatcatcctggaggccaagctggcgtctatacccaccgagcaccatgtagcgactgaggctaccgaagcgccagcgatatcaaaccagcaacgcaacgaagaagcatccatggtggacaccacggaaccaccgaccaccgagaatcctacggagccggaactcccgcctgaatcggttggtgtgcgcgcctgtgaagatcaacgttacagaaagttcttcaaaatggtgcaagtgggtgtgcccgcaccggcggttaagcagaaaatgcaatccgaaggtctggagccgcgtattttagacacacccgatctgatcctggcggatggccagcgagagtga

SEQ ID NO: 16614 - protein, 180 aa, DROSOPHILA
MGLIFKGELHLQLSTLFLQIPPLNQKRILAFVNHFLVSTCTFLNEFALGCETKFVEMERQLQKTEAALIILEAKLASIPTEHHVATEATEAPAISNQQRNEEASMVDTTEPPTTENPTEPELPPESVGVRACEDQRYRKFFKMVQVGVPAPAVKQKMQSEGLEPRILDTPDLILADGQRE

SEQ ID NO: 16615 - DNA, 4467 bp, DROSOPHILA
acatgccaacaacgtggcggccatggtgaagatgttctctcgcagaagcggcggattgtggggcatggtaatagagtgcaaatccacaatacacacggtgacatcgtcacgagcattctgcagctgcacccatttgcgcacggcgccgagataattacccagatgcagggaacccgtcggctggatgccactaaagactttcctcggccagcgggtgttatgctgggttggggtaatatattagagtcttgtgttatgtaaactatttctacgaatgcacttacttcttcgtggccactgttaacggaattaccatgggggtgtacgtgctgcttgtttccaccggttacctgggccgtcgcagagggcgttccagccgtcctactagccaatcccggcaagaaactcctcgcctgaatgcaacggcgctgggaatacacagctgtctgtccctttttggccaccttagacagactgcgatggagcttgccaaatcggaacattgcaatgagctatgaattttgtaccccaaaacttttgagtaaaaaatattgggaataatgcggtgctaaatgtgtgaacaaagcccaaaaataaattatttgttcgaaacggccgaaattttgacactgagcgttcgcgagcgttgccagatggcttttgaaaagccggtacgacagctgtgaacagtgatactcagcttggcgagttttccgctaaatcgtggattaatattaatattcaaatttaataaagaatgttatttattatcattttttttataactctctatttaagggtattacctatttacatcttacttgtgaacgtatggcttgaaatttaatgtaattgtttgatggtaaataaattgtagagaccaattgaacaattttttttttttaacaggactcctattatttttatgcttatagctttattagtggtacaccagaaaatctaacgacattgaaaaagaattaatctgcagaactgcagtttcgagttttcaaacagtgttgtatttattctagcttaatacacatattacattgcaattaacgcctggcgccattaccattatttatattttccacttttctgttcctacattgagagttacaaatatgcggagactgtcgtttcggccgtcaggataatttttcgaataggggttattcaaagatttcaaacgcggtgcaaaattcttcactatctggcagagattgggaagtgcttagaagttgatgggtttgccaaaggcagctgccacattggcctcacgcagggcctcggaacatgtctgaaagaaggaattgtgcgcattaggttcgaaaggttcaaatcagattaggtaatcacttactggatgcgcatggcaaacgcgggcaacgtcctcggcagcggctccgtactccatggccagcacagcctcgttaatgagctcgccggcaccaggtccgataatatgggttcccaggatcttatcggtggcctggtcggccagaaccttgacgaaaccgtcggtgtcgttgttggtcttggcacgagagttggccaggaaggggaacttgcccaccttgtaggcaacaccctcctgcttcagttgctcctcgctcttgccaacccacgcgacctcgggatgcgtgtagactacactgggcacgcagttgtagtcgatgtgcacgtggccgccgttgatgccctcaatggtgatgaggccctcatcttcagccttgtgcgccaacatgggtccgtggatgcagtcgccgatggcgtaaatattgggcaccacagtttggaaagtggcgttgacggggatcctgccgcggtcatccttaacaatgcccacggcctccagacccaaaccttcggtgtagggacgacgtccaacactgaccagcagggcgtcgcactggatctcctctttctcgccagacttggcgttctccacggacacggtgacgttgtcgccgctgcgagaggcagccgtcaccttggtgcccagcttgaacttaagaccctgcttggtgagcaccttttggaacgtcttggagacttcgttatcgatgcccacgccgccgatcgtatccatgaactcaatggcagtgacctcagcgcccagacgcgaccataccgaacccagctccaggccaatgacaccggcgccgatgacaaccagatgcttgggcaccttggccagcttcagggcgccagtgctgctcacaataacttcctcgtcgatctgtgaaggtttttgaatggcatgcattagtaatcaagcgcgctgtagaggttttgcacttacttcaatgccagggaagggggtaacctccgagccggtggcgatgaggatgttcttggtcttgacagtctccgtggagccgtcggatttcttaacctccacctcgttgggattgacgatggtgccgaagcccgtcagctgtgtgaccttgttcttcttgaaaagcatggcaatgccaccggtcaaagccttcacggcgttggacttttgacccataagcttctccagatccaggctaacgctgccgcagctaataccacgtttctccagatcaccggagtgggccatgtggtagtagtgggagttgttcagcagcgcctttgagggaatgcagccaacattcaggcaggtgccgcccagagttgcctccttctccacgctgaccgtcttcatgcccatctgggcggccttgatggcggcgacatagccaccgggtccggagccaatcaccacgatgtccgcctcgtgggtgctggagtagcagcgggcgttgagggcacccagaatggcggcattggtgcgcagaggagtctgtaaagacggcagattactacatgttgtggcaccttatcatttatcacgccagtcgcacgcatttcgcactaatcttcggccgactatcagctgataattggcctaattagcgaccttgaaaacggggccaaacaaatccccaaacgccagtgaatcacccaccgggatcatatgagcactgcaggtgatccaagtgcattttccagccttttcctgcccatttctcgaccccctcggtgaggttagattgcataacttgaggggcgatggcgtttggggaatcggttatgtcgcccgatccttaccttggctactgccgaaacaacatgacggagcgtgaattgcatggctggtgcgggcgagttatgaggataatcgttatttaactacaaacacaacactagtttgatgtgtgtttttccgactgtttttcgtgttgtggggctcggagcggtcgcagggctggcgatgtgcattcgatagtggtcatatgatggccgcgatgctatcgattgttttggtgattttccactctgttggaatttgaaattctaaaacattttcgtatgaaaaagatgtgtataaaaatattagcttgatgatcgttcaaaatacgatatgtccgtcactcaattgctagtttatacaatattcactttatgggtcatttgttgtagcaaaagctacctaaaaacaagccaactatacgtgtaagccggcttttatagttttggcacccattaattaatgtttttgtacgtataaaataaactgtaataaataaactgtaaaataactgttttaaaaatatataactcaacgtacatacgatacatatataataagagttccaaagtaatattaactttattatatctataggtaattaaaaatgtattatacgatgaatattcgatagtttgccctacagtacaaccctgtgtggtattccccatctgggatatttcccacaacacttttggtattttcacgtcgcgttcatctcgcgttttcgttgaagcctcagtatttcgctagctgtcgcaatgcggtcacactggttcgcggacacaacaagatggcgagacttgcccccgaaatctgttagaaaacgccacaagagcaaataattagttcagttttcgaccagaaaagagtcagccgaagtgccgggcagacgcggcgcattttgcagagtgtgagcttggccagcgttgcccgagagccgcgacaggcgacaccttctgctggccttgccttgttgctgtgcccctgtgtgcgtgagcgtgtgcggtgcggtgcgattgtgtgcgtgggttgccaagagtgaagagaatcgctgagtttccaagatgatgagcaactacggcaacatgatggactcaccgaagtcatcgccccacggcggcggccgatcacccgtggtggcccgtcaagactcatccggcaccctgaaaacgaccatttcgctgggcaagacgccaacgatcattcacacggggccattttactccatgaaggaaccacccgccaaggcagaacttaccggcgacaaggatctcatgaccgagtacggactgcaccacacactcaccaagttcaaggagaagaagttcaaggagtcgctg

SEQ ID NO: 16616 - DNA, 2033 bp, DROSOPHILA
tgacggacatatcgtattttgaacgatcatcaagctaatatttttatacacatctttttcatacgaaaatgttttagaatttcaaattccaacagagtggaaaatcaccaaaacaatcgatagcatcgcggccatcatatgaccactatcgaatgcacatcgccagccctgcgaccgctccgagccccacaacacgaaaaacagtcggaaaaacacacatcaaactagtgttgtgtttgtagttaaataacgattatcctcataactcgcccgcaccagccatgcaattcacgctccgtcatgttgtttcggcagtagccaagactcctctgcgcaccaatgccgccattctgggtgccctcaacgcccgctgctactccagcacccacgaggcggacatcgtggtgattggctccggacccggtggctatgtcgccgccatcaaggccgcccagatgggcatgaagacggtcagcgtggagaaggaggcaactctgggcggcacctgcctgaatgttggctgcattccctcaaaggcgctgctgaacaactcccactactaccacatggcccactccggtgatctggagaaacgtggtattagctgcggcagcgttagcctggatctggagaagcttatgggtcaaaagtccaacgccgtgaaggctttgaccggtggcattgccatgcttttcaagaagaacaaggtcacacagctgacgggcttcggcaccatcgtcaatcccaacgaggtggaggttaagaaatccgacggctccacggagactgtcaagaccaagaacatcctcatcgccaccggctcggaggttacccccttccctggcattgaaatcgacgaggaagttattgtgagcagcactggcgccctgaagctggccaaggtgcccaagcatctggttgtcatcggcgccggtgtcattggcctggagctgggttcggtatggtcgcgtctgggcgctgaggtcactgccattgagttcatggatacgatcggcggcgtgggcatcgataacgaagtctccaagacgttccaaaaggtgctcaccaagcagggtcttaagttcaagctgggcaccaaggtgacggctgcctctcgcagcggcgacaacgtcaccgtgtccgtggagaacgccaagtctggcgagaaagaggagatccagtgcgacgccctgctggtcagtgttggacgtcgtccctacaccgaaggtttgggtctggaggccgtgggcattgttaaggatgaccgcggcaggatccccgtcaacgccactttccaaactgtggtgcccaatatttacgccatcggcgactgcatccacggacccatgttggcgcacaaggctgaagatgagggcctcatcaccattgagggcatcaacggcggccacgtgcacatcgactacaactgcgtgcccagtgtagtctacacgcatcccgaggtcgcgtgggttggcaagagcgaggagcaactgaagcaggagggtgttgcctacaaggtgggcaagttccccttcctggccaactctcgtgccaagaccaacaacgacaccgacggtttcgtcaaggttctggccgaccaggccaccgataagatcctgggaacccatattatcggacctggtgccggcgagctcattaacgaggctgtgctggccatggagtacggagccgctgccgaggacgttgcccgcgtttgccatgcgcatccaacatgttccgaggccctgcgtgaggccaatgtggcagctgcctttggcaaacccatcaacttctaagcacttcccaatctctgccagatagtgaagaattttgcaccgcgtttgaaatctttgaataacccctattcgaaaaattatcctgacggccgaaacgacagtctccgcatatttgtaactctcaatgtaggaacagaaaagtggaaaatataaataatggtaatggcgccaggcgttaattgcaatgtaatatgtgtattaagctagaataaatacaacactgtttgaaaactcgaa

SEQ ID NO: 16617 - protein, 504 aa, DROSOPHILA
MQFTLRHVVSAVAKTPLRTNAAILGALNARCYSSTHEADIVVIGSGPGGYVAAIKAAQMGMKTVSVEKEATLGGTCLNVGCIPSKALLNNSHYYHMAHSGDLEKRGISCGSVSLDLEKLMGQKSNAVKALTGGIAMLFKKNKVTQLTGFGTIVNPNEVEVKKSDGSTETVKTKNILIATGSEVTPFPGIEIDEEVIVSSTGALKLAKVPKHLVVIGAGVIGLELGSVWSRLGAEVTAIEFMDTIGGVGIDNEVSKTFQKVLTKQGLKFKLGTKVTAASRSGDNVTVSVENAKSGEKEEIQCDALLVSVGRRPYTEGLGLEAVGIVKDDRGRIPVNATFQTVVPNIYAIGDCIHGPMLAHKAEDEGLITIEGINGGHVHIDYNCVPSVVYTHPEVAWVGKSEEQLKQEGVAYKVGKFPFLANSRAKTNNDTDGFVKVLADQATDKILGTHIIGPGAGELINEAVLAMEYGAAAEDVARVCHAHPTCSEALREANVAAAFGKPINF

SEQ ID NO: 16618 - DNA, 4581 bp, DROSOPHILA
ggcttcccagtcaaaaagcccccttttccaatttggccttcaattgtgattgttgcggtgtgcatgggccccgtaaccgtaaccgggcccggacccatcccagtgtgctcgaaatcaaagcaaacgctcgaatatctctgcaactacatacatacatatatatatatatatatacatttatatagccctatgtgcaaacccaactcaaaagccttctgaagaaagacaacctgaatgtaagttcccactaaaagtgtgtatttttctagacttgttagcgtaattgttgcttgtttttgtattgctgtgagcaaacgtatttgttgcactcttcaattgttgaataaaataaaagctttcgcctacacctacaacacccgccacgtatgagtttcatttcacatggccggtgcccacgatgcacacgcctaaacgaaatgggaagctgactagttaatggtccgcttgcataacgatgagcacaccagtggtccggactattctagaccccctgctttcgtaaccacagacggactaacgtactgcgatttgcagctagttaaatctgtaaactctcggatgccctgaaagtagacagctgacaagagcaccccccatacatcttaattattcgattggatgcaatccaactgactggctttatataaatctactttccgtctttctaagtttcaagtagtgttcattatgtggatgaccagataatataaacaattaaattatgcacatagtattcaatagtattcatcactctttcaacaaagagcaccaaccgatcacggaaaaaagcgagacggggatatcggatttgttggattggataaatgtctaaatatataaagtacatgcccacaaccaaatgtctttgaaggcaaatcgttttcaatgattatagccgcatcttctcaagcgaaataaattgaataggtcttttctcccagatagatttgtactaacaataaaaatgacttgggggtcgtaaggttcacacacaattgttttattgaggctagcccgaagttttctttttttcatgagttcacatctttctgttagcttataaaaacacgccgcttgagggcgtgaaatgtataataaaaaccaatgtaaacctagtgattccactgaagggatcagctacatctttactcggcatcgtcgtcctcatcgtcgttggagctgattctgaagtagcgcagctcgtacgagtccttttcgttggccaccacacggatccagtcgcgcagactgttcttcttcaggtacttcttggtcaagtacttgaggtatgccttggaaaagtgaacgtcggagctgacaatgagcttcagcttggagcgctcgaaggtgacgttgttgcccaggttgttcaccttgccgttgaccttaaggcgggccttgatgtacttctcctgcgggcggaatagagagggtattccgggttagttcagcttggactgggctggatctttggggcagctcctgctagcggtaagctgggctaaatgtctctttctttgttaaggctaagagtcgagtgggtagaacagagagcccaaataaagaagagtgaccaattttttgctctgccactgagtacactgccatcagagcgacgcataaagctcactctctgacggcaaatcggcgtggcctgtaaaatagatttatctaggtgatagatgaccaatgaaggggccatggaaccaataggtgcggtacttttcggacggcgtgccagtaaaggaaacttcttaagggggtttccagtcaaatgactcagtcgcatgcatgcgactatgtacctttcccccagtggttccattccccgtttgtgaatgcagcataagattgtagttacctgatcccgtgacgtaggcgacacttgaactattcagcgccctgctgagaagcgcgtttagcgcactcggtttgcccactagcgggtacttagtcagttggcttatcacttggcatatggaagaagcacctaattctaacttctacaagttgggaaaacctgcagtgccacggaagagcgggcactgtgagcagggcgcactatgaattttggcctgaggcgccacggatgtggtcgcactcaacccagggcccaccacgtggcggtacacatagcacggcttgacgctgttcacagacggttgcaccactggccagtgccaggtcactggcggtcagtggctaccccgttgtgcagtgcccagagccccttgactacaagcgcgattggaaggcgctgggaagaaacgcgtgtgcccgcatgaggcagcgaaagattcgacttggtttaaaacggaacggacacctacctacccttcctatgactatcatctacatttagcgttgttccagaagttgttaaccgccggcggcacgggaaagtccgctggcagtttatcgcaaaatggagtgaactcactataaccacaactttttatccagagcccctggttaacttggagggcagtggaaagcttggtgcggtaagactatacagatttcgatctggttaatgctttcaaatgttttgggagaacaatttatagttatagacggcacactactacttttaccatagacagtgaaagatactaatgggcaatacatcccccataacatcttgaaagcaacgacagattgtaaccagtgcttggtactgagcggtgagatttgtgatcatctgtgtaccccatgtacttacgaagtcggccacatccatgatgctatcctcagcaatgttggtgcagtcgatagtgaagcgcagcgagaccttcttcttcttctgtcccttgccacgcagcacgttcttcttgaccaccttgctgggagctggggcagcctttgccttcggcttaggcgcgggcttggcgacagcaggagcagctgcagccggagcgggagcagcagcagccggggctgcggccttggcgggagcagccttctttgctgggggagcggcagcaggcgtggaggcagccttcttggccggagcagccttggcgggagccggagcagcagcagccttggcgtccttcttgggagcagcggcagcgggagccttctttccggcatccttggaagcggcggcgggcttggcagctgcgggcttggctgccgcgggcttggcagcagcggcggctgcctttacatccttggccgcctcggacgccttcttcacgttcttggccgcggcggcggcgggcttggcggcctcagccttcggcttctccaccttgcccttggcggcggcggctgcgggagcggccttcttctccgctggcttagcggcagcggtcttggtatcacccttgttggtcttggcctgctcaccgaaaaaaaaagcaaaaaaaatcacacgcacattcgacaaatggaatatttcgctgctggccaccgactagggctttccgctgcagagttacacaacttggagctcccgggcgccggtggccagtcgcgaaactcatatttcggagcacttacggtaggagccatcttgtcagtcgaaaaccacgaggaaaaagaacagaaggcggaagcgacggcaagaagaagagacggttggtgtggccgcagcgcgccaacgccgtattccgataagccacgctgcaattgcatccctgggttgggaactccgctatcccgcaaccgtgttccaatccaatgcgcagttatgttcccagcgttcagcaaaaaaatgaatactctgcttaaaaaaatgatgttttcttactattcagacagcctttcgtacagcgaatattaaaacctatggtcaatatgcgaacaaggccttgctatgccgcaacaacgctaacgtccctcgaattgcgcttgaaagtaaaagccatcataaagaaacttccagacataaagtcctataattaccaacaccccgaacgtgccacgagattggcccgcccctgtgaccatatatcataaaactatggcgaggagcaagacgagaagaagcagcgaaaaagcaaaaacgatgaagagaagacaaagaggatgatgaggagaagaagccgcgggacgtgcatttaatttttagctggaaccctgatcacagcgccatttgcgcggcataaaatcacaattgcggagttcgacattgcattgttctcagtgcagatctgcttttcaaccgccccgcggttgcccccacaaattggcgataatgagcattctgccgaaaaggaaaccgattgattgcctcctgcgcccgctccacgtgttgcccctttcccttccctcttccacttccaatctcgatccggttcctccgccacgccccgttttcggctagcagcttcgcataatttccagtattctatttctatttctatttctatttccagtaatcatgaattccccacttcgtactaacaattcattttgatccttgtggcgccctggggattgcgtgcattcaagtcatacttttcgctgccgcttctgtttccgacccgtgtttgccgctttttaactgcccagattggctgggcaccagagtcctgatctctgtgcgcacttcac

SEQ ID NO: 16619 - DNA, 1110 bp, DROSOPHILA
cttccgccttctgttctttttcctcgtggttttcgactgacaagatggctcctaccgccaagaccaacaagggtgataccaagaccgctgccgctaagccagcggagaagaaggccgctcccgcagccgccgccgccaagggcaaggtggagaagccgaaggctgaggccgccaagcccgccgccgccgcggccaagaacgtgaagaaggcgtccgaggcggccaaggatgtaaaggcagccgccgctgctgccaagcccgcggcagccaagcccgcagctgccaagcccgccgccgcttccaaggatgccggaaagaaggctcccgctgccgctgctcccaagaaggacgccaaggctgctgctgctccggctcccgccaaggctgctccggccaagaaggctgcctccacgcctgctgccgctcccccagcaaagaaggctgctcccgccaaggccgcagccccggctgctgctgctcccgctccggctgcagctgctcctgctgtcgccaagcccgcgcctaagccgaaggcaaaggctgccccagctcccagcaaggtggtcaagaagaacgtgctgcgtggcaagggacagaagaagaagaaggtctcgctgcgcttcactatcgactgcaccaacattgctgaggatagcatcatggatgtggccgacttcgagaagtacatcaaggcccgccttaaggtcaacggcaaggtgaacaacctgggcaacaacgtcaccttcgagcgctccaagctgaagctcattgtcagctccgacgttcacttttccaaggcatacctcaagtacttgaccaagaagtacctgaagaagaacagtctgcgcgactggatccgtgtggtggccaacgaaaaggactcgtacgagctgcgctacttcagaatcagctccaacgacgatgaggacgacgatgccgagtaaagatgtagctgatcccttcagtggaatcactaggtttacattggtttttattatacatttcacgccctcaagcggcgtgtttttataagctaacagaaagatgtgaactcatgaaaaaaagaaaacttcgggctagcctcaataaaacaattgtgtgtgaacctta

SEQ ID NO: 16620 - protein, 299 aa, DROSOPHILA
MAPTAKTNKGDTKTAAAKPAEKKAAPAAAAAKGKVEKPKAEAAKPAAAAAKNVKKASEAAKDVKAAAAAAKPAAAKPAAAKPAAASKDAGKKAPAAAAPKKDAKAAAAPAPAKAAPAKKAASTPAAAPPAKKAAPAKAAAPAAAAPAPAAAAPAVAKPAPKPKAKAAPAPSKVVKKNVLRGKGQKKKKVSLRFTIDCTNIAEDSIMDVADFEKYIKARLKVNGKVNNLGNNVTFERSKLKLIVSSDVHFSKAYLKYLTKKYLKKNSLRDWIRVVANEKDSYELRYFRISSNDDEDDDAE

SEQ ID NO: 16621 - DNA, 3119 bp, DROSOPHILA
aatcagtggaggggctgcccgcaactgactcttgtttctaatttcggagcgtgggcgactgcaaaacccacagcacgggaaacgggaaacaatggaaaacaaactagaccgcacctaaacgcatgacgcagtcgggaacccatctatccgagcttaagaaacgacggcttgcattttaattacgttgttctttacaccttaacgtgttgaaatcccataaaagacaacaaaagcaagtcagccaacgaaggctgttgctggccaagttgtaaaaaggctcaaatggcaagggaaatctaggcaggagatgaaagtgcggataccctttaaagatttcagtataattactgactaagaatgtatacaattttattatattacactttcaacttagtatctatctatctgtaagagccattgatttcccttttaatatactctccctgcattgaaaggtattttcgtgtcgaataattagcaaaccaggaacctgcctgtgcagcaattaaaatttgctattcgctatcccacatggtggccaagcgaaacgcccaaattccccggctcaaaggtgtggaaacgtcggtgtgttgaccagcggcggcaacttgtgcttagtgagcgtgtttgcctccatttcggttgccatttcgactccgtttgcctttttccgtcgaagtgtgtggtcagctgtggtcaatgataaaagcgaaacgataatttccgttcgtggagctgggtggcaaagtgaccgttgacatgcaaatttccatttaaggcgaaagctttctaggtgccttggagttgctttttgggatgagcacaggtgaaggtcacagtacattcgaaagttgcagcaattctccaagaacttatacattaaaactgatgcctataaaaatgaaattattgaataaatcttataaaatccaaaataagttaaactacttctcccctaccatcttaaagatactctaccagagctaatggtaacttaattttatgttgtcccctgctgtagtggctccgagtggaagctccaggccaccgcccaccgagtcgtgtgtccctgatggaattcagtggtgctgacattcgccacctgcagctccttgaggtaatccagtattcttggaacgttggccttgacgcccagcatcgtggtgaagattctgcaacgcagagaaaaccaacgttaattcaatctcagcagctaatgaagattgactcaccgcacacgctccttgttctccagactctcgtctataatgcgttgcacaaactgtacctcgccacccacgcaggtgagttcctcctggcttccagttctggcattattgggtgctggtcgtctctctggattcctggtattgccgcctaagggatttggtaagttcgagtcgaagaagggtggattgcacaggcaaaattgatactgcaactgttgctgatcctgctcaaaatagctcttaaagatgttcgtgttgtctggttgagcatagacttctataaggctttccatgtgatttctctttacattctccttggcgtattctatgttttgcggtttcgattccaaagccaacatgtgccaaccatttttcttggccccaaggagtgaataaatgcaggaggagccgcagcctgtgaggaattcacttagtaaatcgttgtgacatactaaccatagcttacctatatctataccacgtatgttctgcaaatttagaggttccattagatcctccaaccacaaaatgtaattcaaacgtagtgctaatgtgggcaccaaacttccgggtgcaaaatccacatctaaatcgtaatattccttcaacagcattttggtcaactcacgaagggtcttttcattgcgaaagttcacagaaaccttgccattgagctcctaaattaagcaatattttattaaaatcaatgtctaagcaaaacaaatagtttttacttaccaactggcactgctgccgaaaatctttgtattttatagccattttggtatagtcgggctgcgtgcgtaacacattacgtggatgcatgccgactatcttttggtttcccttagtttttaccatatttcgttttcaaaaaatcgcaattgttaatgaaataaaatgccgccgaaattcgaacagctgtttattgcagcagtccggcaactccagcgagcaagagatgacaccagctcctctaattggtagttttatttggcccttctgtgctatcagtgactggtcacacagccacttgttgattcaacttttgtaaacaaaaaagtaaacttaatgtcttggcctggcaaactgctagttacctacgaaaactttacaaccgatttgccagtccttagcattgacaagaagccatatggatgccctgcttcctgccactgcaagtgcaagtgctgtcgaggattcagggagaagtacgtggcattcaatggggaaggggagaccatatttggaacggatttctccagcgagttatgcgaagacgttcagaaaattatgcgtttccgaagctcggatatgctgctattactgcgcacagcacaattacgcgataatttctggaccaatgagtattttaaggctgatttacaggacgattttcgagcaatattcgatgccttcgaagagaagaaccgcaaagtacaattggaaaagttagctgccattctggatacagtgagcagcggctacagacgttcagttagccaactggcaggccaggaagcacatggagctctgcgtcccaaaattgcagctttattcctaccaggactgcgctgcgattgctacaaatgtgagaatctaccgtggaaaaagctgcaggacgtggaggatcatcaaaagacgcatcgctattcagacaactttcactgccagatatgctacaggcgattctatctgcagcactcgttaacctcacacataatcagaaaatccacaagctcgcgggaacttcacgaaaacaagagatataaacgactactggagaatcagaagtcacaagaggagaaggaactggagctatcacttaacaaggtagaggatatcttggtgccagttgccgaggacctgcaatcgtactttaaggatgaa

SEQ ID NO: 16622 - DNA, 945 bp, DROSOPHILA
taacaattgcgattttttgaaaacgaaatatggtaaaaactaagggaaaccaaaagatagtcggcatgcatccacgtaatgtgttacgcacgcagcccgactataccaaaatggctataaaatacaaagattttcggcagcagtgccagttggagctcaatggcaaggtttctgtgaactttcgcaatgaaaagacccttcgtgagttgaccaaaatgctgttgaaggaatattacgatttagatgtggattttgcacccggaagtttggtgcccacattagcactacgtttgaattacattttgtggttggaggatctaatggaacctctaaatttgcagaacatacgtggtatagatataggtaagctatggttagtatgtcacaacgatttactaagtgaattcctcacaggctgcggctcctcctgcatttattcactccttggggccaagaaaaatggagaatgtaaagagaaatcacatggaaagccttatagaagtctatgctcaaccagacaacacgaacatctttaagagctattttgagcaggatcagcaacagttgcagtatcaattttgcctgtgcaatccacccttcttcgactcgaacttaccaaatcccttaggcggcaataccaggaatccagagagacgaccagcacccaataatgccagaactggaagccaggaggaactcacctgcgtgggtggcgaggtacagtttgtgcaacgcattatagacgagagtctggagaacaaggagcgtgtgcgaatcttcaccacgatgctgggcgtcaaggccaacgttccaagaatactggattacctcaaggagctgcaggtggcgaatgtcagcaccactgaattccatcagggacacacgactcggtgggcggtggcctggagcttccactcggagccactacagcaggggacaacataa

SEQ ID NO: 16623 - protein, 168 aa, DROSOPHILA
MVKTKGNQKIVGMHPRNVLRTQPDYTKMAIKYKDFRQQCQLELNGKVSVNFRNEKTLRELTKMLLKEYYDLDVDFAPGSLVPTLALRLNYILWLEDLMEPLNLQNIRGIDIGKLWLVCHNDLLSEFLTGCGSSCIYSLLGAKKNGECKEKSHGKPYRSLCSTRQHEHL

SEQ ID NO: 16624 - DNA, 4839 bp, DROSOPHILA
ggcaggtgcattctacgacttctaccaagacggtgtgctcgatgtgattcttattcgaaaagatggaaagggcaaataccagccactcgctttccggaacacgcttgactatgacgcgaactttgtgaaggtgattgtgctaactggcttggataacaagcagaacccggagagacgcactcctttgggtaggaaaaagcgaacctatggcactaacttgccaggaccacggatcacctacagtaccactactcaggatggtgatcagcagtgcggcagtagcgttcaactaccgcaggcctcgtattttgctctgcaactaccgtatacgtgctttggcttgggccgaacgccaaatttcgtggatcaattgactgtaggactgggcagcaagttgcgcaactggacgcaacttataccgaactctcagataattgtggttccaaaacccctaaacgaaccgtcgcactggaaggctcagctttttgtcacgcctagcaaactgattctgatgagcgtcgtggcgctgggtggcacctgcctggttatcgtctttatcatccttgtgctatatatcaaggaaaagcgcgaggataaacaggaacgcttgcaggagtctcacagattccatttcgatgcaatgtaaggtggtcgccccattaaatgtaaattaactaattaacacttttgattcaacccataagatgagcttttaattttattattatataatgttgattaatattcctaaaagaaaggagcgctctattaactccattataagctttccaaccatattgatgtcctaaaatgccacaaacaaattgataaaaatgtaaagtagaacaatatttggcggaccatctcaaggcggcttttaaaatcatagctcatcatggaatcaatagagatgctcctttacataatttatatttgtaatatggtttaagaaatgtgataatataaaaaagataaaaaataataagattcaatacgttgctcagacaaagtacatggggtttttcttcatgaattcggggacaatcgttcgctttgcgtactccttcttcaaatccaggaacctgttggtgctgtgacattacagaaagaaataagttcaatgtacgggtaacgctcacaaagaatatcatacccagtcagataaacgcgtccacgagcagctaccaaatgggctaaataggccggagccggataagaaaccgagcgattgcaacgagggaacatgtggcacaggttgtaggtcaactgctgcaacaagtcgatgtcaagattgcctgtgttctcaatcacattgtatcgtgttggcttggccgtgccctggatggcctggtggctgaccatgaagaactgcatctcgttaggatgcacaatggtgcgatcgaccacggttccggggtccacgttgttgaacttgttcgatgtcgttacgtcgccgctgggaaagaagcgagtgtgatgacgcttcaccacaatcacgcagcaaatcttgggtttacagcccacctgtatataataatataataattaactcatagctagtaactggtaatttcatttcatgttaaataaatagtgaggaaattcaaaaacttaccttgtcacaggcttgtttaatacacctcagttcctcgtttttgattttcggaaactggccgtcgctcacgccatctcggtagtagatgatatgatcaggataggcgttacggtactctttatacacgcgcaagtgctccaaagtaatcgagaacatgtcctcaatctcctccagagcccctcgctgcaaacgatattgcatgttataactggctccgtagggatcgtgtgaggctgctactccgaccacactgggaatctcgcgctgatcgggagagggatgggtcacatcggctccaatgtacatggtgttcttcatcatcggcagacgaggatcatccttgatcttgtggttgatgccgttcagcttggagttgatcttaagtagaatatttccaatcgtctgattattacactttcgttccacggtgaactgcttaatgcattgcgtcaaaattccatgctgcagctcggccttctgcttaattgtatcgtaagaaattctaaactgaggaataatcacaattgccagatcgtgctggctgcgcttcagatccgcgaaaatagtgtctaggctgcgttcgtcatccgtgaacggtctgtatgtcacatcagaatccaagcttatgttgactgccttgccttgggatattattaggttcccgaagtcattcagctgggtatagttcattttgcgaccactcctcggatcgcaatacaagaccgcacacttgtgcgccttgggcttgggctccagaaacttcatgccatccatgcgccacgacccgttcttcaccatagtaaacctcttactatgatattcaacctgaggtgggcttaggacgcgggtgcttaccacaataaaatcgttggcaatgcggatgccaaagcgactgatggtcggatccaggttgtgctggaagtattgcagcaagttcataatcttgcgctttcgcacgttcgtcgatgtggctgcgtactttatcatattggccacctgagttgctccatccttgcgctgtgaaatacatatgtttataggtatatgtaatgacaatatagcttacggtattgaacaccaagatatagatataaaggaatttagtgaactcacgtttagggcctgaccttcctcgatgctgcatagctcgatgggcagcagaatactcttgattgaagatccaacgttcagacaatggagttggggaaacttcaatgggtagttgcgactgtggaagtaggacgcaatggtgaccttcttcccatcgtgttcgaaggtctcactgctggccggggcacgagaaagaccatttacacggtatacccttggagcgctttgaaacgactgaggaggcgtgtaaaccacattaatgcctctgaggaatggctcaaggaagcgtcgcgaataatctaaattcgttgtattgttgattttagcctttaagctaaatcgctccaaatattcgatcatcggcattgaaatcggaaaggatttgtgcgatatatctacatttaaaaatggcctatcgcccagcataaatgcctgatacagaccgaccagggcctcgtatccatcatccagttcgtgacgattattaggatcggacatcttaaagaaggaacgaccgacacggatggctttgttgtggcagggtgaagccaaaacaacctccacgcactgcattgctcgcatgggcttgtcgaaaattcggtcattcatataactgcagaggagcgcgttcaataggagtatccataaaaaacataatttatatttacgtagttaacgatttaaggtcaatggtcgagtcaccagtctccttgatttcgatcgtgtagcgcaaagtacgaccattacgatctgtcacctaaaataataagaaataaaaacaactaaaatatcgtatagattaaattaaatttaactgccactgtatacatttaaaaatgttattactcccagttgttcataacttagtagacaatttcttgcaacttacagtcacttccggattttggctatttaacggcagcttatccaccgagtagcaagaggctttgccatcataggcaagaactgctccgcccaattggtccacccgaaattgttcaaatgcctgtctgtaaaactttttgggacgctctggcatgatcttcacgtcatagtggtatgccacagaaggcattttggacaggtcaaggtccagatagttgatgcctacttgcccgggtttgccgattgttccgcgcttaatgctcccggctggctgaggcggtaatggtaatggggcagcctgctgttgctgaggtggtccacgagattggtattggccttggctctgggtttggtttggttgttgtccaggcggacgctgttggtagccaccttcttgcccttgtcgtccttgctgatggccaccttgttgttgtccagacggacgctgttggtagccaccttcttgcccttgtcgtccttgctgatggccaccttgttgttgtccagacggacgctgttggtagccaccttcttgcccttgtcgtccttgctgatggccaccttgttgttgtccagacggacgctgttggtagccaccttcttgcccttgtcgtccttgctgatggccaccttgttgttgtccaggcggacgctgttggtagccaccttcttgcccttgtcgtccttgctgatggccaccttgttgttgtccagacggacgctgttggtagccaccttcttgcccttgtcgtccttgctgatggccaccttgttgttgtccaggcggacgctgttggtagccaccttcttgcccttgtcgtccttgctgatggccaccttgttgttgtccaggcggacgctgttggtagccaccgtcttgcccttgtcgtccttgctgatggccaccttgttgaccttgtttagtccacccttgtacctgctgtttgccttgttttttctgtgcagtccatccttctgcgtcttgggatttttgctgttggcctccttgctggaacccagatgcacgggatccgcctgagcttgtggatggctgttgtctcgaacctagatttagaaatcgacaaagaatgtttattacaataggtgttaggtttcgaaaaaactgcaagcaaactcttcgaaaagtattcacttggctgatttgaatttgctaacgcgaaaataatttgtatcactttaaaatacatacagtttgtcaagaaactgtt

SEQ ID NO: 16625 - DNA, 3197 bp, DROSOPHILA
aaatctaggttcgagacaacagccatccacaagctcaggcggatcccgtgcatctgggttccagcaaggaggccaacagcaaaaatcccaagacgcagaaggatggactgcacagaaaaaacaaggcaaacagcaggtacaagggtggactaaacaaggtcaacaaggtggccatcagcaaggacgacaagggcaagacggtggctaccaacagcgtccgcctggacaacaacaaggtggccatcagcaaggacgacaagggcaagaaggtggctaccaacagcgtccgcctggacaacaacaaggtggccatcagcaaggacgacaagggcaagaaggtggctaccaacagcgtccgtctggacaacaacaaggtggccatcagcaaggacgacaagggcaagaaggtggctaccaacagcgtccgcctggacaacaacaaggtggccatcagcaaggacgacaagggcaagaaggtggctaccaacagcgtccgtctggacaacaacaaggtggccatcagcaaggacgacaagggcaagaaggtggctaccaacagcgtccgtctggacaacaacaaggtggccatcagcaaggacgacaagggcaagaaggtggctaccaacagcgtccgtctggacaacaacaaggtggccatcagcaaggacgacaagggcaagaaggtggctaccaacagcgtccgcctggacaacaaccaaaccaaacccagagccaaggccaataccaatctcccagccgggagcattaagcgcggaacaatcggcaaacccgggcaagtaggcatcaactatctggaccttgacctgtccaaaatgccttctgtggcataccactatgacgtgaagatcatgccagagcgtcccaaaaagttttacagacaggcatttgaacaatttcgggtggaccaattgggcggagcagttcttgcctatgatggcaaagcctcttgctactcggtggataagctgccgttaaatagccaaaatccggaagtgactgtgacagatcgtaatggtcgtactttgcgctacacgatcgaaatcaaggagactggtgactcgaccattgaccttaaatcgttaactacttatatgaatgaccgaattttcgacaagcccatgcgagcaatgcagtgcgtggaggttgttttggcttcaccctgccacaacaaagccatccgtgtcggtcgttccttctttaagatgtccgatcctaataatcgtcacgaactggatgatggatacgaggccctggtcggtctgtatcaggcatttatgctgggcgataggccatttttaaatgtagatatatcgcacaaatcctttccgatttcaatgccgatgatcgaatatttggagcgatttagcttaaaggctaaaatcaacaatacaacgaatttagattattcgcgacgcttccttgagccattcctcagaggcattaatgtggtttacacgcctcctcagtcgtttcaaagcgctccaagggtataccgtgtaaatggtctttctcgtgccccggccagcagtgagaccttcgaacacgatgggaagaaggtcaccattgcgtcctacttccacagtcgcaactacccattgaagtttccccaactccattgtctgaacgttggatcttcaatcaagagtattctgctgcccatcgagctatgcagcatcgaggaaggtcaggccctaaaccgcaaggatggagcaactcaggtggccaatatgataaagtacgcagccacatcgacgaacgtgcgaaagcgcaagattatgaacttgctgcaatacttccagcacaacctggatccgaccatcagtcgctttggcatccgcattgccaacgattttattgtggtaagcacccgcgtcctaagcccacctcaggttgaatatcatagtaagaggtttactatggtgaagaacgggtcgtggcgcatggatggcatgaagtttctggagcccaagcccaaggcgcacaagtgtgcggtcttgtattgcgatccgaggagtggtcgcaaaatgaactatacccagctgaatgacttcgggaacctaataatatcccaaggcaaggcagtcaacataagcttggattctgatgtgacatacagaccgttcacggatgacgaacgcagcctagacactattttcgcggatctgaagcgcagccagcacgatctggcaattgtgattattcctcagtttagaatttcttacgatacaattaagcagaaggccgagctgcagcatggaattttgacgcaatgcattaagcagttcaccgtggaacgaaagtgtaataatcagacgattggaaatattctacttaagatcaactccaagctgaacggcatcaaccacaagatcaaggatgatcctcgtctgccgatgatgaagaacaccatgtacattggagccgatgtgacccatccctctcccgatcagcgcgagattcccagtgtggtcggagtagcagcctcacacgatccctacggagccagttataacatgcaatatcgtttgcagcgaggggctctggaggagattgaggacatgttctcgattactttggagcacttgcgcgtgtataaagagtaccgtaacgcctatcctgatcatatcatctactaccgagatggcgtgagcgacggccagtttccgaaaatcaaaaacgaggaactgaggtgtattaaacaagcctgtgacaaggtgggctgtaaacccaagatttgctgcgtgattgtggtgaagcgtcatcacactcgcttctttcccagcggcgacgtaacgacatcgaacaagttcaacaacgtggaccccggaaccgtggtcgatcgcaccattgtgcatcctaacgagatgcagttcttcatggtcagccaccaggccatccagggcacggccaagccaacacgatacaatgtgattgagaacacaggcaatcttgacatcgacttgttgcagcagttgacctacaacctgtgccacatgttccctcgttgcaatcgctcggtttcttatccggctccggcctatttagcccatttggtagctgctcgtggacgcgtttatctgactggcaccaacaggttcctggatttgaagaaggagtacgcaaagcgaacgattgtccccgaattcatgaagaaaaaccccatgtactttgtctga

SEQ ID NO: 16626 - protein, 962 aa, DROSOPHILA
AISKDDKGKKVATNSVRLDNNKVAISKDDKGKKVATNSVRLDNNKVAISKDDKGKKVATNSVRLDNNKVAISKDDKGKKVATNSVRLDNNKVAISKDDKGKKVATNSVRLDNNKVAISKDDKGKKVATNSVRLDNNQTKPRAKANTNLPAGSIKRGTIGKPGQVGINYLDLDLSKMPSVAYHYDVKIMPERPKKFYRQAFEQFRVDQLGGAVLAYDGKASCYSVDKLPLNSQNPEVTVTDRNGRTLRYTIEIKETGDSTIDLKSLTTYMNDRIFDKPMRAMQCVEVVLASPCHNKAIRVGRSFFKMSDPNNRHELDDGYEALVGLYQAFMLGDRPFLNVDISHKSFPISMPMIEYLERFSLKAKINNTTNLDYSRRFLEPFLRGINVVYTPPQSFQSAPRVYRVNGLSRAPASSETFEHDGKKVTIASYFHSRNYPLKFPQLHCLNVGSSIKSILLPIELCSIEEGQALNRKDGATQVANMIKYAATSTNVRKRKIMNLLQYFQHNLDPTISRFGIRIANDFIVVSTRVLSPPQVEYHSKRFTMVKNGSWRMDGMKFLEPKPKAHKCAVLYCDPRSGRKMNYTQLNDFGNLIISQGKAVNISLDSDVTYRPFTDDERSLDTIFADLKRSQHDLAIVIIPQFRISYDTIKQKAELQHGILTQCIKQFTVERKCNNQTIGNILLKINSKLNGINHKIKDDPRLPMMKNTMYIGADVTHPSPDQREIPSVVGVAASHDPYGASYNMQYRLQRGALEEIEDMFSITLEHLRVYKEYRNAYPDHIIYYRDGVSDGQFPKIKNEELRCIKQACDKVGCKPKICCVIVVKRHHTRFFPSGDVTTSNKFNNVDPGTVVDRTIVHPNEMQFFMVSHQAIQGTAKPTRYNVIENTGNLDIDLLQQLTYNLCHMFPRCNRSVSYPAPAYLAHLVAARGRVYLTGTNRFLDLKKEYAKRTIVPEFMKKNPMYFV

SEQ ID NO: 16627 - DNA, 21340 bp, DROSOPHILA
atatacggtttcttgactgatttatcatttctgtttctcaatattctcatcctttttttctttcggttcacctttagctgggaaccgaagttcttgatttcaaaatgattgcttcaaattgtttgtcgtcagcgaaatatatttgtcactaaaatcacgaaatagtttcgccatactcgtatgaatatcatttatccaccgcctgcctggtacttgatcctcaaatagttcatcgttttttcaagaagaggagctagggctagctttgggctaggctcgtcctattgtttaaattggtttatatgctcatttatttatacttttacactttacgctattaacaatttcctgtaatcaagttttgttgttcataagtttgtctttcatgtgtgagcggaagatgtaaaatggtgaatgactggtgaaacttaagttcaatttcgagtgttgacaggagaagttgtttaagggaaaacacttttcagtggttttttagtcaattcctcacgtcaaaacaaataccgtggaaaaattttgaaaatttataaatcatatacatctttaaagattcattcattgcgttctctgggatatgtttgcctatatatgtatgcattgttcggttttataatgtgtgccttttgtattttgtgttggttaatataataagttgtggttagattggttttcgtttgcagtggatatgttttttgttatcttatatgctttgataattcctcttactaaataattaatatgtataataaaatttgacacacattgccattcgcaaactgattctatcgctttcaccttcggctttcaaaaccgtttagctcatatacagaggctttattgtgaattagtgtgtataagtaactaaacgttttagtgtcttaaagtaattaccactcttgtgtttttgttgattttttttttggttttaactgcccagcctataaactaaattagaataaaattaagttaattgtaacattgaaaatcaatttatttttgatattctcttttgttgtggttcttttttgttttgttttaagtttcgatttgcgtataaatttaacagctaataaatttaaattatactttaattgaagcataattgtaatatatttaattccattcctcgtttttccacgcttcagaaagtctttttaatcgccgcaaaagtgcttaaaaatattattgtaactcgaattgttttcgctaatttgtatgtaaatttaatgtggtcaccaatagcaggaattttcactagaaaccaatcaaaagaaactacaacgttttgatacgaaattcaattgtgaatccctttgctagttagatagatgttcgtttatcacgttggttgcagccaacaaattaagtctaattttgaataaatgagtaatttgattagaatatagaacgaaggagagagatatattaattagtccataattgtttatatgtatgtagtttacttgtaattaataaacagaatcaattttgcacatcagtctaaacatattcaaaaatcacaaatacaatttcgataacaattacaataatagaaataataaaataaaaaattatcatatcaatacatcgccgtgtctatatataatatatatgtaaacatataacaaactaacaaacgcaaacatcaagctagatgcaatttgcagtaaatatttaaatttatgtggtgtctgtgatcatcttctttctgtctgtctgtctttgcttgcttggtttgtttgctgcttgtctgttcaatgtttcattcatatccgttcttttagtgctcaaacatttcacttcctcgtgtttgtcgctcctttttggtcatgctcgtgcacaagtttctgccttttcgtttgttttctcgtatgttaattgtatgtggttaattgattcttatactttttattttgtcttcattttgactaatcttacaattaattgctgttctgttcttacttcgggtggccccacgttatccgctgggccccttgaaaacggtctaacataaaagttcttgtatttgtttgcccttgcatttaaaacttaatgaaagtatcataattaataagaatcaatgaataaatataacgtgtatgtatgcttctcttcgagtctgtctgtgagtgtgtccgtgggtatgagtgtattcagtaatgtattcaatgtgtgattgccgacagtgtcaaatgtatgagctaagttatccttcatttgccgcttctgttatattgcttatgaattaacatttgacgttcaggttactgctgctccttctccagctccttctgcctctcatgttcctgctcctactcccgctcctgctcctggcaccggtgttcttctacggcttcgggttgatgctgtggctgttgcttagctagcggttgattgttgaatttagtgaatgggtgttttaacaattgcactgggcgcaatgtagtgataaccaggtatgggcagaccagcagtctccattgatattctgaaaggataaaggaagagtttcattaagagattgtgattaggtgtccacaaaacgttctgccacaccggtaactcccctcccccgactaagaagattttgggacgcccattttgcattcgtttagtattcatttttcactttattacaaactcatgtgtcttccatcattttttcttgcatataaactgttttgctttgttaccgacgctgttgcagttcctactgctgttgttgttctatgtgcctatgtgcctattttcgttaataccaaaagtattataattaattatacgatttaatgtttatacgcttcttctttactttttaactacattgtgttaatgagccataataagtatgttcgcatataagtttagtttatgtatgcacgggtatgtatgtatgtatgtatgtatgtatgtagatgtatgtatggatagttaggaatataatttggttataaaatcgtaagcccgcttagcttaatgcgatacataataatgtgtcattcttcttagaactaccggtaaatataaaaataagaaaatcatatcaaatttcattaaaatagctactgtaatttcgtgtgatttagggtagagaaaatcaaatttccaaatacttttcaactatatttttgaccaattcaaaaaaaaatttggttacaaataataacaaaaatatacaatcgcgtaataaatacaaaattggggtttggaaaattggtaaaaccaacaaataaaattccataaacaatcgaagacttaaagtctaatacaatataacgttctcttcaatcctatgcaaaaattctcctttcgcgaaacataagccttaaatatgattctttgaccgccatttctaagcgttttcgtgtgtttctctgtgtgttcgtttttctattcaaatagttggtttttgtacgctcattgcgtggattgcgtcaattagagcgaattggtccataaaggtcgttgatccccctcgctcagagctcaaaacccatcgtttcctctttgctcgggggctctacgcattggaatttctatttgtaaacttcttatagaaggttattttttatttcatcatctgtctgcttcactttctttgctgcggcttccttagtcggaaaatggcttttgggtctttatgcttaatgtttaaataatataatcgtatatataggaaaaatacgtttagtgcttactatctaagagagtacaattgattataagtattggatcgtgttttatgttacaatgaatggattgggtaaagattgttggctgttgaggataaatttatgctcggtacctgctctatatccgatgttcggtattcgaatccgataaacgcgatctaatctaatctaaagcttcgaagaacgatactaggggatgcgctaaaatttggcaaattctgttatgttcgatacatttctatgtaccggtgtatataagtcatactaggcatttatcaaaagttttggggtccaaaatctatagcgcccactagggtccttggtcacttggtcaaaatatttcaatcgggccatacacagatgaccctgtccctacgtattcaatacacaaaatggtttaagtgcttgattttcgattctgatccattattcaaatctctagctgccctatgcggctaatctaagtgtgacttcttattgttgtggttagattgtttttcaaaaacgttgataaatattgcgtaggttctgtctacatataactgggatgatactgtgctttaactagatgtaagaattgtcttgaaacttcgaatacgaatttgaatacaatatgaatacgtttgcaaattgtatgcataccacataagtttaaagcgaattttatacaatttttcttcttcaagaatctaaagactaaagctttcgcaacgctaccatgaaaacctatatatctacgggactatatctccactgctctccagctaacgcagctgcagccctacccctagtacggattaaacttgttgcgcggcttctccgcttcgccaccggtctccgtctggtgctgccggaatcgggaggtggcatagtgaccctttgcccgatttacgcccgtcgtctgcacaggcggtccgcccggattggctccggccccattggtgtttcccagcgtggttaggttgagcaggtcgagggcgctcaggttggacagagcgcttagggctcccggtttggtcagcagctgaagggccgaggccagaggactggacagggcggcggccgctgccgggtttactccgaccgatccatttgtggcctggccgccattggcactggcgtatccggtggcggagatggtgccattgctgccgccgccgtttgccgccggatttgcgccattggcaaccccggcggctcctgcagcaccggctcccacgacaccagtgccgctggtgagggtcaccgtcgtgatagctccgtttgtggccgaggtcggagctgctgctccggtgactgccgccactccagcagcagcagctccgggagctgcggcagcacctccgttctgctgggactgggcctgctccaggagattggccttctgcagctcaacactgtggacgaggttcggttaaggtagatagaaagagagagagagaaagaaaggaacaaattgggatattgttggtatttgtttcggtttcttttttgctttttggcagggtataggttttttcaaaacatttggttctttttcgattttgtggaattgagttggtttcatttgatcttctcttgattcttttcgtgttttgttatgcaaaaggttaaggaggttttgtgtggaggaacggttcggagttgacggagagagataaaaaagaagtgcttgttttaaagccattttgggtggttttggtgggagagcggcgttcaaattttggatggtaggagtagaatacttttgatgagctgttcgcttttaatggggaggcatagaccgaaagagtgacattgacttggaggatgaactaggtggtagtgggattcggctgggtcggtttgttttttggacgggaggtgaggttttggatcgttttggagttgaactgcagtttgaagtaccaattggatcaggtccagtttttttttttttttttttttttttttttgtcattttcagttgtgtgaaaagtgtgcgatgcgtagattaattcggtgcaggcctcatcatcctcataatcattcgcctcctgctcatcctcgaattcggccggggcctgctgaacttttatattatacatggttggtaagactagatgctaggtttatacagttagatatttatagttttctattagctagaacagtttgttaggctagcgttcgatgcgaactacgatctaggggtgtgagggtggaaaattatacgatttgtggtgctagtttgggcattggcattggcattggcaatggcttttggccgggcttacgacttacaggctaggacatgtgtgtgtgtggcttaggctacgtacggaactgtgttaatgactcgaccgtcgcccgcccgctttatcgctgcaccgttttgcacttcagcccacccacccacctctgcgcaactccgcgttatgggctgaatatatgaacgcaccgccactccgcctctgagagttggcctataccctacgaactaccacctacgaccgacgacctccttataccttatttcttctttgtcaattagcaagtcaattcgacaaaattgatgttagacaacaacacaagcaacaaacgctcacacatacagatagagagagaaagatagctgatggaaagctgaacaagatcgagccactcacctcatattaattaagtattgggccagggccaccgagtccggattgccgctgatggtgatggtgcggtcggtattgccgccctcgcgctcctcgcagttggagatccggatcatggcgccggatatttggcgaatctcggcgatcttggtgccacccttgccgatgatgcagccaatcaggtcgtttgagacggtcatctcgtgctgctgctgctgggctcggttcgcgggattcgctgtacgcagttgcgacccggccagtgcagccaaggctgctggggcagagcctagattagattggaaatctgtctggcatctggccgcagaagcgctcaactcacctgtgtggttgatgcccccagtgctggccggattcatcccagccaggcccaaggcggccagactggccagcgggttcttggccacctgttcacagagcgggacaaaagtacgaaacggattagattggattagatgcagagtgctccttcttcgttgggggctccggggcttcgtgggttaaggtgtgtgtgtatgtatacagttgggttaattattatctatttatctggggacggggctgttttcgggggagggagagatcacaagatcacaacacaacgcgcgtcaacttccagtaacaggtaacgcagatggaacataacaaaagggaagtggttggaacggaaacggaaaagcgtcaaacaaatagatacaagaacagaatgcaataggaaaagcaaacgggatacaagattatactccatcctcagctctttttacaaacaccatgaggttgattgtattgggatcgtatttctttttgtacatggatccaggggttcggtaaagagtgtatgtaagtattgattgtgcgatgtatgctgatgtttaagtatctggctttccgcagtctaaagcctcaatttgagtgttgctctggataatggttctacacaatttacaagttggctatacgaaatataataatagatacgaaggcaaatataaggatggacaaggataaagagagatagagaaagttgacagtttgaatagctttacagggaatacgcctacaggaagcttaggcttgagttcttctcatataaattactgaatccattaggatttagggcgacgtgtccttaatatctttgatgtttatgcatgatttaactccgaaaagtatgctagtgcttttgtaaatgatttccgttttatttatattaatctgggttaggttgcccttccttgaggcgaaattcagtgcgtcctcaagtattttttgttttcctcttttcaccaataacacctacagcaaataacatacacacactggcacgcacgcacacatgcgcatgtaaactaggactcgaaagggtgaagattcagggtgactttggggctcgaaaaatggggactctgcacgcgctccataaattaatcaaatcaaatgcaacacttgcaaatatgtttcaaataattgcatctgaatgctgcggggagaaaaagggaaaatggtggcagatgattcactagaaaggagcgcacaaaaaaggatagagaaaatctcaaataaatcatacaatattcaaatgctttgtgtgcttttatttctgtgtgcatgtgtgagatggcagatgcatttgggtgggtatgtctgtgtgtgtgcctgagtggatggtgtgtttctgtgagagcttaggaaacaagaactgcaatatttatcaaaatgcaatacgaatttcaaatgaaacaaatataacatgcgcatggaaatattttatgacccaaaaatgaatcgcaactcaataaagttcagtgacagagcggttggaggggacggaaagggggaaaatacaatgggttatatagaaaaaaaaactgtcatacaaacttgcgtgtgttggcatattaacaaacacttcttgccaagcacagacagtacatataaaaacgctaacacacagatacagatacagatagagatagaaaacaagttgaaacaatttccaaaactatgaaaaactttggctttagcaaggaaagagaggcggggtgggaccacaagtgcattttttgatgacttttggctgggataaagggtttgcttgggtcctcgctttccaagtcccctcggtctgatatttcgtgtgacttcggccaacgacaacaacttcagggacctggacttggccaaggagctgcagtttggcccaatgtcattgaaatgcggccagcggttgcgctgtctggggatcgtaaaagaaatgccaaaggtagtatactgggtatacaagctacaaaaaccggaactgggggctactgaggaggttgctacggcgggtagaattacaacagcaacatatgaacacaactatgtacactcagaaaaataatcatcagcgatcagcattaagttttccaaagccgattcggtcatttaaagcgattatattatcttataataaaaatgatcgtaattggaccaattaaaatgaacttcaatgaaatgaatacaatgcgtagatttaatcaatctatggaatgatatagtttccagtaatattcagtgctaacaaacagatataatttggttaactttcagctctaggaatttattagcctacattcaactgtttttctgagtgtcccatattgtgatgcgagggagtgcaggcaggtgtcagggcaggggacggtacatcatcatgctctgcttggcggagttgggttctcgagtcatgttgcttttgattatattggttaaacgagtaaagtttctttcaagagtctggtggagatattcgtgttcttgaaccgaattgcatcgctagcttaaaactcacatcgggcatttgctgtaggtgatggtggtgtgctggtatcgctccttgtaaatgtgccccctttaacaaaggatccgccaagcctgagataccagcatgtaggccgccggtagccagggcaagtggaaatactggacaggtctatgttcgattgattgattgatcattacggttgtgtgtgtgtttggtgtgcgtgtgtggaattataatcgtgtttcgtgtggtattgcgatttaaattatgtggccaaggaagaaagaaaagtagaagaacgaatattgtataccacaaataaatgtctttcagagcaagttggttaagatcttaactttgtagttgctatggagagatgtaagcttatcagatacatgtttaaatatagacgtatcgctagagaaactcttgtagaaagcttgcgagacgtgtgtgcagtttctggtgtggaggctgggattctcaacgggtttcgttgcaacgcagaacaatgttaaatgataccagggggatggacatactaaaaacaaatgaagacatctaagacggtttgtactttgatttcgagggtccggttttagggctcggatgatccaagggttttcaggttcatacaacaaccaatgccgacagattcgcaagggatgaggtacagttgccaactgactagactgctatcgcaatgcaacatcacattgggtactctattatatagaaatacattttaccgcagcccacaaaagttaaccctggaaaacagtacccattgtgaacgaaattgacaactgtgggggctttgcacactactgccttgcattaggctaacgaattgtaaaccaacaccgacaataaccaggaccaggaggagagagtgagaaatagagcgatttgtggaagagagacggagagatatcgcaaatggatggtacaactagtttttgatttattacattttttctggacattaattgaatttgatgcgacaacaaaaactttgtctgttttagttttgagaaacttttatttttcgttggggcaatggctggcgagggggctctgaaggtcggagaactgaactgaactttactgtgctgtactgtactgtactctagtggacgggactgactgtactggggcctgaattggattgcatagaaattaatttgtttgctgtttgttttagctgttgtttgctgtttcctgcggttctatagagcacaatattcgattttgacatgggattttgaacagagttataaacaatatttgtagattaggatggaaagagagaagcgagagagtattagagtgtaaaagatgtagggctcgggcaggatggtgttggatcagtatgctgttgtttaaatggctattggcattgtggttctggtgacaactcatctaaataaattgtttataaggtgaattccgcagttttgttgaatattcatatgaattagtcctttgttgagagagctaaactttaatgattgactacacgaaaatcatgagagatatcaagagaacgcaggtcgttggcaaatagtgaatatagtaatataaagataggagttgaattactaaatgttcgttacgatacgattagttagctggcgctcaaagagtttataggagtttatatttttgtggatcttgtcatgtgtcaaggatttgattaatagatgtttactttcggctcgggttggatagttatggcggatatatgtacgtagatggggtttggagagaaaggtggactagtgtagtttgaacatacttcttaacacacgctgccagcgagccctcttcagaacaaaacttagagacacagagagactgagcagagagtgaagagaaagagttcgagcccccgctccccgcgagccattctttctttcacatgaactcactcgcctcgcctcgccacgccttgaacacttttcactgaggcggaagaaacccaatgcttctcccctcaggatgctgcggatgcgattctcggagattcccggagactctcgcagactctcacattgagacagagacaggtgccggggcagactgagagagagaccgaacgcgcacgcactctcctcgcagacacacgctcttaacctgagagaagagagtgcaaaagaaactaaaagcaaaacaaaagtacatattttaaagtttatttcaaatattttcgttaattataatcgtcgattcaatggctgtaaagtttgttaacacattagttcactgttcggggtcaccacttggacttgaaaagagatgaatctcatgggtacgacgagtgggagcggtaatcggttcggtatcggttttggaatcggtagctttaacggtaatcggtacagtagattgtgaggtttgggttgacaaatcgcaggaggtgttctatggacggcaataagggtgtccaagtgaagagattacggagaaagagattacggaaaaattataattcggcgtctatagagcaagggtaactggcactggataatcggcggaaacacaagagaaagagagagagaaatacggacagagaaatataataacataaaattaagaaatattaagaggataaacagaaagtgaagtcgcgcagtaaccaaaatgatagttgggctaggtcggggcaaactcaaatagatacgaaattgtttagctggactcatgtggggtcggttaagatagagacagagcgagatatttagctgcggtggctagcaatagagtacacaacactgttcactgatcttaacaacacgtatagcctagtttactgggtgagaattcggccagacgtccacctacatacctcttgtgtgggcaccgcgtagtttccttggatggtgaaagcctgtccattggccaggatgacggggccagtaacctgtggttttggtcggtacgggatggtggcaccgcgtggcggggactgtttagaaaggaattatcaaatttcggacacaataggggaattccaataaactttgtcgactaaaaatctagtcaaagtagtttgccgaatagtgtatagcaaactcacctccaacatgacaagacatatctgatagatgcactgggtgatctgctcggcgctgccgctcaaggtaaccgcccgctctgtggaattgggtagcatttcactggccacttggatggagcagcccgtggtctgacgaatttccttgatctttgaaccactcttgcctgtcccgagtgtgaattaatatcattagtgggatggggactattgatattttcaatccgcttaccaattaacgatccacattgactggcgggcacaatcaatcgaatgggtatttgagttttaccaactttgcctacatcattgaactgcgagcaccactgaaacgggtcagaagttagtaatgtgaaccaaaaatactatggcatgggacgactatgatagggaatggccagttgtaccgcacacatacctcttcgaacttctttgtaatgagcgtgaatgccgaaaagattgcattagttgtaccagacacagtcacaatacgttccgggcatgagccatccgaaatgttgattttggcaccagactagtaaagaataccgaattagttgctgacttctgaaagcttttatcatgagtgacttacctcttcacgaaatctgttgacaatttcaccctttttaccaataatactaccaacctcctgcaaaaagagaaaaaaaacgaaaatatattgagaattatagttgggaaacacggcgcaaagtaactcttaaatgcttttaagatgtatctggctcgagccaccctggcagtctgtggacatcgaaaaacctttaagtgagtttcgtatttttgttttctgtctgatactgtcagcgacgatgctcaaatttgattaaatattaagtgatattatgccggagcatacagcggaagagcgatggctctgcgtgtgtgtgtgtaactacttttgcatatttaattgccacaaaaagcatttcacacgcgccacacccgcgcacccacagtggcagccagaaaaccagcccaaccagcccgaagcgattccatttccctttcagtcagtcgcctgtcgtcgctggaaactgtcgcacgtaatgaaatttgcggccagcgcgttttacgcgttttaattgattgtaaatatcagcactgccacagccagtaactgagtttttaaccaaaaaccattgcgaaaattgaaagggcagtgtcgatggcagagctgagctacaaagagggaatggccgaaatatatcctctttttgggcagcagttgtgttgcagcacggcgcgagcatggttcccaccttgcggctagggtaatcaattgccatatatcaaggagttcaacaagggaagtttcgtggttaaaatgaaagctaaatgcattgctatcagtaaacttaaaatatgatgtgaaggactttaaaggattagatatatatctaattagaatagcacattaacggatttcaagccgactactgcctgattgcctatgttcaatttgtgcaaccccatttatatttcaagccatttatttggtcgttttaaaatgttgccactcgcagccattcaatttgctagccataaaccatagaaccaccttcacaagcccgaagtgcagcaatccattgtgccagattgaaagaccaaaagagcgcagccagagtcagcgaatacatcttttgaaacgggcagcttgccagacaaaatgcaaactgggcaaaacaacgtgcaagggaaaactgcctccgccttcgaaccccttctctcacttttccctcacatcatctgattttttatgcgctgcttgcgttctggctactctttgccagaatatttatgcccacgagaacgaaatggatgcaggccagttcattggacagtatagatatttattgtacacaaatgtcagagcgaattggcataattattgccgtaattatcgtcgaacccaactcagatgcgttatacgcctgtctgcaatcatagacgaatttctcggcgaccagtgcattttataggacaagttatctgccccagatatgtatatgtatgtatgtaaattgtatctgcgccacgacatctaagtgcggcgtggcctagagactacgcactttcggtggccctcgtagccattcaggttgatggctgctcatcagcgcctcggcctcgtcatcatcatcattaataatgtggccaaaagccgctcagatgcccacccagagcccccatccgcccgctgcgtagcttccattcaattatcccgctgcgattgcgggccagttcagttccgctccgctcagaagtttgcgccatttgcataaatcggatctcatccccatacctataaaatcgtccgtcctaaatcagcggacgccgttttattacagtgaatagggcaaaattcgggactttcacttgattgcattgatttgtcctttgcccacttcaaccgcctcatcaatacaaacaccaaaacccacccaccgaacaccaccaccccaccacccccccaccaccaacatcccgactgtgctcgactatgcgaatggcctccctgccggcaattaaattcacagcattctttcgcacagctcagctcctgctgcaacaatgaaccagcgcatttggcatttgccattttcgcattttccgatttccacatgcgtgcgactctcgtatgcgaaaaacactttgcggttcggccatgctggagcattttgactgccttttgttggattgaatgttttgggttcgggccacacagctcgttgggctcagaccgattctggttgggattgcttgcataaaatatgcatatgaaagttgacatgcaggcggcgggcagccatttcacattcacaagttcacattccgttctgtggtcacaggaaataagatttgattattcgttgttattgatttcgctttgtttttcagctcaagggactttgactattacaacttggttgtttcgtctctcgccaaaattgttaaaattgtggatgggacgagactgtatgggagcctttcttaaactgaatacagaacgaggatgaaacccaataaattatcccaaattcaaagtttaaaaccccgaagcaacgcatttatttattaatatagaaattacatatatataagctcttgaagtgtaatatctatggatagtatttgacactcatacatttgacagacatacactggttacataattatggtatttagatcagcgaacccatcttaaattcttcgcgcacatctctttgtatttttccacacagtacctagccaagcacaacatttggctagttccatttattaccaaagggcaaaacatggactgtccgcccaaaagattatggcaataacaatggcattggaggagagaaacaaacaataactgaaaacgcattaaagctaaggcctgaagaatggacaacgctaattgcgagccacaataaaagcggctgaatgggggagttggggcaaagagtttttgatgttagtggagcagacagtaaaaagacggagaaaataacgagaaaaagcaaacaatcccaagcagctttggccttaactttaactcagacaacaaccgaaaatagttggagtagcatgacttgtcccatgtttttccccctcccaatctctgcgatttttggtcttaatgtgtggcggcgttgaaaattgtataaaaataagcgaattgcaacaacaaagcagcagccacactagcaacaccatcagaaaaatctgcgacagccattgcgaaaccgtgagaaccatttatgggagctgcagtttgctgttgcaaaggaaaaatgcaagaaaaacttgccacaattgctggaaaatgcaatgtggcagagggtggggggagctcacatatggcctgctgtggcacacatgtgccacttcccctcctcctttcccaccacctcatcccataaatcatccagcgcatttgtcgccctgcaaacttttcaattcgcatttttggctgtagtcttttactgttgtactgttgtttttgctgctgcaggcagtcgaaacgcaaaaaattgtacaattaaattatttacaatttgccagggccagatgctggatgctggacagggccatgccgcgcagcaagtggcacgtttttaatttgattaaatactgaaaacaacgcacggcgaatgagaaatgtctcctgcaggcgaagggatactaaattgcactccgggaaagctcaaagccctaatttaggtaattaaattggaaaatacccatagttgtggcgacgaaaatatcagctctaacatcgaacgtattgaaatccattgcataacgcacaaccatgccctgaagtcagtcggaggtttcggaaaatagttaattaaaattagacaagtgcttgggaaatgtggcagactgcgatgaaaattcgcataagggtgccgtccgtcgacggcgtcgtgcaatttcactaattaaaaatgcatgattcagaaataagaacaactgcaaactgcaacaaatatctctgtctactgccctgacaattctaggcgagagagcaacccacatttcagtttctttctatgcaatttgcgtatggctgccaagaaataaaaaggtgtacagaaaaacgagcaatttgaagaaaacccaacaggcgggcccaaaaacgaaggaaaaggtgctcttctgcgcacttcgtcgctcgattgcatggcagggcacagttgtttgtttttccctcccggttttcaagttttcatttttcataaattaattaactgcatcacgactatggacgcgacagcaactgcgattttgactcagacccagactctgagtgagactttcgtcatggaaataatgagccaaagttaattagagacgctggaaaatatcaaaaaatagatatactcgcgaaacaatggcaactctggccttgcactactccctgccccgaaagtgcatacgattgtgtcgctgactgtacataccacacagagattatatactcaatatttcattaatgaataattgcaattatgaccgccttgcagatttatgcgatgatgactcgcattaataacaaaaggcaatcgagttcaatattatttaactcgttttgtatgtatgtacatattaaatattggaaattcagcgcatattcatgccaatgtactgttttaaaataaggttacaaacaagaatttcctcttgtgaagtgaaatcgtgaaatcaaacctatcccaacaatacattagttatatctcatctcatcttataccaacaataataaaatacagtcttccctctttaaaggcaattaagctacatatatcgatacggctgtcgagatttatgttcaattcattttcaagcgaactgagttgacattacatggctgtttatttgccgcactgagctgtcgtttctttggctcgttttcctgctcgccacttgatttgcattgcgcttcaaatttattcacatctgcgcggctgttgaaaaaatcgcataaatcatgctaatctataactatcgatcaaaggcaaccagcaacaactacaaacgacagactcggtctctctgtcggcgccgcacaaaattgtcttgggaatttattacccaaatccttgtgatggcgagcggaaaagaagtgaaaatctcggcgagtgtgcagaattcgcatttgcatttacacaatatctatttagccacattgtgtaaaagcccaaaagtgcgcaattactcacgagctccgcgatcggcgaagggattccacaccaggtagccaaatccctgccagaaagacactaccccctctccgttttggcttaatttgcttctttgtgtgcttggctgctgctgttgcttttgctataaattgtcgcgtctaaacatatttctggtctttttgccaattttcgacggcacatcatgtaacgagctcctttcgcacacctcgctgcactccggacggctgtcgccttatctgcacctgtctcggtccctcaaatcttggtgggataaaaataatattcaacgacgaccaaaacttaattataatcgatgcctgggcaactgcaagcccgctgcaaatcagcttcagctgggctgaacgaactgaaaaagataaatgacggctttgcctgcccaacacgtgctgggggagttggactccctcccccctccaatcttctggccaagatctctcaagtggtaagcctctcatcgcatcgcatcgcatcttaactcaactcaacttgagaagcaacaacgatgctgcggatttgcgtgacagccttttctggattgttgttggcggctaatgttgttgaataatagtttttaatggctgttgactgttattaaataaataagcagccatttagtgtctgcttatctatctgtttgtttaaagacgctcatagctgactactttgactgcagcgaataagtcagtggaataaagaggctggagttcaataaatataccatcgctctttggcaatctttaataaacccaaaatcaagaccaacgcaataattgctgttgcggtactttgataaatattgattaaacaatgttggaatgcagctattatcgcatcatttacgtcaattgaaccctcctcaattcacatatattttgctgccagcaagagaagagaatcgcttcggggtatttgcgctgagcaattgctatcaaaacatttcccttgattaaagcacacaatgcgctgctgtcctcgatttgtggttaatttcgtcccggtaaatatttaaatatttatttttatatgccatcttttttgcgactggtttaacctgtcgtcccgcggggatagttgctatgcgaaatagcccgctggtcctgaatgtccgtttctccgctcagcattcacatatgatacgttcgaattttgttattgtgggcaatgaaaacaatttataaaaaggtgtattttatttgtttttgtttttcgtttttattgctcatatctgggagccgtaatgattgtttaataggcgatgccttacttcgcctcgtttttatggccctgtgtttatatgtatctctacacatacatattttcccgactcccgcgcaacttttcactcactgccccatttcatctaccttaaatgcgtgacgtggcgcggatttaattgtaatttgcatacaaaattcacgcgttaatgtgtaattttttcattattgtttgctctgcccgttttgcccttcgttgtttgccatcacatcgcagttgtgtattgattttgtgcgaattgaaaaagcgtttatataacgggtttgaccactttgattggacgtcctgactccaaaaagattgctttctttttacatacctcacctacaaatgaaacttataaacatatagacatatatagagcactttcagttttcagtcatttccattggaaactgtctatatggaggtgccaggcttcttgatgcatttttaaaatactttaggctgaaatcgacttaacttacctttccttgcataatcagccttattgtgagtgtcaccgatggatcctcgtgtttgatggacgcaccgcccgcactgctgctcgtgttattgtcttccatggtatctattttgctggctttgtcttaacgcggtttggatgaaagtgtatgtggatctgaccgaactcggcggtctgtatcgcagcagttgtcttttgcggctcacttgcgattatgttgtgggatttgtaaatataactttgctatgcgagtatatcaatcataaatgagcgatacacgtactaaacatatagatattttggctactttgcttgcgtatgcgtattgtatgtttctctagataaaattaaattggtggtttcttttgctagtcgtactacgttgttggcttaagctcgctgcgttaactctgctgcccgtatcttcgaagtttttattcaaatgcaacaaataatcacggctacggaaatatttcttgtatttacgcgttcagagttttcgtatatttattgttgagcaagaatactgttgcttagctgatgcatttagagatgtatatctgttgggtgcctaagctgcaaagagacagaaaattattgaaacgattagtttggcacgaataaatcattttgggcatttcttaagtgtaagtgccattaggaaatttttaattttccactcgcccaataaatcacgaaattagtcaaattagtttatgcacacagtgccagcaatgcatttaatcacattgccatgcagagttcacgacttccggcacttttggccgagctgaacaacgataatgcggacgggacgagaggtccccagccggactcgttcatcatccacatttttctgacagagagttggcccctgtcctgggcctgtttgtaattttgatatgaaattcttcattttttgttctcttgtttttcgaacttttttttttgaacctgcgccaagtttttccgcatattccaaacgctgcgccccatatgggtgtgtactcgagatacagatgtatacatgtacatataatattgatgtactcccgctgctgtcgctgggacatttcttacgcttgaaatcacttcatatgcaatttagtacagatactcgtactggtacaaattttcgccggcatacccctcctgcccccctcaccacaccgctctccacaaattcccagcataactcgatgtaccccgtgttcacatgcacacgagtatgtacggatatgtacgatgttgtcggcaacatcggcatcaggcaaaaatgattcccgggggcacaagaaatatttgcgcagcgaccaacgcgatgactaccaaaagcttcctgtcatttcccttggcttcactcctcactccctgcaccacacatctccatacccatgcccatccccatcaggcatgcctgatggcagagttgtttatgaaattatgcgcactaattccccatgtaacggtggctcagcgcagctcacctagacagaaagaggaataccattctgaagctcggactacacaccgaaaatgcgcatattttgtccaagttcgctgcacttatcttttg

SEQ ID NO: 16628 - DNA, 3129 bp, DROSOPHILA
cttaggcacccaacagatatacatctctaaatgcatcagctaagcaacagtattcttgctcaacaataaatatacgaaaactctgaacgcgtaaatacaagaaatatttccgtagccgtgattatttgttgcatttgaataaaaacttcgaagatacgggcagcagagttaacgcagcgagcttaagccaacaacgtagtacgactagcaaaagaaaccaccaatttaattttatctagagaaacatacaatacgcatacgcaagcaaagtagccaaaatatctatatgtttagtacgtgtatcgctcatttatgattgatatactcgcatagcaaagttatatttacaaatcccacaacataatcgcaagtgagccgcaaaagacaactgctgcgatacagaccgccgagttcggtcagatccacatacactttcatccaaaccgcgttaagacaaagccagcaaaatagataccatggaagacaataacacgagcagcagtgcgggcggtgcgtccatcaaacacgaggatccatcggtgacactcacaataaggctgattatgcaaggaaaggaggttggtagtattattggtaaaaagggtgaaattgtcaacagatttcgtgaagagtctggtgccaaaatcaacatttcggatggctcatgcccggaacgtattgtgactgtgtctggtacaactaatgcaatcttttcggcattcacgctcattacaaagaagttcgaagagtggtgctcgcagttcaatgatgtaggcaaagttggtaaaactcaaatacccattcgattgattgtgcccgccagtcaatgtggatcgttaattggcaagagtggttcaaagatcaaggaaattcgtcagaccacgggctgctccatccaagtggccagtgaaatgctacccaattccacagagcgggcggttaccttgagcggcagcgccgagcagatcacccagtgcatctatcagatatgtcttgtcatgttggagtccccgccacgcggtgccaccatcccgtaccgaccaaaaccacaggttactggccccgtcatcctggccaatggacaggctttcaccatccaaggaaactacgcggtgcccacacaagaggtggccaagaacccgctggccagtctggccgccttgggcctggctgggatgaatccggccagcactgggggcatcaaccacacaggtgagttgagcgcttctgcggccagatgccagacagatttccaatctaatctaggctctgccccagcagccttggctgcactggccgggtcgcaactgcgtacagcgaatcccgcgaaccgagcccagcagcagcagcacgagatgaccgtctcaaacgacctgattggctgcatcatcggcaagggtggcaccaagatcgccgagattcgccaaatatccggcgccatgatccggatctccaactgcgaggagcgcgagggcggcaataccgaccgcaccatcaccatcagcggcaatccggactcggtggccctggcccaatacttaattaatatgagaatatcaatggagactgctggtctgcccatacctggttatcactacattgcgcccagtgcaattgttaaaacacccattcactaaattcaacaatcaaccgctagctaagcaacagccacagcatcaacccgaagccgtagaagaacaccggtgccaggagcaggagcgggagtaggagcaggaacatgagaggcagaaggagctggagaaggagcagcagtaacctgaacgtcaaatgttaattcataagcaatataacagaagcggcaaatgaaggataacttagctcatacatttgacactgtcggcaatcacacattgaatacattactgaatacactcatacccacggacacactcacagacagactcgaagagaagcatacatacacgttatatttattcattgattcttattaattatgatactttcattaagttttaaatgcaagggcaaacaaatacaagaacttttatgttagaccgttttcaaggggcccagcggataacgtggggccacccgaagtaagaacagaacagcaattaattgtaagattagtcaaaatgaagacaaaataaaaagtataagaatcaattaaccacatacaattaacatacgagaaaacaaacgaaaaggcagaaacttgtgcacgagcatgaccaaaaaggagcgacaaacacgaggaagtgaaatgtttgagcactaaaagaacggatatgaatgaaacattgaacagacaagcagcaaacaaaccaagcaagcaaagacagacagacagaaagaagatgatcacagacaccacataaatttaaatatttactgcaaattgcatctagcttgatgtttgcgtttgttagtttgttatatgtttacatatatattatatatagacacggcgatgtattgatatgataattttttattttattatttctattattgtaattgttatcgaaattgtatttgtgatttttgaatatgtttagactgatgtgcaaaattgattctgtttattaattacaagtaaactacatacatataaacaattatggactaattaatatatctctctccttcgttctatattctaatcaaattactcatttattcaaaattagacttaatttgttggctgcaaccaacgtgataaacgaacatctatctaactagcaaagggattcacaattgaatttcgtatcaaaacgttgtagtttcttttgattggtttctagtgaaaattcctgctattggtgaccacattaaatttacatacaaattagcgaaaacaattcgagttacaataatatttttaagcacttttgcggcgattaaaaagactttctgaagcgtggaaaaacgaggaatggaattaaatatattacaattatgcttcaattaaagtataatttaaatttattagctgttaaatttatacgcaaatcgaaacttaaaacaaaacaaaaaagaaccacaacaaaagagaatatcaaaaataaattgattttcaatgttacaattaacttaattttattctaatttagtttataggctgggcagttaaaaccaaaaaaaaaa

SEQ ID NO: 16629 - protein, 386 aa, DROSOPHILA
MEDNNTSSSAGGASIKHEDPSVTLTIRLIMQGKEVGSIIGKKGEIVNRFREESGAKINISDGSCPERIVTVSGTTNAIFSAFTLITKKFEEWCSQFNDVGKVGKTQIPIRLIVPASQCGSLIGKSGSKIKEIRQTTGCSIQVASEMLPNSTERAVTLSGSAEQITQCIYQICLVMLESPPRGATIPYRPKPQVTGPVILANGQAFTIQGNYAVPTQEVAKNPLASLAALGLAGMNPASTGGINHTGELSASAARCQTDFQSNLGSAPAALAALAGSQLRTANPANRAQQQQHEMTVSNDLIGCIIGKGGTKIAEIRQISGAMIRISNCEEREGGNTDRTITISGNPDSVALAQYLINMRISMETAGLPIPGYHYIAPSAIVKTPIH

SEQ ID NO: 16630 - DNA, 3846 bp, DROSOPHILA
cagcgaccaggagcgcaggcaggcgcagctcgcggccagcacctacgacgtgctacagcggacgacggacagtatccagcgatccaaccagattgccatcgaaacggagaacatgggggcggaggtaattacccagatagtagccattaacagggctaactaatgctcgcttacgcatcaacaggtactcggcgaactgggcgagcagagggagtcgctgctacgcaccacgcgccgcctggaggacgccgatcaggatctgtccaaatcgagggtcatcattcggaagttgagcagggaggtgctctacaacaagatcatcctaatcctgattatcattctggaggtgggcatactcgtcggcttgctggtgctgaagttcgctcacctgtgagccaatgccattctattccaaagtcgtaaccaccaaacaggcgatggactatatatacctattaatcgttacgaattctttgtcctagttaataagcttataaatgtatatactccactaaaatgcacttccaattcaaaaaggtcagttttaggatatacccagcgatgaatcgggtggttgattatgtttattcatgttggctaaagcgttaatgccttagacgtctataatatgtattatggtagtaaaacacagataaaatcgggtctggacatcggaagctctgcactccgaagagtttagcccagtcccaacgcatatacatacgtatgctataacaatgataatatgtagttcgtgcagcacgctatgccacgactatttggcaaaaagcaacgttaattacattcagtgggcgacaacgagatagtagaacatcctgaacaatgtctgcataatacttgatctatgataaacggttacatatatgtaagtatgtgggcatcgctttggggatgcttctttgttcgagagatgtttgggatttcgcagagctgcgcctcctcattcctttggtgcagcagctctccgcttcagttgccttcaattgtccttcggaagaacgatggaccagccgaaaacgcggcgatcgaagccgcaggagaagagatcgcagtccagcagcggctcctccgcccacgctacagacgacaccatccgtcggtggccctgccgactggtccgtggcaatcgggcgactctctgcccgttcaaatcgaacagtcggatctgtcgattgtcatgcggtatggcgataattccaccagtggagaccgccaaacgattgaccgaggaatccgttcgaatggtggccaaggcggatcgcatgttgcgcagctcccagaccttgattgtacgatcatctgatccggacaccaccttgtcgtcgcgtgcgaacacactggacgtaaccgtttccgtgtgcccttggaagacggagaccgctgggattgcctctcggaagtcccatagacggaacgtagtgtccctggaagcggtgaccaccaggcgctgggtgggatgtgccgacacgtgggtgagctcgtggtcgtgcccagtgagcggctgcagtggcaggccagtctccacgtcccacaggatggcagtccgatcccagctgcccgtgatgatttgatccatcgaagagagccaatcggcggccaccacgactgaaagatgaccgccggggcctgtgaactcgcagagcggagtgcgtaaggtgtccacacgatcgcgatcttccacctgctcatcactgtcgtccagttcctcctctgaagaatggcccttcctgaaaatcatgcaacgattattgaactactataaaatatattgcaaagttactcacttgggcacttcccagttgacggccgcctgccagatgtgggcagtaccatccccgctgccggtgagcacaagatctcgctgctgatggaacttgatggagtttacggagccggcgtgcccttggtactgcaaaaggcacctggcgctctccacgccccagatgcaggccgtatgatcggcggaggcggtgccaatgatgggttgtcccgccttggcggcaacctgccagatgccatccttgtggccgccgaattctcggaccaccgtgctgaccactgtgggcgccttaaagctggacacaatgcggctggtttgggccttgatcttgttgctggccttggctttgctgccgccggtagcgctgcttagtttggccttcaagctcttgtgtgtactggatgctgcagccaggaagctgcccgccacctcatccgtctgggttgcaggcgtggccaaagctgcggatgaggcctgagtgctcattgaacctcctgctgcggatctggcatcgggtggaatcaatgactccttggtggtggtggctatgtctagcttctcctgcactataacagagaataggctttaatcatgcgtgcactatacaaaatttgacatatgtaagcaataaatattaaagtttatgaacgagaccttaaggagttgtggattatatagctacttacgggcctggttctccagatacagctgctcgaactcccgctcgatctgggcgaagaggacgtgcaggcgtgcacggaatggtgcatcttccggtacggcggccacgtcctccgtcaaactggtgaggcgcacagcccgtgtcttgctagccttcatgcttttcttttcgcctctttgttgtgtatctcgcaagtgattttctgagccgagctggtcggcgatatccgtttcctggtgggcagagcgcccgggggaatccaattagtgttcaggggttgcagactcgcgctctattgatccatcttccgctgctggcgatgcatttgcctctttggctgactggggaactgctgttgcacttggttttcgcaatgataatatacttattgcaggtgtttttgtgcgcggggggagcgggcggaacagctggtgtgtgtatcgagtgttatcgatgtgcgattatcgcacagtcggactgtggcacactgagagcaaattgaacaaattaaaataaaataattttgaaattgcagtttacatattaaatatatttatatcataaaaacgaaaaatcctgtaaaaattaactgaaaattcattatatgttatgaattagtttagaaaaattttcaacaaaaacacatctataaaaatgtacaattaacaaagttttttttttagtgcactttggtttgagtactagtgttgagaaacaattagttaattttgctgactttcaaatctgacacgtgaaggtaaataaattcaaatagaaatgtaactatggatcagcgctttcctgtaattatttattagggttgattatcttgtataaccctttgaaacggaagcattatccttaatcaacactgtgtacttgaacagctgtttggcccgtagttgtaggtactatttttgaaaacaccattgggagttcccacaagacaaacaaatccgtgcaccgttgtattggattccaatcgaacagctgacataccttcgggcccgttagttttcccgatcgccctgcatatgataccatatctcccattacagcgctgcagcccaatcaaaccggtttgtcgcctttcgacttttcggtggtctcagttcacatccatttccccaaccagtccaattgcttttatcttgctcctcgagtgttaacgaaattgcttaaatccacccacattcatcctttcattcagttcggcctgggagtagcagcatgaaaaacgttttggatgtcatgtcgatgcagcagcacgtggagttgaacaaggcgcagaccatgaagcccatcgactatcggtaagttgaatgatccaatctaaagataccaccaatatatacatatctgt

SEQ ID NO: 16631 - DNA, 1669 bp, DROSOPHILA
aagtgcaacagcagttccccagtcagccaaagaggcaaatgcatcgccagcagcggaagatggatcaatagagcgcgagtctgcaacccctgaacactaattggattcccccgggcgctctgcccaccaggaaacggatatcgccgaccagctcggctcagaaaatcacttgcgagatacacaacaaagaggcgaaaagaaaagcatgaaggctagcaagacacgggctgtgcgcctcaccagtttgacggaggacgtggccgccgtaccggaagatgcaccattccgtgcacgcctgcacgtcctcttcgcccagatcgagcgggagttcgagcagctgtatctggagaaccaggccctgcaggagaagctagacatagccaccaccaccaaggagtcattgattccacccgatgccagatccgcagcaggaggttcaatgagcactcaggcctcatccgcagctttggccacgcctgcaacccagacggatgaggtggcgggcagcttcctggctgcagcatccagtacacacaagagcttgaaggccaaactaagcagcgctaccggcggcagcaaagccaaggccagcaacaagatcaaggcccaaaccagccgcattgtgtccagctttaaggcgcccacagtggtcagcacggtggtccgagaattcggcggccacaaggatggcatctggcaggttgccgccaaggcgggacaacccatcattggcaccgcctccgccgatcatacggcctgcatctggggcgtggagagcgccaggtgccttttgcagtaccaagggcacgccggctccgtaaactccatcaagttccatcagcagcgagatcttgtgctcaccggcagcggggatggtactgcccacatctggcaggcggccgtcaactgggaagtgcccaagaagggccattcttcagaggaggaactggacgacagtgatgagcaggtggaagatcgcgatcgtgtggacaccttacgcactccgctctgcgagttcacaggccccggcggtcatctttcagtcgtggtggccgccgattggctctcttcgatggatcaaatcatcacgggcagctgggatcggactgccatcctgtgggacgtggagactggcctgccactgcagccgctcactgggcacgaccacgagctcacccacgtgtcggcacatcccacccagcgcctggtggtcaccgcttccagggacactacgttccgtctatgggacttccgagaggcaatcccagcggtctccgtcttccaagggcacacggaaacggttacgtccagtgtgttcgcacgcgacgacaaggtggtgtccggatcagatgatcgtacaatcaaggtctgggagctgcgcaacatgcgatccgccttggccaccattcgaacggattcctcggtcaatcgtttggcggtctccactggtggaattatcgccataccgcatgacaatcgacagatccgactgttcgatttgaacgggcagagagtcgcccgattgccacggaccagtcggcagggccaccgacggatggtgtcgtctgtagcgtgggcggaggagccgctgctggactgcgatctcttctcctgcggcttcgatcgccgcgttttcggctggtccatcgttcttccgaaggacaattga

SEQ ID NO: 16632 - protein, 487 aa, DROSOPHILA
MKASKTRAVRLTSLTEDVAAVPEDAPFRARLHVLFAQIEREFEQLYLENQALQEKLDIATTTKESLIPPDARSAAGGSMSTQASSAALATPATQTDEVAGSFLAAASSTHKSLKAKLSSATGGSKAKASNKIKAQTSRIVSSFKAPTVVSTVVREFGGHKDGIWQVAAKAGQPIIGTASADHTACIWGVESARCLLQYQGHAGSVNSIKFHQQRDLVLTGSGDGTAHIWQAAVNWEVPKKGHSSEEELDDSDEQVEDRDRVDTLRTPLCEFTGPGGHLSVVVAADWLSSMDQIITGSWDRTAILWDVETGLPLQPLTGHDHELTHVSAHPTQRLVVTASRDTTFRLWDFREAIPAVSVFQGHTETVTSSVFARDDKVVSGSDDRTIKVWELRNMRSALATIRTDSSVNRLAVSTGGIIAIPHDNRQIRLFDLNGQRVARLPRTSRQGHRRMVSSVAWAEEPLLDCDLFSCGFDRRVFGWSIVLPKDN

SEQ ID NO: 16633 - DNA, 8736 bp, DROSOPHILA
ctccggcgataatggagaccgacccgcacacacacacacacaacacggccacacggtgacgggcgtagaggcacacaccgagccaactcgaatacacacgcgcgcaggggagagagagcgggagagcgcgggcgcgctctcaattatttatttacttttttcgtaactgcattccattccagctcaaacacacgcacacatatgggggacgaacacaagcgcacacgatcactgctcacagttggtgctgcttcttttcatttcttgttgttgcaagcgtttgaactcctttacttattttcttattttcgcctaattgaaactaattaacgacgataatccaaccatccacttggtgttcacaaaaaaatatgtacttcagtttagtgagttcgcgccgtcgccgatctcttcggttccggaattccttgggggagcagcaaaaaacacgagtagcgcgcttgatgaccgtccgattcggattcggaatttgttttggtaacattcgctgctagtggtgtagcagaaaacatcgcattgcatatcgatacactcgcggcgatgttattcgatgtattggttgatatcgatattataggctgtattgacgcggttgcagagatgcgatatttaacaatcatgcacgaaaagtatttattgttatttggcttgtgtagtccccaagcataggtgtaattgttgagggaagaaaataggagttgtacgttcaaagatcggcttggtaacaggaactagttcggttcttcaagcgatgttaatcaaagccagttccgatagatcatgttaactcgctctgttaacaattactgttatcttaatcctaacatttccgttacattttaaaaacagaaaaagaaaaaatttaaaaaaaaagactgtaaactgagttacgcatttcgaaatcaatatgtatcccaaccatagatagaaaaataaattatgtttccgaaacataacttcaataaaaccacaatttcgcttgctttgtacgtttgatattgtatttgcattttatgaattgtaaaaattgagtcaacaagactaacacagcttcagctcaagacacatgcaatttcattgacattgtttaattgtatatattaaaggaaatcaattaggatataaagagagaaacctttttgccgcttatgcgatgccaactatctggatctggattgtctaacacgaaaccctaactaattggtaaattaaacataaattaatcatatcggtcaacaactacaactaaatattagttattagcggataaagagcgccccataaactatttacactaagctttagtctactagagtcccggattccatctccgctcctcggatcttcggatcttaactcagatgttcggatcttcaagttctaggagagaactggtgcagtgcatccgttattcaggcgatactcggcatagaccagtccggtgttgtgccagtgatagaaggcggccacgatgatcaggtgccaccagttgtgcgaatgcccaacgaagtccaccttgccggtgaaccagcgctccggaatcttggccgcatagaaaacgaaggcgacgaggcagagcaagtacatgagcacgatgcggggcaccatcagctgcaaatggtaatgattgatggattagcaaatgacaagattccataaatttccaactgatgcctaccctgactagctcgttctccagaccgcccatggccaccgcccagtggcccagaggtatgattccataggcagaccagagtagcagcaccgccaccttgccgttcatggacacattcaaacggggtatctgcacggcaatggccagtgcgaacatgcccagtgcaatcgtggagtacagggtgcgcaggaaggtgtggcaccagaaggcatagtacatgccactgatatagatggccaccagcgacagcgaaatgcccaggaagtcaacggacagaaagagctcgtagtgctcctccgatttgcaggagaagatgtggtatatggcggacatcagcatgcacagacagaagcagaccagcaggcagaccaccagcacctggtcgctcagggaggcgtggaggcgcaggaactgcagatcgaagatggtcagtccaatgaacaggatgcaaccggccagatggctccagatgttgatctatgaaaaatatagcaataataatgttataataatagggaatagagtttaaggaaaactattgtagctccaattggaatggagtatcattctagtgtggcaatcttaccgtctcattggtccaccagaaaatgctctgcaggcacatttttgtggaaggtagaaaggtgcggtatccgcgacgaatgtacgggttgaacttcaggtgactgggggcctgtatcgaaagcacaagtgaataaacattccaaataaatacaaaattttccaagccgataagacatgcaaatcgcatgcgtgtagcattgaaaataaaataaaaaccaaatagacaaaatgacaaaataaaatagaaacaaacggaataattcgaggatctggcaccccgccgaatgtaaaaaaaaaaaaccaaaaagctttccatttgcttcaattgaaagaaaataaaactaattaatccaatttgtgttgttagcaatcttgtatgggaattgattaaatgccaaatactgtgtatattatttactttctttgaatttaactagctaagttttatatattataaaaaatccatttaattagttaaacaagtgctaagctagttttgcactgcatttatgtattattaccttaattaatgcctttcaatcggaaacagtaattatttcaagcccgttttaagcccagttcgaagtcgaatatttaacttggtcaaaactaagcatggtccgaaaaacccaagaaattcgattcgggagttaccttgaggattttcacaaacatatatgtatgtaacttgcataccacccaaagaaaacaacagtagcttctttttatttgccaccgctatttaaatatttaatgcccgcgaagcacagagctttttatttgttgctagtcgcgaccttgattcagttggcatttggtgggtttgttcgttgtctaattgtattatttggcaattgctgccaactcgaccgccatggcggatttcacatatttaagcgttttggccattttacaacggtcgcttaataatgcttttctggccatacatacatacgtatgacgataacaattggccaaaatcagtgttaaagccatgtaaaatgcaatgagtgaatattttctgcgatttgtccctgattctgacgtattttttcaattcgccaaacaaaatttgcgatcaattagaattcagtgcgcgacaattggcgacaaattgaccctaccaaagttcgcgcgtggggttaactcacatcatcgaaattgcacagccatttgaatttggacagcttgtcgtcgtagttgggtccatgccccagaatattgggctcctcattggacggaaattgatgcgctgcgtccaccgaatccgcaaccagttggccatcaagctgcgaaaagagatttaagatggaattagttaaaatggaggaaaccctatcgattagcggcaattcgaaacttaatttgaattgaggacaagaacgatgctcaagatctatactcatattcttccgccttagaaaactgacgttggcaactggcgggtttgtttctctgcacatttgtgtatatttttagccaatagagcaactgcagtcgaaaaattgatttgtttgcttttattttattattatcttttctgcggtttctgctattttatacgttgttgttgttgttgttgttttcgtctgggggttttcggtttcgtgtgtaaacaaccaaccaaccaaccaaccgactaaccagcattgcaaaaatgcaatcaaaacatcgctactattagtgcctccagcaaactgcagcaaaaattgagaaagggggcttgactctaatttgtttatacagcttctaaatctaatgcataacaacaaacaacaacaacaacaacaagtgtgggagggcaagtgcaagtgcctaagcaaaagtatcttatccaacgtgatgacgttttgtttacaatttgcattgttttttttgcattccgctttaaaggaaaatcatgtgcagtaagcgtcgtgcccataaatgcagcagtaagtataaaaatatatgcatttttcaatacaaattaaatataaccgctcattaaaacgaaatacaggaacaattgaattcccaatcctaattcttttgtacaagcaacaatttcgtagttacttaaatgctaattaaaaatccatgatgtcaaaacttagctacatttatcaatttttaaaatttactcatgatctaatagtcactaaaaggctaaatagctttcgctacctatttgtaaacaatgttactagtaagtgctttgtggtttactctgtcgtcattattaaatatttatttgacactcaggaacgtgtggatttatagtaaatttaggcaaaaaatatatagaaatttttcaataatttagaaacataaaaatatgtttatgaaatgaaaatgaaccgctatttaacttaaagacattcgttaagacaagaaatgtactattataatattgattgttttaattttaataattaaggaactaaaagttatttgtgtaaaatgattttgaacaaaactaaaataaaatatagaacaaataattttacataaaaattattatacacgagcacgtcaacttgacattgcggcttgttaaatattttccagcaaatgcacttcacgaaaatgttgtagattccaaaagataaacacggtaattgttggcaaatagaaaataaaatggaatgccatcgataaacaggatgtgaaattcattaattggccattgacgtagtttagccaattgtttgttctactgaattgaaaacgtcagatttttagagtttggaacgcagcttacatctttctttttactgccgcgcatagtgcatttaaactcagtagtagttgttgtagtaacaattgtagtttccattttacacaggcacttttaactagttgttgaaacgttttgaaagtatttagtttttaatattttattcgcagataactattattttatttcaacacacaaaagccagccaagtggacattccaaaacaatgttttcaaagttttttttttcgcaactccttggagagattttcaactgagcgcggaaattttagggtgaaccgttgcgatcgccaacttgctggcaactaaaaaaccccccgatatccaatgtggccaatggtgtgaatcgaaaaagctcgccgaaaagctttctataatttcgcagcagccgagagacgacgaatgcactatcagttttgttttatcaagtcgcaaatgctgagcaatcattttgccagagggacggttttcagatttttcaacggacagttatgctgaaattatgcgaaatttcgtggccaatgagctttcgcttcttgtgcaagcagcctgttttggtcaagtcggtttgattatcgaatacactgaaaaacatcggcctgcattttcatccaagtaagcttatagcttcgatctaacataagaaaaatgaataaataattttaaaataaataaaaaataaaatgcatctacacatattttactttttttagaagctagtaaaatacattattatacattcgacatttttttatatgaattatttgttaagtgtatattttccaaaaaaaaagttgtttgtgcctttctcaacacttttttttgtcgcagtcaagcccccgtattatataaccaatcgagctgattatcgatccagcattgagaacccttttgtaaacaccagttgcacaacatgaaaagctgatgccaattcgcaataattgtttacacgatcccaatacacacggatgggtttttatcgctggacgggagacgtaaataaaagacgaaaaacaaatctgaaaatcgagcccaaaaaccagtttcaattttcgacgaagttcaggaattccgcgtgcggactttcgcaattcccatgtttatacccttacatacctacgcacatacatatgtacatatgtgtaaacataatgcataacaagatatcggtgtggcaagctctaatcggttacaaataacgccgactcgtcatgaccttggctccattcgtggcgatctgctgggctttttgaccttgtgctgtggggaaaatcgcgcactctgacactttgtgtaaggttatctccaaactgctggctcgtcttttcggatgacaaatcattttttttttgaactgattgcatgtgctgcgatgcacgtgccgttttcaagtcgccgagaacaggaccggatctggtatgatcagtttccgggtccattcgatgcatcataacattgataaaattttcgaaatatttaaaatagctcataatttccacattttaaagcttatggtggaaaaaaagtatacaaataagtacttatatattatacttttgctacattatattacatatatatttgctattatatattacacttttgatcaaatgaaatatttatatagtatgtatgtaaacccccgataagattgaactgcccccgtctgagcttaatccattcaaaaaaatctttgttgaggaatgcattgtaaacaggaatattccactcaccaggcagctgtcgtcacaatcctgtccagattttcgcaagtagcaggaggacgagtccagcgacagttctggttcctcgaggatctcacggggacggggactcatggccactcggtagcctgatgggggtattcacagaaatacagctcgtttagagatcgagtgtccgggtaaaaatgtaaacatatacataagctgcgatcgccagttggtgaccggctgttatcaacaaccccccccccccccaccgtcaccgctaccatttcgcagaagagtgcgaaaatcgagtcgagctgcctaacaaaagacaacttgagtggtgccaagtggggagcgcagccatgttgccatgttggagccaacaaagacagcgagcttcgctctctgcgtagcctctcttttctcacttggactttcttcggagcttaatcgattagaggccgaagaagcctgctctacaagggtcttgaaaatagtatatttttgtgattgagttctttttaattaacactatataagatatattgaccttatcgatagtattcttaagaaaaagaaaatcaaaagttttatttttcagataaaaatagttttcaaataagattgctctgcaatgaaggtggtgcgttgagcacatgaaatacatatatgcatataatgaatacaaaatatatagtttgctttgtttccacgactgcagtttcgagtttatttcttttacagcacagcacagccacacgaatttctctcacaaaaccgtttgcataaccaaaatttctaaaagttttccaggtcacttgtttcgcaggcagctttcgcagcacgtgtctcgacgaatgcagttgtattgacattcccaagggtccagataaccttcaattgattttgatgtacttgctctaactaggccacacacggaacagggattggaaatttcactttgagctgcaaagttctggcgatcacctccacctctcgcaacgcggcaaaatatcaactgaatattttcagacctcgagtgtgttatttgcgttaaaagaaagagtcgcgaatcgctgcgaagagaagaaagagaaaagaaatactaaaagctcgctccgaagctttggcgacgcgagcatgattcttctcatatacagtatatagcatttgaattgattaaatgctaatttagcatgctgtggtcgttgccgccatcggagatcttacactgaaacttgaaaagcggattctgaatatcaattcttcttgaaaaaaggcttttatatgtatacatagatctatagcttcctaaaaatcattgcagctcattatcaaacatgctttaatgctgattcgtctgtataaatatttaattattgtctaccaagtcattggaaaattttcaccactatgcttattcgccaacactctcggaatattttattttttccatggtctatttgtataatttcttaccttaatgccaagaccatttgaatatttataccctgtcctttgctgttttgttctcttatcaatgcccttcgcattgaccgagttttcagatttccttgcctttggcatcattaatccctttcaacatggccaaaagccattcaaaactgaattgttgagagctgtcacttggcattttattgccatcagatagctgtactcacaacaaaattctacgacaacccaaccgacaaagcccacacgatgatagttaattaaaaagttgttggcacactcagaatatcatgcaaaattagcctggctaactggccttatcataattatcagcaatccccaaacaaaactttacaacatgataattattaaataaaaagcaaataaccactaacagtagaaccgaattaacatttgtgagctcagaaaacaaaagcaaaatacaggtgaaacaaaatgcagcagcatccgtttactaatttatacgcaatctcaaataatttacaaaacaaatggttaaccgaaagaaat

SEQ ID NO: 16634 - DNA, 1560 bp, DROSOPHILA
cgttgcgagaggtggaggtgatcgccagaactttgcagctcaaagtgaaatttccaatccctgttccgtgtgtggcctagttagagcaagctaccgagtggccatgagtccccgtccccgtgagatcctcgaggaaccagaactgtcgctggactcgtcctcctgctacttgcgaaaatctggacaggattgtgacgacagctgcctgcttgatggccaactggttgcggattcggtggacgcagcgcatcaatttccgtccaatgaggagcccaatattctggggcatggacccaactacgacgacaagctgtccaaattcaaatggctgtgcaatttcgatgatgcccccagtcacctgaagttcaacccgtacattcgtcgcggataccgcacctttctaccttccacaaaaatgtgcctgcagagcattttctggtggaccaatgagacgatcaacatctggagccatctggccggttgcatcctgttcattggactgaccatcttcgatctgcagttcctgcgcctccacgcctccctgagcgaccaggtgctggtggtctgcctgctggtctgcttctgtctgtgcatgctgatgtccgccatataccacatcttctcctgcaaatcggaggagcactacgagctctttctgtccgttgacttcctgggcatttcgctgtcgctggtggccatctatatcagtggcatgtactatgccttctggtgccacaccttcctgcgcaccctgtactccacgattgcactgggcatgttcgcactggccattgccgtgcagataccccgtttgaatgtgtccatgaacggcaaggtggcggtgctgctactctggtctgcctatggaatcatacctctgggccactgggcggtggccatgggcggtctggagaacgagctagtcaggctgatggtgccccgcatcgtgctcatgtacttgctctgcctcgtcgccttcgttttctatgcggccaagattccggagcgctggttcaccggcaaggtggacttcgttgggcattcgcacaactggtggcacctgatcatcgtggccgccttctatcactggcacaacaccggactggtctatgccgagtatcgcctgaataacggatgcactgcaccagttctctcctagaacttgaagatccgaacatctgagttaagatccgaagatccgaggagcggagatggaatccgggactctagtagactaaagcttagtgtaaatagtttatggggcgctctttatccgctaataactaatatttagttgtagttgttgaccgatatgattaatttatgtttaatttaccaattagttagggtttcgtgttagacaatccagatccagatagttggcatcgcataagcggcaaaaaggtttctctctttatatcctaattgatttcctttaatatatacaattaaacaatgtcaatgaaattgcatgtgtcttgagctgaagctgtgttagtcttgttgactcaatttttacaattcataaaatgcaaatacaatatcaaacgtacaaagcaa

SEQ ID NO: 16635 - protein, 351 aa, DROSOPHILA
MSPRPREILEEPELSLDSSSCYLRKSGQDCDDSCLLDGQLVADSVDAAHQFPSNEEPNILGHGPNYDDKLSKFKWLCNFDDAPSHLKFNPYIRRGYRTFLPSTKMCLQSIFWWTNETINIWSHLAGCILFIGLTIFDLQFLRLHASLSDQVLVVCLLVCFCLCMLMSAIYHIFSCKSEEHYELFLSVDFLGISLSLVAIYISGMYYAFWCHTFLRTLYSTIALGMFALAIAVQIPRLNVSMNGKVAVLLLWSAYGIIPLGHWAVAMGGLENELVRLMVPRIVLMYLLCLVAFVFYAAKIPERWFTGKVDFVGHSHNWWHLIIVAAFYHWHNTGLVYAEYRLNNGCTAPVLS

SEQ ID NO: 16636 - DNA, 20389 bp, DROSOPHILA
aagggctggaaacgagttcttcttcgctctgggactcggattctcgatgtgaaagatcagcgagccgtggcctaaactggctgcccggcagcggtgggtaaatatttaacttaacaacttgccaccgaccgaagaagatgcaacaaaagcagccgtggccgcaagaacaacaacggcggaccataaaaagcacaaaccgcaacttccaaatagtttgaactgtgcagagagtgcagagatgatcctcctataaacaaaacagctgtaacgcactcaaaaaccagccaacgaccagccgagggcatacctgcccactgcgccgcccaccacccaccactgcgcccctcagccccaccacaaagagttcttccgcctggcgaattcatccgctccacagttgcatcgaacaaaggaagccaacttgtgcccccatcggtccaatttcgtttgagcgaaccagccaatgtgcaccgaacatgggcttcgactggtctgacagtgcagaccagctggctatttctagctgtaaaaaaatatatacagattatatacagactaataagaatacacctgagaaacatattaaaattccactgatatttagcaagataaattgagtagtaaaatcttacatatttgtagaagtttgtgtggcttcttattttagagaaatttacccttttcaaaattttgctaaaatatcaggtaaagatatttttaaaaacaaatatatatgtagatttcagaaaactcgacgtattttctacggcatctacagttatcccgattccaaagaagtaaacaaaaagtaaagtgtgctactgatatatgaatgaatcaatgtttaagaaaataactaaatatttaccgatgttcggagtgttcagagtatacaatctatatacttttggctccactttccgactgcactggcagcgccgtcgatcgccgatcgttaactggactttcggtttcggctgtgcattttcagttcgtctcgggacttctaagcgatcggtttggatttcgttagctccgccgcgccagctggaaatttgtatctcaaagatcgcagccagttcgctcggtttttgtgcctggcatacggaagcggctaacgcagaatccggaaaatcacaagagccgtatatatttcacaaatatatatatatagtatgtttcgaaaaggcccattcacggccattaaaatattttattgtacaaaaaaggcacagtgccgcgtatctgcttaatgtcagcgcgaaaactcaattcaatttattgtttgtgattgcaaatttggcataattgtgctttgatttattcgcgcgtgtttcgggtcatctctataaagaggaattttaaatctgggcaagattatctctgtttttctctgaacactggctgggtcagttggaatttgttcgccgtgtgtaagtcacatgcaaatagctttaattaattgcaattacttatgatttgaatgtgtgtcaaagcgcggtgcgacatttcctagtgcattaatcttgctcaaaatcgcattgcctatcctgtctaggagttacatgtcacttatggacgtaatttgcatttttgtggagcggctaactaagttggcttaccatttacatatgcgctttggctgccaaacaatgccataaatggtctaagaattaattatcgtgagaacttcaagacaatgtctttattaaataattgtcaataattctgagtagttttcaatgtacaatttgtgataattttcttggtaattttctacggtaatttgcaccttgataaaaagtgtttaagacagtgtaatttgtttccgtgttttcttcaatgcaaattatttatttcgaaatggcaataaattgctcaataaattttatttctttcaacaatgatctgataaaggattaattcattgcttcgtttttgcgtaaacaaagattgttctgcggaaatcttgtaatttatttttactcttttagataagtttaaaatatatatattttatataaccatttttcttcactatcgaaatgaacattttatagcccaacattattgctgacatgaatgcaaccaaaataaatatgtaaatcttgtgacgttatcgccatcaaaaattagtgtaaataatgtgacaaagcggaaaacgacacaaatcaaaaatagatgtatcaatactttccattgtttagactagtttggctaacaattatgcatacatatggctaaatgagtttcgttttttttttgtttgccccaacgtgcattctgcattctcacacatatcgtttggcaggtgagcaatcagaaatcgaagtttggggcacgatccgtggaaagcgatcgtgcctttctgcgtatcatagtgtctatacaaatgttattatggttaacgccactggaaagtggggtggagtttgttgttggttttcttgtttttcctcgactttgctaattagacaaagtcatttccataaattacgcagctaacggtaactgggtttatgacttttgtccggcttggtcgcgggtcaacatgaaccatagctatatgcatacatatatatggatatatactatttgttcatatgggcaatgggtctgcggggcacgtgtgggcgtggcctccgcccccttgcagctgcaaagcaattagcaaaagactggacatgccagcaaattgagctctgctgttgcagtttttcctttggccttttttgggtcgctgcaattgttattgaaatgagttttcgcgttaaaaacagttgaacttgctggaaaaaggtacatgtatctcacagttatcgatcacaaatgagtaattggccattagaaacggaatatggtcacaggatatcaaataaaatgaaattattattgaaggctatactcagcagtatctgtaattataaatccattaaatctaaaattgtgcaatatttttctcagtgtgctaaagggggttggtgaggcatgcgacttttgagatgtcaaactgtcgatgttgaacacgttgcatagttttcgcttttcatctccgactttgttagggaagaaacgcagccacaaaggccaacaacattccttaaattggattgaaagtaacaaagtgaagtgtaaacaaaaattgcgatcgataccccccccccccccccgccgttttgttgatcttgttaaaaaataaaaacattcgcaatgaaatagtggggaggcaacgtcgaaagtaaacgagatacaaactccgcggaaatgtgtcatgatcttgcaatattaaagacagcgacacaatatcaacaaatgaaacacaaaacagcacacactattaaaccacatgcgagtattttgttggccgtgatttttctacccatcacggctgtcatggctgtcttggttgtctcgtgggaaaaatcaagatgagcccggcagccagaacaataaacaaagccaaggaatgaatgaaatgtgtaaccccgacgcaaatatttggcaatatgtcagataagatatattcgataatttcccatcgcactgggttattgaactcagagagcagcgtgaaaattatatcgacagtgggtggcttttctttcgccttttcccaccccattttctcacacaattctccgggtgcgatcgatcgtacggtgcagtgcagttttcccgagatctaaggcattttgcggcccatctcggctgtctagataatgttaataaaagcagcgttgaaaagcgtttgcaacagcaacaaattggaaaatttgaattttcctcgagcggccattaaagaaaagctgcagagttaccaaacaattgctgggctgtttggggattctcctcggcaggcggcgttaagcttttagtttatctctttataagaacttgaggagcggccccgattacacaaaacataaataaaaacgcaagctaaactggcagctgtttggaattgcacaaaaaaaaagaaaatgttaaaaaaaaaaatcgaagaaagagccggactgaggcatttaattaacatttaaatggctggccgtcggaagagttgttaatttgaattacattccgaaaagcgaaagatgatcaatttacacgccattgagcacgggtaaacagacttcaacatcgaaaaacatccaaaaataacgtaaaaatttccataatgatctccttaattaagtaattggtgcagttttagtcatgcccccggggacatgattaattttgaaatgcaaaaacttttatttataattcagacagacttttcgacagcttcctccccaactatttgccatcacaaccaaaacatgtcaaatggatgagacataggcaatgtttctggggagctcgtgaagtcagaaagtcagatattctcgataagatggatttttaaataagactttaatatgaatcggatatattgtaatttatatatatatggtttgtaataaatatcagagcaatactttaagtataaatacacacagtaggatatagattcatatatgtgagctacgctatttttaatggctttaattagaattcttttttattttacatatgagtacacatttatttatttgtttgtttaagcttttggatgagccacattttacgtagctctagattagattacctcatatctagagctcaccgtatctcacatcttttcaagttgcctgatacattttatgtatgtttggcagtacgcatctctggtgattcattggccatagctcatgtgtgggtcagctcccagttgcagatacagattcagatgtagatatatatatagtttcggctacagatactcccactgaatccgtgtcttgtcagggtgacaaaaataaagttgacacttttcgttgggaaaaagtccacgcctctagaaacatttagccggtgatttatgtgctgggaaaacaaatcaataacatttaacacacactaatttcgatacctacagcgcacagaaatgagaaaaatgtgtggcagtctttgcataaattccagctaaactgcaaccgcgatccgaaagttgatttataaacgattcctaaggcaatgccagctattaattagaaatatatcaaaatatagccgccaatcgtctgtgggctggcacattgaatatctatatactcgggtgtatctgtggatccatctcgatctccaccttttcgggttcagacaaatgccgctggatttgatttatctgcggactgaccgtttttggcaatccagcaaggtcaaggcgagttgtcaacgcggcttagatttcaacggaatcaagttgtttttcactccactttttgtacatttttttttttttttttttttatactttttaccctttgtctgcagactcgattagttttgtggcggcgcccgaaaaaacctttttaccatttttatttggcgtttttgcatttctgggaactcttgcagagttatgacaactggtttttggtgggctgggtatgacatttggcagtcatttgagtggcagtcgagcccaaggggttccaggtttcacttactaagcagcttaaaaccacacctgattggcactgcccctgcttcttttcctttttccccaaaatgcagttgagtgaagggtcgaacttgccacatttcccttgccatttctcaattttcaaactttggctggtggcttttaattagcgcagcaaatgttaatgacgactgtcattcgaagccatcaaaagttctgcggagttcaattgttcaatgcatgcactgcaagaaaatgagtactaagcttagataggaatattaaatatgtgtcattataatggtagaaaaaaccattctattgtatttatttcaaatttgttctcgttccgaatgcaaaacagactttcagaaaagaaacgtaattaattttttaatgtgtacagttttttgaaattaaaaacaagaacggacatatgttagatccactttaatgagcagggcgttgggaatcataaattcaagtggaagcaatgaatattaataagctcactgagcaattgcagcaatcggttttttatggttttgggtggtgggtgcgggcactgtgtgtattgtgggtgggtgctgtggggcattgtgctgcactccactgacaaatgtgatgccattgctccacaatcgcacagtgcgtgaaattttgaaaaatgccccaccgaacaaagccaaaattgatgcactttttcgcttccggcttcggttcactccactttgcttcacgttttggcatctcctgccggttaactgttaacgcgtttacttttctttttgtttaacgtgtgatttatcaaccaaaaaatgaaaaaaataaaaataaaagcgtggagaaataatcacagtcaccgtctcatcatcgtcggctctgttgaacaaattgcctttgtctctgggctaaaaaatcgaaccgtacttggaagtgttggccactcgaccatgaaaaccgttggcctcatcaagaactgggttcagaaaagtatattacttccttaaaaccataatgaaggctacttgaagatttagaaaccagaactcattgttgaaaatattttcaattttttcgaatataagagttatatatttatgaattaatgagtggaataaacggtctcctaaatgcaagtaaagtgtacgtgtctgtcggtttaatcctttggcttcgtccagtacctagttaatacatttatgctacctttcaattaccaatgatggacagactgacggacaggtcggcgctccgttggacaaaggaatcggtaatgaggagcagtggatccgtcttgttgcttacattaagcaaggcaggcgtgcaaaatgcctaggaatttgaatgagaacgaaagtgaatgtaattgaacgaaggatgaggttttgatttaagcaacgtagaaacaagttcagcacttaataaagtcacgcttatattacatatatatttatttcacttgcagtgccatcgagtgaattaaggtagcgggacgccagcatcaaaatgccagaaatgatttactcgagctctttcctgctgctctgttgcacaatcctgctgctgggaacagtacagaatgccggttccaatagcaccagccctcatcctcaccagaatcaaactcatcgcggacatggtcacagtcatcgaacgcgtcatcagggcaactatttggccacccatcaaaggcagcagcgcagactgcagtcgctgaatcaagccaaatcggatgtggagctgctgcccggggtcaccatgcacgaggtcaccagattacgacgggttcagccacataatccctacaataaagtgcagacacgacgcctacaccaatcgcgaaaccccaccgaatgggattacaatacttacaacatcatgaccaacacgttcggtccaccgccaccgccgatgccgttgtcaccgcgatatggaaagggcgaggataatacccaggatgttgagtttatcggggtgcgagaacgtggaaggggttactcattcgtgccatcggtaacggtcaccactgctccgccaccgaatctgaatcgaagatccgcgagtcctggttctcgcagtagcatcggcactattccaccactggttccggccagaaggggctatagctacaccaccaccacaagttctcctccagtgaacaccatcaccactgacaatcccttcgagacgaacaccattggtcgaggctatcccacagatcccaaggaaatggaaaggtaagattattatactattagcagaatgctgacctgtgagctcaaatgataaataactaaacttgctgaattgcatacatcctcctaagagatacaatatcttatctaaattaaccaattaaacggcaccaatccccaggccttagtccaatcgataaccttgccatcttcggttcattgagccacggaaaagagtaatgattttgggtcccacctctgggatagatgaagatgactacaaaggtggatgcggatcttttgggcggggcgtgtccgattgcatttatcagaaagtctcagttcggcggttcaaggctgttgcagccataaatatgaccgaaaagccgggctggtcatatgtcttacctttggcccaagatctgcggcttatcgcggcgtacataaattatttaaatattatgacatgccgcgttttcaatgtcagcagctgcgcttcgtggctaattcgagccgcaagacgaggcaagaccagtccggaccaaatgccagccaactgctggctggaagttagccccaaggccaagtggccgtgatattttcagatttttctcaacaagcacttcaattgtcgtgtgtcaattgcagcgaatcaatgagcgtgcacttcggaaactattgcaattgcagctccctaagtgtaacaaacagatcttcggttagatatggcttgtcttcgcccttgttaagtttccccctcttttttgtgcaccacccatttggccaagatcgtggtggcattgactcgaaaaagccagtctgtcgttgtctttaaggtaatgaactttaacgagttttcaattgccagtcgccgatgttttctaattggaattaatgcgactctacttaagggcactggcattccagctgcaatccgacgcccttgcatctgcgacgcggggacaacaccgcgtatgcgcaatctgagcgcttatggctcgtttttacacatgcaacgcggtgctggagttgcaaattatgacactttttgatttatgcggcaactgccaaaatcatgccacaaggcaaacacacagccagcatcatcagtcacagcacagtggcaaaaaaaaaaaaaagctggtgcaaatacttcgcggcatactatataaattaaaatgtcaaactagatggttatcagcaaattataaatctgactgcaggcaattataaatgtaattcgacacttatcagctggttttggtttcttaatagataaaatgaatgggggttgctatttttcaaaaactattgcatatgcactttatattatttcataaatctactgcaactgcccttttcctattttaaatcgtttttttgcgcagtgcagcgattgtgcaaatcttctattttctggcatcatttccactgtgattgcctcaatacgtaggcgctgctgttgccttgcccatttatttctctatttatttaagcactgcacgtgcaacgccaagatactttaactgcaactgcgactgcaagtggcaagttgcaacagagcatatggaaatgacttttcgtacggattggcttcgcctgcagatattcacacgccgccatcagcacataaatccccaccatgggccgatcgaacctggttaatgggtaatggccagtgcaacgattcaattgcggctatggactccgtgttaatcagcgtcatacgcggtgatttgcggataaaagtgaactaaagtcgttttccgctcctttggctatgagaggcactggaaaaaaaaatgtttaattgccacttcaaatgtacaatcatcataactgaaatatctgttgaaaagtatattttgagatgacaacttctcaattattaaaacactaaacgtacagcttttttctttctgtgcacagtgccacctcgaggcgcaggaaattaagtttttaattatccacatcgtgttgtaactgcatatgcaaaagccaaaacatttgaaccattcgatatttgttgtgtgtttgttggtccagtgttttggcttctgtgtgataaattcaattgatgtctgcagtgtgcatgttttggccaatttgttgttgctgccgtggcagttgcagttgcatgtgtctgacacttgattgatgtctgttttttgacggcgcggtagctgatcgtattgattgacttttgatttgccttcgcagttgcgccatcgatggggaatgatctgaactgcgagccaataaattaattatagatcttgtactcgccatgtaagaaggtgttgattcagggagggcactcatacaccagtgggcgtgtcacgccataaatgccacttgcagctcgagtacgagtgctgcaagtacatgcatccatatcttacagatatctccaatggcctagcataaaaatcgaaaacaaagcagggccttgacttcaatcaggcgcagcaataaaagccaaatgcaacaattggcaaaggcacaatcaaatgagacaagagccagcgccgagctatgtgcactccaagcagcgctgtgaccccagacagagccgcagactgcactgaaaacaattggaatgaagttagattaggtatcttgggtaattattcaattggtttttacagttttctctaagtgcacggttcagactgcggcccattcgcagctggatgcgaagtcagggctcaagtccgccgcctgcaaattgcttgtcaacaatcgactttggcttggaaacccaaactccgagctgcaaactccaggtctgcgataattatggacacaaaagggggaaactggggggcgagtgacgaatgatttgatatgctgcgcttggaaaagctgcacttagaacgcggctgggcctgtgaaaattcgttaacattttgcaccgtgaagcattgtgctcaatggctacgcctacgcgtgcccggctaaaaaggcagaaaaaaagtgcgctcttaaagactgtatatggctcaaagactctggagctggagtggcataaacctagacgggcttatctgaagtccaagtcatgccatcgggccaggaaaccttggcccaggcagaagctcgcttaatgagtttttcttgggattcgtgttggggaaacttgggcttacacccactcggtgcagcttgaaacttgcaactcgcaacacgtgctcatcaaaaatcagcggagaacacgacttgatacgacatcaattgaacaaattgcttgacaaatgcaaatcgctgatttgccatctcaatattcgctttaatgaagatggatttctcattcaatctttacgagcccctatggaaaccttgttattgggaagtttatgactgctcgcacgaattggtgaccccgattgtgccattagtcatggtcagtgtcactttaaatggatcaggctgggcaccttcgagggttttgtctcttttttggtattttcaaaatatatttgggtcaaaggtctgacaaaaatatttgttacactttccctcaagtgtgacatgttggttgtttgttggaatatcactttacctttaccagttgagttatttacccctcgttatggaaacctattcaaatgaaccacaaaataatttaatgaatcagactgtgttgaacagaaaagaataatattgtttttattgaaaattggggaacgtgtagtcttaaaacaattctaaagtgatttgaaatatgtaatgatacattcaagaaacaatagtgcaataataatagaatttacaatgcaaagttttccagttacatgcaggttatataagtatctatcatacacctcgggccttaccataaagtagaaatgaaatttattaaatgaatatgcaaatcacttttcatggtctgaatttacgcctattgtctgcagcgctgtccacgccatgcaattagtgagtttttcatataaacatgagtaagtcgctcgaaactcgaatggaacagtggacactctggacagatggacagttggacagcccagcttggccacaatggaaatgcatcggctcagcggtaatttgcaaatcacgcagcttcgcatctcaagttgaaaattgggttaatgcaatgctgggggggattggactgagaccgagttggagaccgaaaagcagttccccaaaccccagacagattacatggaaacccgttcgaggagtggtccgggatgggttgcggggtgtcatggcgattcggatggcgatgtctttgcaatgggcttttgtcttgcagccagtacaaaatacgaaatacaaaagacaacaaaactccaagcgccacacacgagctcagatccaaaagtctggccaaacatgacgcacaaaattccagccatacatgctctacactctaagaaaaatcccattacttgattgtgatgctcactgactcacagtagctacatttattttatacgctcatttctgcggaataatttattttttatcagcttaattcaaatccaacagagatctacgaatatttatattgctgaatgaagtcatctccttgacttgaatcatcaatcatcgtcatttagttctttaattgaaatcacaatgcacagttgaacagttttgcattggttcttaaaataaattattaaaaattataaagtcactttccattttagatgctaagctcatatgcatatccactttcacctttctttttcgctgagtgtagcagataagcatgctaacctggccaggagagcgaacgaggcacgccatttggcttacttaattatgttgcaattggataacaagccgtgcaacatacaaccagggattgggactggcactgggattgggttcggaactggagtgggataggatcgcttgctggcgctgcacttgctcgacttttgggcgtgggacgagatgtggattcgctggaaaatatcttcatctgggccatttcggcagcagcttctcttttctggttacccaaacgcggctatttccaaatgtgttacggccttttcactcgtcgttgcgcgattcggatctcaatttcagcattagcattaggagtaacaatataacaaaggtagccgagaatgggccatgttaatttgatgaaaatttgtgtgcgtttgccgttcggttgcgcttttgttagcagttcatcggaaagaccaaaagccggtgaagagctgggaatacgtacagccgccaaacgacgtaaggaaaaataaaatggaaatcgtgcacgcctcttgcatttctctggcgttttcttcggatcttcttgggctttttttctttctttctcgttcggagtttgtgagttttggagaagggcagaggctgcagctcacgttgccactaatcggattttcggccacggctcgacacggctgttgtttaaacaagtttggggcattaatcatgatttacaacacaccgacacacactctcaatcacattcacacttggccagcggaggctgcacacagggcagccgaacgaagaaaagggcccgaattagtggagggatttcagatacataagacacaacaaaaaaatggtaagaaaatggggaggaacccattgacaggcctccagatcgcttatcgcgcgattatgttgtacggaaaatttgaggggacgggcggccactgaaccccccagttcctgggttctctcctgcagcaatccctatgtatataatcagcttagattaccacaaaatagtgctccatcttcgtggccgaggaatttccaattgccattttcatctgcagtgcaactgcaacacttgcggcaattttcttttcacttttcgcaacaaattcttgttgcgtcttttattgcataatctggccaagagagcaagacaaatttacagccaaattagaactggctggctgcggttagccgtgactggcgatttcagccacgaatttgtgtagagtagcagcgtgatgcatattcactttgacttgaagtttgcttggggatactattaaaaagaataaataatacattttattcgatctaaccaattatttgaaatggtgttttagtttcagatttttaaattgcagcaactgaagctgcagcaactggaaagaaaggcatttgtttcttggccaacacatggtgtctaaatccaaatgatggccatatattatcccgatctggaaaagtccaatctgatttgttgctgacaagtacttcaaagcagtgaagaaattccagcagtgtttgcctttttcgacgaggaagtagcatcttcccaagggaatcgtcttgtctggatggtttttttctggccgggaatctccacccatttggcctgagtatttgtccagtcgcatattggatttccacttgagtcgtcgctgagtgctgtaataattttctccgctaaaagagaaggaacaaaaccgaaagcggtggagctgcctccgattttagttgcacttgccagacgcggcgcggacatgactgaaatattattagaaacgacgaggcagtgcgtcgttgtcgactttgtggcatcttccttggatcgggagccgtggtcacatgggcgttgcattttacgctaagtaagaatccaaataaagctgcggcagctggaccaggaagcacgtctaaaaatgttactacaccccctggttgctgttcctggtcgccacctccagaggcttccttctccacggctgtcgttgtcgtggttgttcctcctgttttcagctcttctgttctgttctgttggattctgttcctcttgtcgctgttgtcgtcttggtcgtgttgcacggtacactgaagaaaactcaccagaaatataccctcttagatcacagctgcaaatgttacattgtgaaatcatgtcataaattgctactcaatctccttatttcttagcatttcaagtggttctctttgttagcatgaataaattgcacaagattttttccagtttaaccaaatgcagaacgtcgtagtgggtgagtgcatccaacttgcctaatgatgcagtgcaattccgatcgctctgttctggaattgtgcatttgctggccgggccaatttaaattctaatttcatgtagcaaatcagattagctgcccagtttgccggaccacaaatggcccaaacagttagccaaagttacctgcacttgagctgggcattttagccaagtttggggccacagcctagtaggtagcatttggccgcggtcttggcctggcccaaaagcaaatttcactcctccaacgcgaatgtggccataaaaattcattttacgaccctgacaacaatatttttatgtttttataaatttatttcacattttcatctggaaaccagatacgcgaagctagacttgcacttttctccggtatatcttgaatgtttacagccgttaagtgtcgccaagtttttgtggcttaggtttttactattcgccttaactgttttttaaatgcattcacattgcaaagacgttgtaaagattgacaaaatgcaaacgggtttccgaaatgacccaatctctaaagagctcaataaaaatgatttaaatcggaattaactccattgaaaggccctttacagtttataatggtcatctaactggggtttcattttggctaaaacccattttatctgcctaatttgttcagccataaacaaatttccagtggtgcacaaagcgagttttacactgcacacttttaataaattacaattctcatcaaaaaggtttaaaaagattcccaaggtctggcttatttcgaacacaatgcgaagttgtcaacgtatatgcatattaagtgttgaaacttaattaaaaagcaaaactttagtgaagggaataatattttgatgccttgttaatatttacaaatttacaggggctatagacagggataaaagttcataaagagcagcagatgatctcaagttaagtactaataatattgatgcttatttatctttcacttctggtttcttaataaaattcttatggtagtgcgtttatataatcgatacaatccttttccgtataattttattgaagcatgggaaatgactcatcgtcttgagggcagggatccgagagtttttcatgaattccgagctctatccatttattagccctggacccatctacacacactccattaagcccacacacccgctcggggtcacctttttggcctgcagccatcgatggctcattaatttctgcgtggcggccaatgaaaataaatcgtaaatcaataaaccgcattcgacggtttcgaatctcagctccccactccaactcttttcacatttttaactgcctttctttaagtgcatcttttgggtctccgtttttggccctggagtggccaatatatttgtctcgttgcgtttcttgtaaaatataacagttttcatttttttgattaattggcccgcttgcattttatttctggcggctgctgctctgcgtttgtctccgaataaaaacgaggcaattttgattgatgcttttataattttatgggtccgttggcagtgaagcccttggacttaactgagctctgacttcttctgaagccaaaggagaacttaaaggtgtagccacaggtgttcgggctttcggcaattaaaaattcaaatttaattttagcctaaacgtttctaaacaaagcaatgaagccatccattcaccagcacacatgcattcgattacacttttgtctggcgctgtctggcgcagcgggatatatacaaggcgccgatgggcggagggggcggggcaggtcggcctggggtcggggtgcatcgtctgcaattgcacggaaagaaaattggtagttcatacttaaatatgattaaggataattgaataagtcgatttaaacagaggtagaagcacatttctatggattgtattattttaataagaaccattcatattttatcagttagttgaaactattaaaacaaaacatattaattgatttttttttggtgcactgaatccgattggagatttatgcagccagtggattggagatggaaatgggaatgagcattccatgttgcactttgctgctggcacagtttctgcttttcgggagaagacttccgcattttatttagccgttcttgttattgttttcgctggaaatggaggccagtatctttggttttggctttgtttggcgcccttaacgctcagaatgctggcgcataaataacgtgagaattatggtacaagagaagccagttacagcaagcaacatacagggaaaaaacccaagaaagaacagggcataaatatgcatgcgcggcaataaagaaattggtaaatgtcccggtcgcaggaccattgtggccaactgtgtgccactttccgcttttaaatcgcgaaattttggccagccaaatggccagcaaaaagaccaaccaacgatcgcagcagtcagtcgtcactcagtggccacgtcacgcgttcgcaattgtttttggcccgcattgccaattacgacaccatcagccaccaccagcatcagttgctgcagcagcaacatcagcagcagcaactgcagcagcagtaactgcagcagcagtaagtgctgcatcaaacagcagcgtttattcgcagccccacagcctgccaatttatgggatgcacctcgcttttgggccagtttgcctcgttttttggcaaccaaaatcaaaaaccgcttattatcagcgctttttatgtttgactgcttgggggccaaaggtcttaggagcattggcacttcggttattggattttggctgggtttgagaggcacagggtcatatataaagatttattataaagtgtgaagttgggattgtacttgagtagtaaaaacttcaaatgctcttatgggcttaaatttgtaataaaacaacggctacagcgttagttccgaaaaattcctggtaaggatctaaatgctgaaaatattatgttcaatagaaatattggctaatatataaacattttaaaaaaattacttttagtctgatttttatcctttaaaacattaaattggttacctttttttgagttagaagtacatacatttttcgctggaaaaaattgctaaatttgaatttgttgcacaaggcaaccgaattggataacaactaatatggaatatccttgtgatatttctgtcaacagtttgacaagccttcaaatttggtttgacagccactgaactgtcggttgcgtgaactggagcacttggttgccaggctgataggctgccaggctgccaaactgccatctggctgctcctccatatccgagtccgagtggcgggcaaacaaatgacatggctgacatggctgcaagtcatcggctgggagcgtgtcgtgtttgtcatcgcagatacgcgaacacgctaatatcgtagtccagtccaatcgaatccaatccaatccaatccgctggcacttccagacacatgtgacaattgcccagatcccactcctaaaaacaacctgttggccgctctgtgtcgttatgactgtaattgggcgaagtcgtctggaaaagtcagtttcacttttgcagatgatgagccgctgatttgggtcagccacaccgctcgaatccattccaatcctattcgattcacacctcgctctggtttgttttccttgctactcattgcaggcggcacatttgcatgcaacagcgaacggttacgatgcccgtgaagcgaacggaggtctacagtcgtcccacctggaagcacgtggccacgccctgccagccgcccacctttagtggccagaagtgcaccagggtgcaggtggtccacgagcaggcctacagggacgtcatcgatcacaagaccgcccagcagatgacctacgactgctgcacgggatggagccgggaaaacccaaggtcggattcgtgcatgaaacgtgagtcttaaacaaaatacatagattgcaatgaatttggaatatttttatcttctaattatttacagctatttgctccgcgcgctgccaaaacggtggcaattgtacggctcctagcacctgcagctgtccaactggtttcacaggacgtttctgcgagcaggatgtggacgagtgccagacggagaagccatgcgatcaacagtgcatcaatacgcatggatcttacttctgccgctgccgtcagggattcgttctccagtcggatcagcagagctgcaagaaggtgtccacgaatgcggacgatgcgttcgaggctcgggatctggagaacgatatcgatgatacggacgcggaggtggccacgcgactccagaagatcgaaaagtccttggccaatgagcgagtgcacacgaacgagctgcaaaagtcgctgcaggccacctacagtgtggtggacacactcaagagtcggctaagcacgctggtaaggattagagttgaacttctatatttgaatattcatactttaacgattacttcgtatgccctcaggaaaagcaggctcaggatgtcagtcgactgcagacgaatctctacaagacagagtcccggacgaacaagctggagggtatgctgaacctgctgctgaagtgccggaatggccccaatgccaattgcccctaaacagaactgcatttccccacgctattattaaatgttagttaacttaattgaccactccgttcatgtgtagctagatgctcctgcttgtaagccattcccgaatgcgagtcgagtgcctctgtagtctgtagaattagcccacggatcgggctattagtacttaagcgagaacgtgtgtcataaatgtatcgagatgtgaagttttagacgtaagcgcaccaccgcactctgcaccgctcttcatgtgggtggtgcagtgattagtttctgcatgtatctgtatataattttaatgtatatgagaaatcactgcacgaataaatgcattttctgattttaatgggtctttcatgggatatttaacaaaggaaatctatttatctggaagttatcatgaaaaaaaaggtaaagtgctgcaatatttacttttatatattggctacaacttaacgcgcaacataaaatttggttatttttccttttaaatgcaataatggtgagtcaacaactatttttatgacctcggctgtaagctgaccttttagcggggattcccaccagcggagacaatcgataactgtaagaataatatcgagtgtgggcaaggctgcgcaatattcgctagtatcgaactgattgccatctctatcaccaataacaaacaaataattggactgcacaatagaattattatcagtataaatataggggacaagaccagcatgattggaaccatgccaccgtagtttcattcacaacaacaaagcactactcactggaaacatcccgaaaagcaagcagtgacgtcactggcaaaacaaagcaaaaactgcgcagaaaaaccagggaaatctgttaagcaaggtccatcgttaaaaaggggcggggggtgttacagaaactgatcccccagatttcacttttaccacaattaaaactgattaaaaatcaaagcgctgcgagttcaaagtattcagttcacgatgacgcgcgatgagaa

SEQ ID NO: 16637 - DNA, 1972 bp, DROSOPHILA
ggacttctaagcgatcggtttggatttcgttagctccgccgcgccagctggaaatttgtatctcaaagatcgcagccagttcgctcggtttttgtgcctggcatacggaagcggctaacgcagaatccggaaaatcacaagagccgtatatatttcacaaatatatatatatagtatgtttcgaaaaggcccattcacggccattaaaatattttattgtacaaaaaaggcacagtgccgcgtatctgcttaatgtcagcgcgaaaactcaattcaatttattgtttgtgattgcaaatttggcataattgtgctttgatttattcgcgcgtgtttcgggtcatctctataaagaggaattttaaatctgggcaagattatctctgtttttctctgaacactggctgggtcagttggaatttgttcgccgtgtatgccagaaatgatttactcgagctctttcctgctgctctgttgcacaatcctgctgctgggaacagtacagaatgccggttccaatagcaccagccctcatcctcaccagaatcaaactcatcgcggacatggtcacagtcatcgaacgcgtcatcagggcaactatttggccacccatcaaaggcagcagcgcagactgcagtcgctgaatcaagccaaatcggatgtggagctgctgcccggggtcaccatgcacgaggtcaccagattacgacgggttcagccacataatccctacaataaagtgcagacacgacgcctacaccaatcgcgaaaccccaccgaatgggattacaatacttacaacatcatgaccaacacgttcggtccaccgccaccgccgatgccgttgtcaccgcgatatggaaagggcgaggataatacccaggatgttgagtttatcggggtgcgagaacgtggaaggggttactcattcgtgccatcggtaacggtcaccactgctccgccaccgaatctgaatcgaagatccgcgagtcctggttctcgcagtagcatcggcactattccaccactggttccggccagaaggggctatagctacaccaccaccacaagttctcctccagtgaacaccatcaccactgacaatcccttcgagacgaacaccattggtcgaggctatcccacagatcccaaggaaatggaaaggcggcacatttgcatgcaacagcgaacggttacgatgcccgtgaagcgaacggaggtctacagtcgtcccacctggaagcacgtggccacgccctgccagccgcccacctttagtggccagaagtgcaccagggtgcaggtggtccacgagcaggcctacagggacgtcatcgatcacaagaccgcccagcagatgacctacgactgctgcacgggatggagccgggaaaacccaaggtcggattcgtgcatgaaacctatttgctccgcgcgctgccaaaacggtggcaattgtacggctcctagcacctgcagctgtccaactggtttcacaggacgtttctgcgagcaggatgtggacgagtgccagacggagaagccatgcgatcaacagtgcatcaatacgcatggatcttacttctgccgctgccgtcagggattcgttctccagtcggatcagcagagctgcaagaaggtgtccacgaatgcggacgatgcgttcgaggctcgggatctggagaacgatatcgatgatacggacgcggaggtggccacgcgactccagaagatcgaaaagtccttggccaatgagcgagtgcacacgaacgagctgcaaaagtcgctgcaggccacctacagtgtggtggacacactcaagagtcggctaagcacgctggaaaagcaggctcaggatgtcagtcgactgcagacgaatctctacaagacagagtcccggacgaacaagctggagggtatgctgaacctgctgctgaagtgccggaatggccccaatgccaattgcccctaa

SEQ ID NO: 16638 - protein, 509 aa, DROSOPHILA
MIYSSSFLLLCCTILLLGTVQNAGSNSTSPHPHQNQTHRGHGHSHRTRHQGNYLATHQRQQRRLQSLNQAKSDVELLPGVTMHEVTRLRRVQPHNPYNKVQTRRLHQSRNPTEWDYNTYNIMTNTFGPPPPPMPLSPRYGKGEDNTQDVEFIGVRERGRGYSFVPSVTVTTAPPPNLNRRSASPGSRSSIGTIPPLVPARRGYSYTTTTSSPPVNTITTDNPFETNTIGRGYPTDPKEMERRHICMQQRTVTMPVKRTEVYSRPTWKHVATPCQPPTFSGQKCTRVQVVHEQAYRDVIDHKTAQQMTYDCCTGWSRENPRSDSCMKPICSARCQNGGNCTAPSTCSCPTGFTGRFCEQDVDECQTEKPCDQQCINTHGSYFCRCRQGFVLQSDQQSCKKVSTNADDAFEARDLENDIDDTDAEVATRLQKIEKSLANERVHTNELQKSLQATYSVVDTLKSRLSTLEKQAQDVSRLQTNLYKTESRTNKLEGMLNLLLKCRNGPNANCP

SEQ ID NO: 16639 - DNA, 4058 bp, DROSOPHILA
gttctccatccttctgggtttcggcagcaatcaatttagggttttcctcagtattcaatattcccagaagattgaaaagttggttttttaatttatttcgcaatagctcacttgaatcgtgtagaaagtaaaggataaagtgagaatcattcaacgaatagctgattaactggatctaaaagtctgggcatacttaaataccaattagtgtgcccgcatgtgtaaaaaaaaattcgaataggaacagagcttttgcaaagaacacttgactgtactcaatacaatgctaaaataatttaaaaaaaactatacacattctgttataaataatatgctctatgatcatttttatttccagtattaaaagttaagtaattcgatttttcgaatcgagtgttttatataataatccacatatttaatgtcagcagtagtaaaatcactcttttgatcatttgccttaaagtaacaaatatgtacttgcttttcgatttctagtactagtgttgcacaatgacgttaaaaggtgttaccagggtttgaaacaagttgcggtaagttaagccactcaacgccacgtggccattattatttcatttactcattgtagattgttgaaaactgtacaagaagtataaccatttcatacgccttaggcttctaaagaaaactgtttattttccttgcgtacatatgttgtaaagccaatcatttatagagtttaagattattatggcataacaaagttcaagctggcaactctaatttgtaccattcaacagatcagagattgcagtcatttcgtacgtacacttacaatgttaatagtgcagccataccattatagttgcgactaattcatttttctagatatgcaactttttgaaatcctcattggaaatcaagagtaaatgtccacccagtagccctccattatccttttaatgccttcgtgtggcccgtctgccacgagctgctcaataataaatacatgaatagataaactaggacgtggatcgggcaaggacaaggagtcgcaacaggacagcatctggcagccttggcacgttcgccttgtgcccataatatattaaatacacgataagcacacacaaaaaaaaaaggatggaaaatatgtagatatggacttgagattgctgctgctgaagtggcagaatggctggctcctgcctaggacaccggattgtcgctctcggggatgaccagctcctcctcccggatcttcttgggcagccgttccgccacctgcgcccttccggagagctggaactggtagttgaagtagtcgtacacgtacagctgcttgctgtgcacatagtgaaaggccaccgggtactccgacaggcagtccatgcactgcaagaatacgaagatagtttagataataatcaaaagaggacaaggaatgcgaataccaaggtggaaaaactatacgttgaggcttgaatatcaaagataaaatgcctcctcacgcggttataagccagtgacgaacgcaccttaccaccacctttctggtaacgaagaatgatgattacgttcgactaaataatatgagtgcttggcaaaatatggcgttgtctttgtgacacttgagtttattttctattttgctggattgttaaaaggtactggatgggtaagctgtgcattcattcatatatctacatacatacaaacgtacttttagtagggtgctaaatgcatccaaactcaccgatctcggattgtagtaggcgtacttgtacaaccaaaagtccatgccaacgttgcccgagagaagggctccataaggagctatgggatagaagcggttgcgcagctgctcgtccctggaatcacccgccttcacgcccaggttgaacaggcacttgcccatctcgacgtcctcggcgtgatcgtcctcctggcgacacttggtggtgtcgttgacgccctcggcgaagatcctaagagcctcgcggctcagtacgtagccactgccgccggacatgtatgactattgaatcggattcatattcagtgagtttgtaatgtaatccgaaccggacagaagataaactcacctcgttcttctggtgagtgccgaccatcttgtaattaaatccaaaataaataggtgtctccggtgaatacgggtagagcatgtagcgcagattttccaaaaagaggtagctattgataggagcagattgaaagttcagtcaaactttaataatgctatcttttctttatcggttcctaattattcttcattcaactgttttggctgtggccctaacattgagataccatcagtagttacaccacaaaggtaaaacagaatgataataatgttcaataaatacatacatacatatatacatatgtacgtgtatctgtggtgacgaaaacaaccatccattcacttatcaattcctgcaataaaatgccactctttccctatttaagaatctgaatctttcacatacgtgtcgtcgtccgcctttatgaaccaatccgcctcgtggcgcatctgctcgtggatgtggacaaaggcctctttggtcttgccccacagcatctcgtatcggtccggcttggtcagcacaacggtgggcagctcgtcatccggctcagaggtcatgaagtagatcttattgcagcgtttgccccacgttcgcaaaacgtgaatggcccgggtcttgtggtatttgggtgtggtgagcacccagcacaggactctcacctcccgatgcatcttctcggccagggtttcgttgcgcagtccaggctccatgtaatcaacagagctagtgcctctggacagtggcagtgcgccggcgttgagcaccattacatcccagtaggcaaacagcccgatcaccgtggtgctcaccagcagaatgagcaggaccaggcgatcggtggagatgcgctgggcggagcggtacatgccattcgccaatccgttggaactggaatggaagcccggataagtcgacgagttctccagtatgatatattccccggccattgaaacactgacttgcggcatcgtaagcactgtctataccaatcgaaaatggtcttatcgccgggaaaatgcggcccagattagacaaggtggctggcagaactaatacttatgtcgggaacatcgacgagcaggtgcgctcaattagtcttattactaggttgaaagagagagagagagagagagggagggagagggagtaacatgcacagaacagagttaaaatgagtgagtgaaagttgcaccagagctgcggaaatagcaatacactaattgatatggtttctaggtgaatggaaatccttatttaaaaaaaaaaaacatatactcgtacatgtggcaaacagtagacaaaaataaataaacaattaatgtaattaattgcgcgtatttcctgatccacaatcataaatattatattgatatattattgagtaacagttaagctgcttagagaggtaccaaaagccactatctatttaaaaactctaaaaactttagtggtccaaactaattgcttgccagcttggattgtactaagaaatttgtttaaatttcactcagcatagttcattaatcaaaacacttgggacaagcacacagagcaacaagcacctcgaaaggaaaaatatagaaataataaaaaagtgagttctaaaagggggggggttgggtgaacgcaaaacccgaaaacagttgaagttgagagaatctttcaattaatcatgagcgacatgtggtcgttgctggacgcttttcagtggcgttgccaagatggggggggactaaggcgtgggcgtggcacactggcaaggaccgccagcagtgcgggaaaaataatatagcgcatacgccctgtggggcactccagcactccgacgctccggcactcggatgctcgcgtgcaaacaaatggctgccataatagcgacgaggcggcatcctggtcgcatcctggtcgcatcctggacgcatcctacaccccgcgccccgtaaccatccaatccgcctgcgctggcaa

SEQ ID NO: 16640 - DNA, 1310 bp, DROSOPHILA
atgccgcaagtcagtgtttcaatggccggggaatatatcatactggagaactcgtcgacttatccgggcttccattccagttccaacggattggcgaatggcatgtaccgctccgcccagcgcatctccaccgatcgcctggtcctgctcattctgctggtgagcaccacggtgatcgggctgtttgcctactgggatgtaatggtgctcaacgccggcgcactgccactgtccagaggcactagctctgttgattacatggagcctggactgcgcaacgaaaccctggccgagaagatgcatcgggaggtgagagtcctgtgctgggtgctcaccacacccaaataccacaagacccgggccattcacgttttgcgaacgtggggcaaacgctgcaataagatctacttcatgacctctgagccggatgacgagctgcccaccgttgtgctgaccaagccggaccgatacgagatgctgtggggcaagaccaaagaggcctttgtccacatccacgagcagatgcgccacgaggcggattggttcataaaggcggacgacgacacctacctctttttggaaaatctgcgctacatgctctacccgtattcaccggagacacctatttattttggatttaattacaagatgtcatacatgtccggcggcagtggctacgtactgagccgcgaggctcttaggatcttcgccgagggcgtcaacgacaccaccaagtgtcgccaggaggacgatcacgccgaggacgtcgagatgggcaagtgcctgttcaacctgggcgtgaaggcgggtgattccagggacgagcagctgcgcaaccgcttctatcccatagctccttatggagcccttctctcgggcaacgttggcatggacttttggttgtacaagtacgcctactacaatccgagatcgtgcatggactgcctgtcggagtacccggtggcctttcactatgtgcacagcaagcagctgtacgtgtacgactacttcaactaccagttccagctctccggaagggcgcaggtggcggaacggctgcccaagaagatccgggaggaggagctggtcatccccgagagcgacaatccggtgtcctaggcaggagccagccattctgccacttcagcagcagcaatctcaagtccatatctacatattttccatccttttttttttgtgtgtgcttatcgtgtatttaatatattatgggcacaaggcgaacgtgccaaggctgccagatgctgtcctgttgcgactccttgtccttgcccgatccacgtcctagttta

SEQ ID NO: 16641 - protein, 365 aa, DROSOPHILA
MAGEYIILENSSTYPGFHSSSNGLANGMYRSAQRISTDRLVLLILLVSTTVIGLFAYWDVMVLNAGALPLSRGTSSVDYMEPGLRNETLAEKMHREVRVLCWVLTTPKYHKTRAIHVLRTWGKRCNKIYFMTSEPDDELPTVVLTKPDRYEMLWGKTKEAFVHIHEQMRHEADWFIKADDDTYLFLENLRYMLYPYSPETPIYFGFNYKMSYMSGGSGYVLSREALRIFAEGVNDTTKCRQEDDHAEDVEMGKCLFNLGVKAGDSRDEQLRNRFYPIAPYGALLSGNVGMDFWLYKYAYYNPRSCMDCLSEYPVAFHYVHSKQLYVYDYFNYQFQLSGRAQVAERLPKKIREEELVIPESDNPVS

SEQ ID NO: 16642 - DNA, 8004 bp, DROSOPHILA
ctccggcgataatggagaccgacccgcacacacacacacacaacacggccacacggtgacgggcgtagaggcacacaccgagccaactcgaatacacacgcgcgcaggggagagagagcgggagagcgcgggcgcgctctcaattatttatttacttttttcgtaactgcattccattccagctcaaacacacgcacacatatgggggacgaacacaagcgcacacgatcactgctcacagttggtgctgcttcttttcatttcttgttgttgcaagcgtttgaactcctttacttattttcttattttcgcctaattgaaactaattaacgacgataatccaaccatccacttggtgttcacaaaaaaatatgtacttcagtttagtgagttcgcgccgtcgccgatctcttcggttccggaattccttgggggagcagcaaaaaacacgagtagcgcgcttgatgaccgtccgattcggattcggaatttgttttggtaacattcgctgctagtggtgtagcagaaaacatcgcattgcatatcgatacactcgcggcgatgttattcgatgtattggttgatatcgatattataggctgtattgacgcggttgcagagatgcgatatttaacaatcatgcacgaaaagtatttattgttatttggcttgtgtagtccccaagcataggtgtaattgttgagggaagaaaataggagttgtacgttcaaagatcggcttggtaacaggaactagttcggttcttcaagcgatgttaatcaaagccagttccgatagatcatgttaactcgctctgttaacaattactgttatcttaatcctaacatttccgttacattttaaaaacagaaaaagaaaaaatttaaaaaaaaagactgtaaactgagttacgcatttcgaaatcaatatgtatcccaaccatagatagaaaaataaattatgtttccgaaacataacttcaataaaaccacaatttcgcttgctttgtacgtttgatattgtatttgcattttatgaattgtaaaaattgagtcaacaagactaacacagcttcagctcaagacacatgcaatttcattgacattgtttaattgtatatattaaaggaaatcaattaggatataaagagagaaacctttttgccgcttatgcgatgccaactatctggatctggattgtctaacacgaaaccctaactaattggtaaattaaacataaattaatcatatcggtcaacaactacaactaaatattagttattagcggataaagagcgccccataaactatttacactaagctttagtctactagagtcccggattccatctccgctcctcggatcttcggatcttaactcagatgttcggatcttcaagttctaggagagaactggtgcagtgcatccgttattcaggcgatactcggcatagaccagtccggtgttgtgccagtgatagaaggcggccacgatgatcaggtgccaccagttgtgcgaatgcccaacgaagtccaccttgccggtgaaccagcgctccggaatcttggccgcatagaaaacgaaggcgacgaggcagagcaagtacatgagcacgatgcggggcaccatcagctgcaaatggtaatgattgatggattagcaaatgacaagattccataaatttccaactgatgcctaccctgactagctcgttctccagaccgcccatggccaccgcccagtggcccagaggtatgattccataggcagaccagagtagcagcaccgccaccttgccgttcatggacacattcaaacggggtatctgcacggcaatggccagtgcgaacatgcccagtgcaatcgtggagtacagggtgcgcaggaaggtgtggcaccagaaggcatagtacatgccactgatatagatggccaccagcgacagcgaaatgcccaggaagtcaacggacagaaagagctcgtagtgctcctccgatttgcaggagaagatgtggtatatggcggacatcagcatgcacagacagaagcagaccagcaggcagaccaccagcacctggtcgctcagggaggcgtggaggcgcaggaactgcagatcgaagatggtcagtccaatgaacaggatgcaaccggccagatggctccagatgttgatctatgaaaaatatagcaataataatgttataataatagggaatagagtttaaggaaaactattgtagctccaattggaatggagtatcattctagtgtggcaatcttaccgtctcattggtccaccagaaaatgctctgcaggcacatttttgtggaaggtagaaaggtgcggtatccgcgacgaatgtacgggttgaacttcaggtgactgggggcctgtatcgaaagcacaagtgaataaacattccaaataaatacaaaattttccaagccgataagacatgcaaatcgcatgcgtgtagcattgaaaataaaataaaaaccaaatagacaaaatgacaaaataaaatagaaacaaacggaataattcgaggatctggcaccccgccgaatgtaaaaaaaaaaaaccaaaaagctttccatttgcttcaattgaaagaaaataaaactaattaatccaatttgtgttgttagcaatcttgtatgggaattgattaaatgccaaatactgtgtatattatttactttctttgaatttaactagctaagttttatatattataaaaaatccatttaattagttaaacaagtgctaagctagttttgcactgcatttatgtattattaccttaattaatgcctttcaatcggaaacagtaattatttcaagcccgttttaagcccagttcgaagtcgaatatttaacttggtcaaaactaagcatggtccgaaaaacccaagaaattcgattcgggagttaccttgaggattttcacaaacatatatgtatgtaacttgcataccacccaaagaaaacaacagtagcttctttttatttgccaccgctatttaaatatttaatgcccgcgaagcacagagctttttatttgttgctagtcgcgaccttgattcagttggcatttggtgggtttgttcgttgtctaattgtattatttggcaattgctgccaactcgaccgccatggcggatttcacatatttaagcgttttggccattttacaacggtcgcttaataatgcttttctggccatacatacatacgtatgacgataacaattggccaaaatcagtgttaaagccatgtaaaatgcaatgagtgaatattttctgcgatttgtccctgattctgacgtattttttcaattcgccaaacaaaatttgcgatcaattagaattcagtgcgcgacaattggcgacaaattgaccctaccaaagttcgcgcgtggggttaactcacatcatcgaaattgcacagccatttgaatttggacagcttgtcgtcgtagttgggtccatgccccagaatattgggctcctcattggacggaaattgatgcgctgcgtccaccgaatccgcaaccagttggccatcaagctgcgaaaagagatttaagatggaattagttaaaatggaggaaaccctatcgattagcggcaattcgaaacttaatttgaattgaggacaagaacgatgctcaagatctatactcatattcttccgccttagaaaactgacgttggcaactggcgggtttgtttctctgcacatttgtgtatatttttagccaatagagcaactgcagtcgaaaaattgatttgtttgcttttattttattattatcttttctgcggtttctgctattttatacgttgttgttgttgttgttgttttcgtctgggggttttcggtttcgtgtgtaaacaaccaaccaaccaaccaaccgactaaccagcattgcaaaaatgcaatcaaaacatcgctactattagtgcctccagcaaactgcagcaaaaattgagaaagggggcttgactctaatttgtttatacagcttctaaatctaatgcataacaacaaacaacaacaacaacaacaagtgtgggagggcaagtgcaagtgcctaagcaaaagtatcttatccaacgtgatgacgttttgtttacaatttgcattgttttttttgcattccgctttaaaggaaaatcatgtgcagtaagcgtcgtgcccataaatgcagcagtaagtataaaaatatatgcatttttcaatacaaattaaatataaccgctcattaaaacgaaatacaggaacaattgaattcccaatcctaattcttttgtacaagcaacaatttcgtagttacttaaatgctaattaaaaatccatgatgtcaaaacttagctacatttatcaatttttaaaatttactcatgatctaatagtcactaaaaggctaaatagctttcgctacctatttgtaaacaatgttactagtaagtgctttgtggtttactctgtcgtcattattaaatatttatttgacactcaggaacgtgtggatttatagtaaatttaggcaaaaaatatatagaaatttttcaataatttagaaacataaaaatatgtttatgaaatgaaaatgaaccgctatttaacttaaagacattcgttaagacaagaaatgtactattataatattgattgttttaattttaataattaaggaactaaaagttatttgtgtaaaatgattttgaacaaaactaaaataaaatatagaacaaataattttacataaaaattattatacacgagcacgtcaacttgacattgcggcttgttaaatattttccagcaaatgcacttcacgaaaatgttgtagattccaaaagataaacacggtaattgttggcaaatagaaaataaaatggaatgccatcgataaacaggatgtgaaattcattaattggccattgacgtagtttagccaattgtttgttctactgaattgaaaacgtcagatttttagagtttggaacgcagcttacatctttctttttactgccgcgcatagtgcatttaaactcagtagtagttgttgtagtaacaattgtagtttccattttacacaggcacttttaactagttgttgaaacgttttgaaagtatttagtttttaatattttattcgcagataactattattttatttcaacacacaaaagccagccaagtggacattccaaaacaatgttttcaaagttttttttttcgcaactccttggagagattttcaactgagcgcggaaattttagggtgaaccgttgcgatcgccaacttgctggcaactaaaaaaccccccgatatccaatgtggccaatggtgtgaatcgaaaaagctcgccgaaaagctttctataatttcgcagcagccgagagacgacgaatgcactatcagttttgttttatcaagtcgcaaatgctgagcaatcattttgccagagggacggttttcagatttttcaacggacagttatgctgaaattatgcgaaatttcgtggccaatgagctttcgcttcttgtgcaagcagcctgttttggtcaagtcggtttgattatcgaatacactgaaaaacatcggcctgcattttcatccaagtaagcttatagcttcgatctaacataagaaaaatgaataaataattttaaaataaataaaaaataaaatgcatctacacatattttactttttttagaagctagtaaaatacattattatacattcgacatttttttatatgaattatttgttaagtgtatattttccaaaaaaaaagttgtttgtgcctttctcaacacttttttttgtcgcagtcaagcccccgtattatataaccaatcgagctgattatcgatccagcattgagaacccttttgtaaacaccagttgcacaacatgaaaagctgatgccaattcgcaataattgtttacacgatcccaatacacacggatgggtttttatcgctggacgggagacgtaaataaaagacgaaaaacaaatctgaaaatcgagcccaaaaaccagtttcaattttcgacgaagttcaggaattccgcgtgcggactttcgcaattcccatgtttatacccttacatacctacgcacatacatatgtacatatgtgtaaacataatgcataacaagatatcggtgtggcaagctctaatcggttacaaataacgccgactcgtcatgaccttggctccattcgtggcgatctgctgggctttttgaccttgtgctgtggggaaaatcgcgcactctgacactttgtgtaaggttatctccaaactgctggctcgtcttttcggatgacaaatcattttttttttgaactgattgcatgtgctgcgatgcacgtgccgttttcaagtcgccgagaacaggaccggatctggtatgatcagtttccgggtccattcgatgcatcataacattgataaaattttcgaaatatttaaaatagctcataatttccacattttaaagcttatggtggaaaaaaagtatacaaataagtacttatatattatacttttgctacattatattacatatatatttgctattatatattacacttttgatcaaatgaaatatttatatagtatgtatgtaaacccccgataagattgaactgcccccgtctgagcttaatccattcaaaaaaatctttgttgaggaatgcattgtaaacaggaatattccactcaccaggcagctgtcgtcacaatcctgtccagattttcgcaagtagcaggaggacgagtccagcgacagttctggttcctcgaggatctcacggggacggggactcatggccactcggtagcctgatgggggtattcacagaaatacagctcgtttagagatcgagtgtccgggtaaaaatgtaaacatatacataagctgcgatcgccagttggtgaccggctgttatcaacaaccccccccccccccaccgtcaccgctaccatttcgcagaagagtgcgaaaatcgagtcgagctgcctaacaaaagacaacttgagtggtgccaagtggggagcgcagccatgttgccatgttggagccaacaaagacagcgagcttcgctctctgcgtagcctctcttttctcacttggactttcttcggagcttaatcgattagaggccgaagaagcctgctctacaagggtcttgaaaatagtatatttttgtgattgagttctttttaattaacactatataagatatattgaccttatcgatagtattcttaagaaaaagaaaatcaaaagttttatttttcagataaaaatagttttcaaataagattgctctgcaatgaaggtggtgcgttgagcacatgaaatacatatatgcatataatgaatacaaaatatatagtttgctttgtttccacgactgcagtttcgagtttatttcttttacagcacagcacagccacacgaatttctctcacaaaaccgtttgcataaccaaaatttctaaaagttttccaggtcacttgtttcgcaggcagctttcgcagcacgtgtctcgacgaatgcagttgtattgacattcccaagggtccagataaccttcaattgattttgatgtacttgctctaactaggccacacacggaacagggattggaaatttcactttgagctgcaaagttctggcgatcacctccacctctcgcaacgcggcaaaatatcaactgaatattttcagacctcgagtgtgttatttgcgttaaaagaaagagtcgcgaatcgctgcgaagagaagaaagagaaaagaaatactaaaagctcgctccgaagctttggcgacgcgagcatgattcttctcatatacagtatatagcatttgaattgattaaatgctaatttagcatgctgtggtcgttgccgccatcggagatcttacactgaaacttgaaaagcggattctgaatatcaattcttcttg

SEQ ID NO: 16643 - DNA, 1603 bp, DROSOPHILA
acggtggggggggggggggttgttgataacagccggtcaccaactggcgatcgcagcttatgtatatgtttacatttttacccggacactcgatctctaaacgagctgtatttctgtgaatacccccatcaggctaccgagtggccatgagtccccgtccccgtgagatcctcgaggaaccagaactgtcgctggactcgtcctcctgctacttgcgaaaatctggacaggattgtgacgacagctgcctgcttgatggccaactggttgcggattcggtggacgcagcgcatcaatttccgtccaatgaggagcccaatattctggggcatggacccaactacgacgacaagctgtccaaattcaaatggctgtgcaatttcgatgatgcccccagtcacctgaagttcaacccgtacattcgtcgcggataccgcacctttctaccttccacaaaaatgtgcctgcagagcattttctggtggaccaatgagacgatcaacatctggagccatctggccggttgcatcctgttcattggactgaccatcttcgatctgcagttcctgcgcctccacgcctccctgagcgaccaggtgctggtggtctgcctgctggtctgcttctgtctgtgcatgctgatgtccgccatataccacatcttctcctgcaaatcggaggagcactacgagctctttctgtccgttgacttcctgggcatttcgctgtcgctggtggccatctatatcagtggcatgtactatgccttctggtgccacaccttcctgcgcaccctgtactccacgattgcactgggcatgttcgcactggccattgccgtgcagataccccgtttgaatgtgtccatgaacggcaaggtggcggtgctgctactctggtctgcctatggaatcatacctctgggccactgggcggtggccatgggcggtctggagaacgagctagtcaggctgatggtgccccgcatcgtgctcatgtacttgctctgcctcgtcgccttcgttttctatgcggccaagattccggagcgctggttcaccggcaaggtggacttcgttgggcattcgcacaactggtggcacctgatcatcgtggccgccttctatcactggcacaacaccggactggtctatgccgagtatcgcctgaataacggatgcactgcaccagttctctcctagaacttgaagatccgaacatctgagttaagatccgaagatccgaggagcggagatggaatccgggactctagtagactaaagcttagtgtaaatagtttatggggcgctctttatccgctaataactaatatttagttgtagttgttgaccgatatgattaatttatgtttaatttaccaattagttagggtttcgtgttagacaatccagatccagatagttggcatcgcataagcggcaaaaaggtttctctctttatatcctaattgatttcctttaatatatacaattaaacaatgtcaatgaaattgcatgtgtcttgagctgaagctgtgttagtcttgttgactcaatttttacaattcataaaatgcaaatacaatatcaaacgtacaaagcaa

SEQ ID NO: 16644 - protein, 351 aa, DROSOPHILA; identical to SEQ ID NO: 16635

SEQ ID NO: 16645 - DNA, 4721 bp, DROSOPHILA
ggtatgctgactggcattctggcggcagttttcaatcttagccaactggtgaacatgatgtccattggcactttgttggcctattccatggtggccagttgtgtccttatgctgcgctacgaagtggacgatcgacgggagagccgcattgtggcaaacggacgtgccacgggtctggagcaggatcgtccgtgtgctctatggaggcgtatattcaacctaaatggtcagacagtacccacaaagcagacttcaaggatcgtcacctacagtgtcacgctgttctgtgagtgcaaattttagttttaaaattagtattattaatatacccctaataacatttattttgtttcagctctttggtgcatggttttctcgcagattctaaccaagttcgaggaggatctggctaacgtgacgtccttcgatggtattaagctggtgctaggcaccataccccttgcagtactgctcctggtcatctcgcgtcagccaacatcaggggtgaaattgtcgttcaaggtgcccttggttccctggctacccggcatttccattttgatcaacatttacctgatgatcaagttggacattctcacatggattcgcttcagtatatggatcgccataggcctggcaatcttcctggcctatggcatccgtcacagccggctgaggcagcgggaacagcgcaacaattccattgccatgatgcgggactgcagcaattcggcgttgttgggcggccaggagaactcaaagtacagcaacgaggtgcccctgatattgatgcacagtacatcctaaatatatattgatattaaccacactatacatttactttttttgcctgcgaaatgcgcgattagacacgcttctcatcatccacatactcacctatgtaatttacacatgcacttatcctcataccgtaagataggataccaaaaacaaacgagagtacaataagttagctgaaagcaataaacacgaatattcctatgctaaatcagtataaatttatttgggtgcgagatttgcttataatttagcgatgaaatccagccggtcaatgcaatcacatgggattaaacatacaagttcaaaatgtaatcttactgcactctcagtacataacagtaaatataacaataattgtagtgtcagtatccacatatgccatttgattttgatacgtctatattatcttgacttcgtcttctgctgcaaaagctgttcgcgattttcaaaaaaacgacagatttaacagtaatgttacctaagtatacttgtactacacttataacaattgcaatgtttccgagagttaaatctcgactttggtagcttcagtggcgttgcgctcgcctttctccctttcacgttccccggactcctcctcttcagcttcttcgcgttgctcctcagaggaagcagcctgctcttcctcctcgctcgcgacaattatgaactcactgtctcctgccgtagagttagtcttttcgctcgagcgacttgaattggaaagcgattctaaggcagagccgtacaaagcggggttgcaggtaaactcctgcttcttagcagcgtttacttcacgtgcaatggtggataccgcactaggattcacgttctggctgtgcttgtaagagccaccctgcgattgctggccgaagcccaggttgccagtaacgggtttaactgtagcgcgcttgttcttggctagagcaccggtgaccatgctggccgaaaatcctggcggcggtttgaaccctatatgcggagcattgcaggtgtccatctggaatacgtgccgagttcgagtgctacctagttgtttctctacgcgcatagactgagtgggaacgatgggcgcccgacggatcacccgcggtacaacggcctgaggcatatccgccacctcgccggtggctgactgaccagctcctccgcttggctgatctccgaatccgtacatccgttcgtgacgctcgtggacattcccgtcgaagtccttggacattcgcctgcttgctgaggttttggaaatatcgggtgcgggcagaagtggagccacatgcaccgcagccggaatgttggcactggttcctagtcctaggcgctgtttaacatcgttcaacgtttggcgtgcctgctgacgtgccttttctgcacccacttccagcaagtagatcatctcgttgcgcttagtcatgtgatggtgtatctgttctcggatcggacgcaagtgctcgaccacagcctccgccacacggtccttatactttgccgtgtccaaagtggcggcctcgttcaccactgtcttaatgctctgtcccgtgacctgggcatggatgttgaccagattgctgacgccagcacgcttgccaggattataagtaatgtccgatgtaaagtctgtgacggctttctttatcttctgcgtaatcaagtcgggcgagtcacacaagttgatggtggccttgggattcgcttccgatttagacatctttttggagggatctcgcagggacagcacacgggaggcatcaccatcctcaatgatggcggtgcaaacagggaaagtctcgccatagcgaccgttataaattctggccaagtgctgggccagctgaatgtgctgaatctggtcagcgcccacaggaacatgagtggacctgatcgaaaaacgaatatgaatattataagtactataataagtaagcaaatggcaaaccatttcagatattaaagggtggtttaaaaatatgtaaagctgaaccaaagcatttaagtctgataagcaactaggactcttgcattcccggcttacattctgaacaaaaaacggaatatatttacttacttgtaaagcataatgtcggctgcttggagaaccgggtaaacgtacaatcccagagggacatcctttagaagacgggacttctctcggaactgcggcagttgagccaatcgcggcatggtggtcaaggagctaaggatccaattgaactcggcgtgctcggcaacggcggactggacaaagagggtgctcttggtgggatcgatgccacatgccaacaacgtggcggccatggtgaagatgttctctcgcagaagcggcggattgtggggcatggtaatagagtgcaaatccacaatacacacggtgacatcgtcacgagcattctgcagctgcacccatttgcgcacggcgccgagataattacccagatgcagggaacccgtcggctggatgccactaaagactttcctcggccagcgggtgttatgctgggttggggtaatatattagagtcttgtgttatgtaaactatttctacgaatgcacttacttcttcgtggccactgttaacggaattaccatgggggtgtacgtgctgcttgtttccaccggttacctgggccgtcgcagagggcgttccagccgtcctactagccaatcccggcaagaaactcctcgcctgaatgcaacggcgctgggaatacacagctgtctgtccctttttggccaccttagacagactgcgatggagcttgccaaatcggaacattgcaatgagctatgaattttgtaccccaaaacttttgagtaaaaaatattgggaataatgcggtgctaaatgtgtgaacaaagcccaaaaataaattatttgttcgaaacggccgaaattttgacactgagcgttcgcgagcgttgccagatggcttttgaaaagccggtacgacagctgtgaacagtgatactcagcttggcgagttttccgctaaatcgtggattaatattaatattcaaatttaataaagaatgttatttattatcattttttttataactctctatttaagggtattacctatttacatcttacttgtgaacgtatggcttgaaatttaatgtaattgtttgatggtaaataaattgtagagaccaattgaacaattttttttttttaacaggactcctattatttttatgcttatagctttattagtggtacaccagaaaatctaacgacattgaaaaagaattaatctgcagaactgcagtttcgagttttcaaacagtgttgtatttattctagcttaatacacatattacattgcaattaacgcctggcgccattaccattatttatattttccacttttctgttcctacattgagagttacaaatatgcggagactgtcgtttcggccgtcaggataatttttcgaataggggttattcaaagatttcaaacgcggtgcaaaattcttcactatctggcagagattgggaagtgcttagaagttgatgggtttgccaaaggcagctgccacattggcctcacgcagggcctcggaacatgtctgaaagaaggaattgtgcgcattaggttcgaaaggttcaaatcagattaggtaatcacttactggatgcgcatggcaaacgcgggcaacgtcctcggcagcggctccgtactccatggccagcacagcctcgttaatgagctcgccggcaccaggtccgataatatgggttcccaggatcttatcggtggcctggtcggccagaaccttgacgaaaccgtcggtgtcgttgttggtcttggcacgagagttggccaggaaggggaacttgcccaccttgtaggcaacaccctcctgcttcagttgctcctcgctcttgccaacccacgcgacctcgggatgcgtg

SEQ ID NO: 16646 - DNA, 2471 bp, DROSOPHILA
caacgctcgcgaacgctcagtgtcaaaatttcggccgtttcgaacaaataatttatttttgggctttgttcacacatttagcaccgcattattcccaatattttttactcaaaagttttggggtacaaaattcatagctcattgcaatgttccgatttggcaagctccatcgcagtctgtctaaggtggccaaaaagggacagacagctgtgtattcccagcgccgttgcattcaggcgaggagtttcttgccgggattggctagtaggacggctggaacgccctctgcgacggcccaggtaaccggtggaaacaagcagcacgtacacccccatggtaattccgttaacagtggccacgaagaacataacacccgctggccgaggaaagtctttagtggcatccagccgacgggttccctgcatctgggtaattatctcggcgccgtgcgcaaatgggtgcagctgcagaatgctcgtgacgatgtcaccgtgtgtattgtggatttgcactctattaccatgccccacaatccgccgcttctgcgagagaacatcttcaccatggccgccacgttgttggcatgtggcatcgatcccaccaagagcaccctctttgtccagtccgccgttgccgagcacgccgagttcaattggatccttagctccttgaccaccatgccgcgattggctcaactgccgcagttccgagagaagtcccgtcttctaaaggatgtccctctgggattgtacgtttacccggttctccaagcagccgacattatgctttacaagtccactcatgttcctgtgggcgctgaccagattcagcacattcagctggcccagcacttggccagaatttataacggtcgctatggcgagactttccctgtttgcaccgccatcattgaggatggtgatgcctcccgtgtgctgtccctgcgagatccctccaaaaagatgtctaaatcggaagcgaatcccaaggccaccatcaacttgtgtgactcgcccgacttgattacgcagaagataaagaaagccgtcacagactttacatcggacattacttataatcctggcaagcgtgctggcgtcagcaatctggtcaacatccatgcccaggtcacgggacagagcattaagacagtggtgaacgaggccgccactttggacacggcaaagtataaggaccgtgtggcggaggctgtggtcgagcacttgcgtccgatccgagaacagatacaccatcacatgactaagcgcaacgagatgatctacttgctggaagtgggtgcagaaaaggcacgtcagcaggcacgccaaacgttgaacgatgttaaacagcgcctaggactaggaaccagtgccaacattccggctgcggtgcatgtggctccacttctgcccgcacccgatatttccaaaacctcagcaagcaggcgaatgtccaaggacttcgacgggaatgtccacgagcgtcacgaacggatgtacggattcggagatcagccaagcggaggagctggtcagtcagccaccggcgaggtggcggatatgcctcaggccgttgtaccgcgggtgatccgtcgggcgcccatcgttcccactcagtctatgcgcgtagagaaacaactaggtagcactcgaactcggcacgtattccagatggacacctgcaatgctccgcatatagggttcaaaccgccgccaggattttcggccagcatggtcaccggtgctctagccaagaacaagcgcgctacagttaaacccgttactggcaacctgggcttcggccagcaatcgcagggtggctcttacaagcacagccagaacgtgaatcctagtgcggtatccaccattgcacgtgaagtaaacgctgctaagaagcaggagtttacctgcaaccccgctttgtacggctctgccttagaatcgctttccaattcaagtcgctcgagcgaaaagactaactctacggcaggagacagtgagttcataattgtcgcgagcgaggaggaagagcaggctgcttcctctgaggagcaacgcgaagaagctgaagaggaggagtccggggaacgtgaaagggagaaaggcgagcgcaacgccactgaagctaccaaagtcgagatttaactctcggaaacattgcaattgttataagtgtagtacaagtatacttaggtaacattactgttaaatctgtcgtttttttgaaaatcgcgaacagcttttgcagcagaagacgaagtcaagataatatagacgtatcaaaatcaaatggcatatgtggatactgacactacaattattgttatatttactgttatgtactgagagtgcagtaagattacattttgaacttgtatgtttaatcccatgtgattgcattgaccggctggatttcatcgctaaattataagcaaatctcgcacccaaataaatttatactgatttagcata

SEQ ID NO: 16647 - protein, 665 aa, DROSOPHILA
MFRFGKLHRSLSKVAKKGQTAVYSQRRCIQARSFLPGLASRTAGTPSATAQVTGGNKQHVHPHGNSVNSGHEEHNTRWPRKVFSGIQPTGSLHLGNYLGAVRKWVQLQNARDDVTVCIVDLHSITMPHNPPLLRENIFTMAATLLACGIDPTKSTLFVQSAVAEHAEFNWILSSLTTMPRLAQLPQFREKSRLLKDVPLGLYVYPVLQAADIMLYKSTHVPVGADQIQHIQLAQHLARIYNGRYGETFPVCTAIIEDGDASRVLSLRDPSKKMSKSEANPKATINLCDSPDLITQKIKKAVTDFTSDITYNPGKRAGVSNLVNIHAQVTGQSIKTVVNEAATLDTAKYKDRVAEAVVEHLRPIREQIHHHMTKRNEMIYLLEVGAEKARQQARQTLNDVKQRLGLGTSANIPAAVHVAPLLPAPDISKTSASRRMSKDFDGNVHERHERMYGFGDQPSGGAGQSATGEVADMPQAVVPRVIRRAPIVPTQSMRVEKQLGSTRTRHVFQMDTCNAPHIGFKPPPGFSASMVTGALAKNKRATVKPVTGNLGFGQQSQGGSYKHSQNVNPSAVSTIAREVNAAKKQEFTCNPALYGSALESLSNSSRSSEKTNSTAGDSEFIIVASEEEEQAASSEEQREEAEEEESGEREREKGERNATEATKVEI

SEQ ID NO: 16648 - DNA, 3176 bp, DROSOPHILA
gaagcaaaacggactgaaggagtttctcaacctggtcacgcccatgagtttcctcaacggcctcactttctttctcattcggtttgtgtgctacacattgcttatgatctttgtcctggtcgttgcatatttatacaaggccctgggctccatctgctttgcttacgtggcagtgttgtttctgctttacattttgtcaaccatgtcgtatgcttatctgatctctatttgcttccactcaggtaagtaattacattgatatattcagcaaagtttactaatcttctacataacttacagttttctatgcgaaaatcggagggctggcaatgctaataattccctatgcattctcatttgttcgaagctgggccacatcgctggcatttgtgtgttttagcacgaatacctttctggagggattggatatttttcagacattttcaaataagcgtaagagtttaaattggtttttagtagcttaacatttaaatttgaacactggctttttttgaagatcgcgaattcggtgctgtggatgtatttcgcgtaatcaaaagcaattcctcaacgatgttttcggtctacgtggttctcgtctttcaatcctttttgtatgccatgctctacaactatttgggttgtgtttttcccggtcctggtggactaaagcgaccgatgttctttttcctagatgtaagtactatttccgaagtccgaaccaatgatatttaatgtcggtatcagatcaaaattttcgctcgtgtgatatattttcttatctcgacataagcttcaattcagttcgtattataattttatgttcattataatcaagtatgagatcagatgcagtaagactctttatttcaataggttactttgatcgaatcttgtttattgaaatcggttaaaatgtcctttttacagttccgtatcggttatcggctgcataaccaaacagggttaaattaagaattttctttattctaaaccatagcccaagacttacatgaaacgacaacgcaacgaatacacgacgacaccgcgcggcactcatgctatcataatcactgagttgtgcaagaagttccagacaagcaagcgcgatacgctaatttcggacaacttgaacatgacgatcaacaacaaggagattactgtcctgctgggccacaatggagctggaaaaacaaccatgatgaacatgataatgggtagggactcaaactcaattcgcttcctcggccatccaatgcacatgttgattctctttcaggattggtaccaaaggattcgggcaagataattgtgtgcagtgagcgcgatgtggcctcctatcgccacctgattggattctgtccgcagcacagcgttttcatgagctacatgacatgtcaccagcacttggagttctttgcccagctgcggggagcttgccgatccgatgcacgcgattgggcagatgagaaacttaagaagctgggacttagcgataagcgaaacgaattcggcaagaatttgtctggaggcatgaagaggcgtttatcactgggtatcgccattgccggtaacaccaagtaaacttaagagatatattgcttaaagatattcggtttaaaaatctttgtttaatctcgcagaatcgtaatccttgacgaaccatcatcgggattggacattaactcgcgtcgtgagctgtgggacatcctacttaatctacgcaaggagaaggccgttctggtcaccacgcactacatggaggaggccgaggtccttggggataccatctgcatattggccaatggaaaactgcagagcatcgggagtcctttggaattaaaacgaaaatcgggaattggttatcgtctcaaattagagatcaacgattttacatcaagagaagtggaaatcatggaaataatccatcactttgtgccaacagccagagtcttggtaagtcattaataaatgaactttatataaggcgtgtgcataatatcctttaaacgttgaacagaatgtggtgaatcctactgtgtatatctgcctgccgtatgcctataaaaattgtttcgcacaaatgctttataggctggagactgaatcaaaggaactgggcatacatacaatttccatgaccgacacttccctggaggatgttttcctaaggtagggattggaagatacattgtttattgtttttgctttaatatcttatgtggtgttttagatgcgcaggcgaacaggatcaagtggatacccccgatggttcgcgcaatgatgcgccgctactggcacactacaaaagactccaagaccatccccctcatcgcggactttttcaactttggatggctgtgttttacaaaaagtggacctttatttccaatgaatggttatatactctgataatggtaagttgttagcaatttgtaggactttgctctgttgtataaacggcgaaaacaactaaaactaaaacgaactaaaaactttttgtgctcccctctcgctagctgtgcattccctttgtatgcgtattcggggctatactggtgatgcacgccatgtccttggtggagaacgaagaggctctgccgctgaagctcagccagatgggcagtggcgttatatacgttcacaatccaacgggccatcacgcccatttggagcagcagctgcgtcaacagatcgagctgaatggaatcacagcgaaaacaatgcacctgcgtgggagtaatgatgtgaaaaatggtgagtatgcgacgttgtgctaaacattttaatggctctatcaatacatgtgttctctagaatcccttgacttacaacgcgacaacttggctgatttcttggagcaggtgattggcattattgacatgtacggaggtgggcgtggcacctccgaatacgcccaccattgagattttttactcaggcaatcgctaccacagctctgtggagcttatcaacctggtggactcggcaatgctgaagctagggcgtccagagtctgaaattgatacgacttacgtgccaattcgtcgatttgttagcgacataagtccatcgcgcctcgaatactatgcggtcatcgtgccgatcggcatgttcttcttcatgttctatttcatctcattgccgtttcgggaatatgccaatggattcaaaca

SEQ ID NO: 16649 - DNA, 987 bp, DROSOPHILA
cccaagacttacatgaaacgacaacgcaacgaatacacgacgacaccgcgcggcactcatgctatcataatcactgagttgtgcaagaagttccagacaagcaagcgcgatacgctaatttcggacaacttgaacatgacgatcaacaacaaggagattactgtcctgctgggccacaatggagctggaaaaacaaccatgatgaacatgataatgggattggtaccaaaggattcgggcaagataattgtgtgcagtgagcgcgatgtggcctcctatcgccacctgattggattctgtccgcagcacagcgttttcatgagctacatgacatgtcaccagcacttggagttctttgcccagctgcggggagcttgccgatccgatgcacgcgattgggcagatgagaaacttaagaagctgggacttagcgataagcgaaacgaattcggcaagaatttgtctggaggcatgaagaggcgtttatcactgggtatcgccattgccggtaacaccaaaatcgtaatccttgacgaaccatcatcgggattggacattaactcgcgtcgtgagctgtgggacatcctacttaatctacgcaaggagaaggccgttctggtcaccacgcactacatggaggaggccgaggtccttggggataccatctgcatattggccaatggaaaactgcagagcatcgggagtcctttggaattaaaacgaaaatcgggaattggttatcgtctcaaattagagatcaacgattttacatcaagagaagtggaaatcatggaaataatccatcactttgtgccaacagccagagtcttgaatgtggtgaatcctactgtgtatatctgcctgccgtatgcctataaaaattgtttcgcacaaatgctttataggctggagactgaatcaaaggaactgggcatacatacaatttccatgaccgacacttccctggaggatgttttcctaaggtag

SEQ ID NO: 16650 - protein, 324 aa, DROSOPHILA
MKRQRNEYTTTPRGTHAIIITELCKKFQTSKRDTLISDNLNMTINNKEITVLLGHNGAGKTTMMNMIMGLVPKDSGKIIVCSERDVASYRHLIGFCPQHSVFMSYMTCHQHLEFFAQLRGACRSDARDWADEKLKKLGLSDKRNEFGKNLSGGMKRRLSLGIAIAGNTKIVILDEPSSGLDINSRRELWDILLNLRKEKAVLVTTHYMEEAEVLGDTICILANGKLQSIGSPLELKRKSGIGYRLKLEINDFTSREVEIMEIIHHFVPTARVLNVVNPTVYICLPYAYKNCFAQMLYRLETESKELGIHTISMTDTSLEDVFLR

SEQ ID NO: 16651 - DNA, 2526 bp, DROSOPHILA
cactacgtggactgtcgtccacagtgatatgtttgtttctggcatggaatcgctttggattatctagtcaattagtagctgttcgcattcgtaaataacatgatatgcaaatttcaagctaaattaaaatgtataacagaatattattaaacgtctatatcaattccgctccatttcacagtgaattgtgtgtcgacatgtatctgtgaagtcttgtttaaccttagatattcattatttgagcttctatttttacaatcttcacgtaagtcatgtgaactaatctaatatacgcagtttgtaatctctgtcaaatgaacaacttcttcatttgaaatataatcaatttgattattgaactttccaatttttaaacgcgagggagatcgaatttatttgtgaacccatatatttatatttactttttccatataaccatctggaagttttcgaagaatacagcccatgtagattagtttgataaacaaaagctgtatatcaaagggtttggaagttgtgggtgggtgtctgacggaataaaacagaaataaaatcaattcgaaattatgatataaaaatttccttcgctaatccatggacacggtgtcaacaagtttgtctcaccacattggacttggcttcatgcgacacataaaccaacttgttgaatcttattgcacgcctttggagcacacttttgcccgatttaaactggttttatgtctcatattttcatcaattagtgaacttaagcaaaccatacggctatcgaatatgtgaattataattaagccgaagcagtgagtccactaaatgttttttcgagcgcttcaattaactttttgcggcaagaccaggggcaagggattagcggatgctatgcacccacttccaacgcgggggaagcacatactgcgataattattgtttagcccagcatgtgccatgtgatgacgacgttgtctgcttctggttagctggctaggagcagtcattctttattgagcgagtagtgccaatggcaaaaaatgacaattgaaactcaaccgaccgccaaaacgattacgcgagtcaagcccgcgtctactgccgtccatagacgttctcatcggtataggaaatgtagaggaagtagtccttgtcgaagtgctcctggtacagtgcacccatggtggccgatgtcggtgggatcacattgtttacgaagaagaagagggcgtcgtcgggacgcagattgatacgcttgcggatgagaaagtagaactggcccactgtcaggtccgccggcaccaggtacttcttcttgtccagctccgcgtaacgcgtcttcggcgccttttccacgatgacgggcacacggtccggatacttgcgccggatcttgtcgccttcgttgcggcgcttgtcgaacgagtggtccttcttgtactggtagttcatatccatctgggcggactggaatacggttcgaatcgaaacggagcgaaaaatgggttttcgttttggatttggtacgaaggtcttatgtagctgccggcctgagttgctgggaactatgtatgatttatcacctttactgcacagatagctttggcagatagaaaagtgcctgctcttctcggatttgaatgggaaatgggagagggaaaatgtgattgtaatcaggtttagtattcattcctattcatggaaaagtatatctatacctttaaccaatcaggaacatacgaaatttgttggaaattctaaattaaagaagaactacttatatatgagtgccaaatttccctaggggctttcatggtgcttacacacatatttcttgtatcgttttcatgcatcgctccaattaattaatttgaagtatcccattaccgtttaaactgttaattgtaattgtgtccttggaatcgcactacgaatgtgctgtgcaggactcctcgggctagaaactttccattccatacttcactggcgcatttattttatatattttcattgatttaattaaatattttgtaatacgacaaaaactatataaatccctgcagttggcaccgctctatgaacctttttttgcaggccgccccaaggcgacaattggcccaaagacgttacaatcaaggctcccaaggcgctgaccacaagggagctcaacaagtgtatgtgctgggggcgtacaactgcgaaagcttttacctgtaccgaccgcaacggcaacaatgcacgcaacacacgcaaagctggagcagatgtgttgttgggctccgtcgtcgctggctgctcgtcgctcggacagcgctggagctctcattccgccatagctgctggagctgctcggttgttcgcgttcggtgcctcggcagttcagtttgtcgttctacttcacagtactactacttggagcagttcgtgcatcgctggtttccggttgtggcctgggcgtaatcccttgcaacaggtgcacttcagttcggacgaagacaactgcaaaatacctgggatatttacgcttccggtgagcaa

SEQ ID NO: 16652 - DNA, 526 bp, DROSOPHILA
ataagaccttcgtaccaaatccaaaacgaaaacccatttttcgctccgtttcgattcgaaccgtattccagtccgcccagatggatatgaactaccagtacaagaaggaccactcgttcgacaagcgccgcaacgaaggcgacaagatccggcgcaagtatccggaccgtgtgcccgtcatcgtggaaaaggcgccgaagacgcgttacgcggagctggacaagaagaagtacctggtgccggcggacctgacagtgggccagttctactttctcatccgcaagcgtatcaatctgcgtcccgacgacgccctcttcttcttcgtaaacaatgtgatcccaccgacatcggccaccatgggtgcactgtaccaggagcacttcgacaaggactacttcctctacatttcctataccgatgagaacgtctatggacggcagtagacgcgggcttgactcgcgtaatcgttttggcggtcggttgagtttcaattgtcattttttgccattggcactactcgctcaat

SEQ ID NO: 16653 - protein, 120 aa, DROSOPHILA
MDMNYQYKKDHSFDKRRNEGDKIRRKYPDRVPVIVEKAPKTRYAELDKKKYLVPADLTVGQFYFLIRKRINLRPDDALFFFVNNVIPPTSATMGALYQEHFDKDYFLYISYTDENVYGRQ

SEQ ID NO: 16654 - DNA, 22967 bp, DROSOPHILA
gtgtcctttggcaacaagtgtggtgagccgggatatccaggtatgttgcgctacagaaacattactttaaagagcatttactaatttttatgcccatccaggtgtctatactcgagtcactgaataccttgactggatacgcgatcacacgagggattaatcgcattcccgttccaccgatccaccttagcagtaactatagcctaggtttaggtacgcactagtctatgtactcttaatgaacttcccctcctgatcaatggagtgtactatttattaaccgcatcccatcgccatgatgattggcatttgttgactaaattaatatatatattatatttaattttgataaataaaatgtgtaaacaaaatatagagtgtttcaagacaccggaaattcgtagatataatattttggtatttcaagctgctgcttacttactaattactgtgacttactaattaactgtgtcttgctaactagtaatacatcctattagcagctagcattccctagcaagattttcttaaatgatagcctgaatttatatggtatatggtgattttaaaatcattttccatatatggtcatatgctctgcagcagtaggagaaaattcgctgtattgtagtggttgaaatcgtaaaatgatcttacgcaatcaaaagccaatgatccaaagctaattgactttggataaaacaatagtaatcgtttcagtttatatgaatcgaagcgtgggagcggcaaacaattatttacagtttgtaacttttggaattacgagtgtcaatgaaataaagtggggggatttaattctataatttcgatagctatgcccctttgttcagacattctggaaactatcaatggggaagtgactaaatgatagataagtttcattcattattatttatcacttactgggaactacttggtaaacaaacgtgagcaattgcataaggcttttttctcgatgccggttctctcagttggcattaagctttcacagctgacggacgcgaattgttccctccaaccggcgagttctttaagtttctcgggaatgtttgtattatctcaaaaaattgactacatcaacgaattctaagtggtataattacagtttgtgcttgctgtgaagatttacagctcgaataaatcataatattgtacaattaacgctgataatcacgaatttgacattgctaccacattcggtgcgtggactctgaaagctctgagtgttttgtttatgcaaagcttttttggactatcgcgtggtaagtagccgaaagagaaagctctcttatacggaagatgaagagtgtgattcatgaaaatgtataagaacgcgggtccaaaaagtcaagggagttctagtgaaatgaaaagttccaaaggttttgaaatcgttttattttctcgttcgtataattattgggtgtcgatctttgttgggcagtgtaaagcacaaactttgagcttcatcatacatatcatatgtaaagccgggacgaaagcttatgattctgttaagtgtccgcccaagataacatttctccagcccttcaaatcttcaaataaatacggcttaaggcgagcaaatttgtaaatcaaatgatttgttaaataaacattatatgtattttatcatgccaggttagaacacattgtgctgatgcaaataaaattccaattaaacgcccctgaatgggaagatgacgcatctttaatgtgaatattatgttaaatttaatattatcgcaaaataactataataatgaaataaaaaaagacaaaaaactatttcgactgttcccgcccgggttcgaaccggggaccttgtgcgtgtgaagcacacgtgataaccgctacactacggaaactcttaagagatggccggttaaggccagccagaggcaaaccaatgaaaatggaattatgtttctatttttagcctgacgtgattagtttatctcaatgtttcaggtaataaaaattgaaaagatttacggagaaagttatagtacgtttatgagaagaaaggttaaatacctttggatcgtgagtttgtgccatcttagaataacattggccccggcttggcagcaacaatgaaaacccatttcttcgccttgtcattccgctcttaattagcctttatttgtcccctcttcacggagccccacaattggccggcatttgtgcttgtgaatagaagggcctgggaaaggggcaaggtaaggcaaggcattcatggcatgcctgaaacacgctgaccagattaccaaccagagcgccaaggggccaggagcgaagcacactgtgggtggggtgctccgatggcccacctttaaataaattcgagcacgctgatccttgattaaaattcctattgtctgctttggtcctgccaagatttcctcccctttcaggctttcaggactccgcttttgtgcggcgccgtgaacgtaattaatatgcaggccagaacggactctaactgctctctggcactcgttataattacgcatttaaattggcacaaaggttgaggccagacataacacacttggcaaaataaagttatttttataactcatttacttgttagctaattatgtttgatttataaacgcaaattaaatatgcttttttgtttttaaatagtatttttatcggaaaaactttcaagtattcaatggtgttttctctcagtgtcagtaaatccaagagcttagccaagaagcgtccacaaggaagcgccttcaactcttgcgttgaatatgtatgtgcgccagtatatgtgtgcgtgtgtgtgtgtatgtgttatgagttggtgttggtgcacggccccataaatttgggtcaatgggaaaaacgtcagaattgagtaattacaacataattttcaattttgcagtttacgttgtaaattaatttgcggtcgacattggcgaagcagcctccgatcattccatcccctttttgcctcagcttaggctgattcgtgacggcttttcgggtggggttctttgggttccgagctccggcctttgaattgggatcgggattgggctttggtgtgggtttgggggattgcacaacaattaaagcaacaattactggacaaaccggacggcagacgccggacttagcgttgttgtgctgcgccatagtacatggaaaatgtacatatactgttgtctttgccacacgggtcgccgttcgccggttgggggtcatctgtttgttgtgcataattaatttgcagtcattcaggctgcctcgcgtgctgatacccagtagctaaaaggccaatcagttcggcatactgaattgtcacgcaggttcactgctttggaggttcatttcaaaaatctattgtaaattcaattggcaaggaaagcattagatagctactgaaagtcaatcattagcggcatttaattatttgaacagcatatttaaaagaaagctagttatggcggaatttaaaattatcttactcaatttctccaaatgtcttctttgggtttaagatcctgtttcaaattttttgagcctgattaaaaagatttcatctatttgaacatgttttgtgtccttatacctaaatgaaaaacgcgtttaaaggtgtcctttcgggaacttcgagtaacagaagatcgactttgttttcctgttctttggcagtagtacttgtatttttaagagtgacaaaatagtttcctcatctccattatcagcagacccaggggtgttctgctctctgcacaaaactgtttacgattttacagctgaatggattttaattgaaagacacgctagtgtcaatggcactcgacgaggggagccaaaggggacttggggatgggacttttgggatatgtgtacggttttcccagggtagggcagttgccagcagctgtgacaagatttcggatcatgtgggtggcgcccggcttatgcagagtcgagcacagtcgagtcgcccgttgcaataaaaaattgacccgaaaatgtgtaacaaatgttgtgacatattttcgcaacgtttgctaaggccctcgccaaaaaaaaaagaaaaaacacaaaacgattgcgaacccgctgccaatgatcctgaaaagcgcaagctgaaagagtctctgaaaggatgctctgaatgggtttttcccagtttcgggtgaaaatcggtttcgggcaacatttgttttggcccacatataacacaaagtgtgtacaaaaatgaatatgaaagagggggtcgtcgggcttgtcctggaactctgtaactgtaaatgtaactgcagcatggcatgaacttaatctgctgccgattgttttccttgcttttccaacagtaggcggtgggtggtgttcagtgggcggcgggcggttttgttgctcaatttgtactgagggactatggagcgggctacttggggcgacgaagacccaaatacggcgcgttttcaatattgcggcaacaattttcatggattttacgctttctttgtttttgctttgtttttggcttgtttgtatttggcaactcggtaataatgaaaccagctattgggaacagctccggtgggtggtgggtggtgggtggtgcttggtgggcggtgggtgtgttcatttaattgaaaacaaggcgtggcagcggcagcgtcggcagcacttaaaccgaaattgagaacagatggaatggcaagcgaaaaacttacaataattgcccacaacagtttgaaattgaacgaagccactcaaatggactgaagtcccggcagtttcggttaactgggatgattaccatcgacggcagataaagtttccgcagccacttaatgggttatttatggagtttcccttccaccggttgagtgctaaaaaactaattaaattatacaatcaaaattttcttcatatttcatggaaaaaacatttgcactttgcaggggaaaatgaaggaaggaaaaagttctcgacttttgcagggtttggttataaaagaaatacgagtagtccaacctgtttgggattccatccgctttcttagttgtacactaattagtcgcctttttcaaaaaggtaactctgaacttttattaaggatagcacagctctttcgtaatgttttaagtctataagattgactatggcttccgtccttctgctttactattttacatttttatggctggtcattagggaatatgtatcattttttttaacgatttatttggattgtggatccatttggattttctttacttttctgcagcatcttttgatattctttcttcaaggctcaattcctcatccctaatagtatacagcaatataacgtgatacacaattttattgccattcgtaaaccgattggcacaacaatgaaagagggaaatatctcaaattttcaaagagaaatatgcaccacaaatcacatttccataatatatgtcctgtctatcctggctgcggacatgtgcgctgtattatttatatcaatttgaatggtatacaaatttgtgtggcaaacagctcgtgactataaacagagagtgtaacctgatacgttgtttgttgcagtcactcgccgatttcttttgtgcaacacataacacatacatattttcctccattatgtgtggtgttggctgcttgtgtgttgtttggacgccatggcgaccttttctttagatattcgcacacccagctatctttgtgtgtggccaaacactcacacacacatacattgggaggaaggacacatgaccgtgggaagtggacaagacaaacagacgccgccccttccatgtgagtgggtggctgggatgttgggtgggcaaacagtcggatccactgcagcctagggctccgtatgaacgcatttcccatcaagtaccaccagccaccccatccacctgctccgaatcctcctgcccagttgcattatgctgaatccgagggactacaatctctttttcgcctcgccactgagggcagtgcaaaaaccaataagtcaaatgaccgaaaaggcttaacagaccatgaaaaaaggaaaaaggtaagccaacgggggggttgggtggaaaggccaacaacaataatcggaaaatcaggaaaatatcacaaaaagcgttggcaggaaatcgatgggcaaagaaaaaatgaatagtgaacgagcgaattaagacgataaataaacaataatgttccttgagtcgatgcacggtgtgggtgtggtattttaaaagagtttctcaaaagaaaatctctaaagaattcttaaagaatttcgttatccaatgaagatttagttaaaatactttaagaagtaatttaataaaatatgaaaatacaatgccctactaaaaagccatattcaattgcaatagcgagatccatttcaaaaatagtaagcgaaatgcacctttgtgccttaaattatagttcttccccttgccagctcctttattacgagctgcaattttctcagcacattccagtcgagtttttattagctaccatattttatggaattctttgaacagaatagaaaaccattacagcactcacttgattcctgaattacctttgactattgcagattgcattgaaaagctcttagactcttaaaccaaaaacaaatctcattgttgactgtttgctgccgtgattgccgcataagagccaagatctacgagccagggactccgacttggggtgggtgattggggattggaaaccggattctggggaccaactgggggtccaaggaaaccgggtagtcggtggcagccggcgatgtcccatttgtgccaagtgtgtgacaataaaatgtttactgatagcaataccggcagagcaaaaagaagcccggctaggaacaaaccggtaaagcaattgaatgtggcacaaagtgctctagtgggtgatggcggattggctagggactggaattccgtgctgggattggggctgggatgggtttgggattggtgccatctattaggaaaggttgctaggcaaaaaaggcgagccgtcgactattataaataataaatgctgactggtcagcaaaagccctgcgactagcagttgaactgtcctttttttcctccttccactggctaagaagggcacaaataaaaaaaaaagtcctaaggaaagacaaaaacaatttgccggttcctcacactctctccatcttcgaatttcggcctgctccgatgcttttttccagctcacgcgccctcggcccataaatctcggccaagagtgaaataaagctaagcgtagctcctgacgtcggtgtcctggcacctggcaaattgatttgttggtttatttggaatgccggagaaaaggcgatggtgcccaaaggagccacgtaaattcaggcgccgcctgtttgtgtcataaaatacgaggacataagatgaactgagcctgtagtgaagtgtcccggtccaagggctcgaaaatgacattacgatgaagttaagcagccgtaggcgcacataaagtaattttcaattgggaaattgtgccgctccttggtgtccttgatcgattaaatccaacgtccggccgaccgcttaatgcctttaatttaaatcaatcaatcaatcaaccagctgcttccacttgaacgaagattgtccgcccccgatctcttattattattttagtttttcccccaaatttccccgattcgcccaaaacgacttagtttgatgggcggctggagaaggttatttttggggattctgatttaaagcagcttaaccgtttgcctcaatgaccattctccctcagccttttgtcttgctaagctacttaatttatctggcccaaatcgctgagaaaggtctggagaccggacctatctgcctatagctatctagtttttccaccctgcgtttgggttaagacaatttaaagtggcccgaaattgaaatcaaatcaaatcaatgccgctcatcccgctctgcggccaaagttctctggatcctggctagtgacctgaattgaatgctcatttgaatgcgtgtgcacaacagggtgtacttatctccttgggtgtgcgttctacaatgcgatttctgcctcggtttatataatgcctggaaaggactttctctagccctccactaatatatcctgcagagttttaaagagcagacatattatgtagaactatggtggtatgtcattatggtgcagaatatagtttgaatttatctttaatttgcatattcgtagttcattttcctggtaacaaattctaaacaacactcactgcatcctttggctcatgtgcatggttcacgaccttttctagaaaggccaattgccacggaaattttatttctggttgccatattggaagtgaattactcgaaatttcagtcactttgcggtgaccttttcaggtttctggaatggccttgaataaattgcgagttgaatgcatgacctgcatttgccatagaaacaggggacgcctccaaccaatccttttgcaatttgcctaacaatctttcaatatttcatgacgcaatcagtaacgtaagctaacaacacgtgcccaggcaaactttatagatacagtagaacttggctaaatattgccaataaaaaataaaaaaataaaaaaatttttattgaaacattttaaagactattacgatcaagtggaagtaatatgttacgaactgatttgtttcgtttttttttactttcttacaaagtcaataagactttaagcacgaatgagttttccgaaataggtcaactggaaaaccctttttaaggagtgcaaaggcaattatctaaaaaaaaaaaaggtatatgaaaactttaaactattaaagttccactgtttttggagctatgtgggatcttaacccctcgatggctgccattttgcgtgcatttagctgcagttcgtttcgcttgcatatttggccaataaattgagcttcccgggacaaactggcgaaactgaaaggatgaaaggcagtagctgcggctgcaactgccagatactatcttcaatcgcttctgcggctgcctctgcattgctatcggaatgtcaaagttcaatgtgcaatttaaatgcaacaccctgcaattggctttgccttttgtccgctgcaggtggagaaacactaaggcccagagcgcctcctcccaaaatagaaggaactgcaaacaatttgtatttaaattcgacgctgcatcagcagcagcggcagcaatgcggattgggagattctagaggacggagcctgcggctgtttttaattggcaaataaaaatgcggagacgagaaacgagaaattttgcatatgaatgcagaatgccagagattcaaaattgaaatttatgtgaaaaaatcaacgaaaaaagcggagtttgccatagaaaggaaaataaactagggcctgggcaaacacacagcccagccagcacaaggaccaacacacacacacacacacacacacagagacacgcacacatacacgtacgcatacacacgtatgcatggcaagcaggaagcatcgattattcaaaacatccgcaattgggagcgcttatcaacacaggcgtcatctatctcagcgtacgccatctatgcgcagtttgtcaaaaatattttttccaccgctttttagagccggaatttattaagccacggacaggtcgtaaaagtgtgagccaggcacattggccaaaaagttattggctttcgaaaaaatattcgatttttaatatgttctggaatttggggattactggagaatttttaaagtgatttgtagacaagcttattaaacgatcagtattatgtttaatggattgtttccaatatatattcatgactcctatccttttatttaaagttttgcaagtagatatagtaattgaaagttgagagctgatttatgagctgtaagttatagaaattaaaattctgaaaaaactacatatgtaggagaaactaatttaaactacttatgtattggctctcagttgtaaagaattccagtgaaacactgcgtttttaaaattctgaatcgactgcaatcagtcgaaagcagttcaattaatttgtatgtagggcaccctccaattcagcttccgttgcgttcgaccctttttatccctcgctcgtttgatgagttttagtgtctattgtcgccacacacatacacatgcacgagtcattctcccttactcacacatacatacagcatgggacattcacacattgataggtatcctgcgcctccttcggctcattcatatgcatgacgatgtgcccatttttgtggcttgtcattaatgcataaaaaatgctaatgggccggcgtttatgtcaacgctttggccaaaaaggtgcaaactgttgttgtcctgtagttgttatccttgctgttggcgctggcattgttgttgtcgttgctggagttgttggccaaatgtttgtcgtaatgccttttaaatgaagttgtgcgccatttgccatttgaagtttgctgcgactgttttgtccgtgtttttggccgtttgcaatgatggccaccaaattgagttggctatgcggtgagtggtttctcctttcttttttttttttgtgctatcccaaaatggaacccctatgccatctggctcctccatcgttttgtttcggggataagctgcaatgtcagattaggatgaggatgaggatgtggatgtggtgttcatggcctttgagcagagctggtgtaatgccaaaagggttcttatgggtaattgtgtgtggatggcttccatattaacccggccgaggtggccgagagtgcggcaaagtgtttatcactggatattggatggtcgatgggccaaggagggtcactttcccctggggaagccgtagtcgagtgcgatttcaatgaagattaaaataaaatcgggcaaaggttgcgtgcgtttgcagttagctgttgaaaacttaatgaaactctgtgaacttcaattgccatttgacattcctgtggcgacctttggctttcaatagttcccataaggccaatgcgggctttttgtctaaatagtttcgataaaactttcaatttaacgttttcaattacaaattgttaccaatacatttagatttatgcaatttgaactataaatagagggttgctgaaaagtatctcttaaaatattcaggatctgggaaatactttaccatttaaatactatctttattagctggatcttaacttaacttaagttgcaaaacaccagcaaagggcatatctaaaaatgtatctgcgagactactttcctttttgcaaaccattttcttcaaatccattagttggccaggagtagagtgctccatttggcactattgcaccactgtgccctcctcgccttcgagaatcaacgatccgaggcggcccattaacgctcctccatatcttctccatctgggcatgcagatgtgcctgtgtgcgtgcctgtttgtcttggtgttggcagtggtagtggtagtggtagtggcattggtgtgcgtattggtatggatattggtgggggcacggcatagtggtcctggtgtttgcaaagccacgtattcgcgttttaatgttatctgggcgtcgacatcagcggcgcgtaacgccaacatttttcagcccagccaatgcgccaaaaacagtttgcaggccaaaaagcaaaagcagcaggcattcgaggccaaaacaaactgggaccgggaggagctgagtggagtggagttcagttcattgcgttattgcagtgccgggggtcaaagtgggcggccaggatgacgggcgggggttttgcggatcggaggccgcaccagggaccgcagtcaaaatggcaatttatcattttgtatttaagcgcggttcaggtgagagagaaagagaagaaggtgctagagttgctgggaacggaaaaccgaacgaaaaaccaaaccaaactgaaccgaaccaactgaaatgaaatgaaagacggcatgtgggccacgtatttttagatactaacaagtgataaaagccaaccacgtgccacccatcgcacacacacacacacacacacacacacacacacacacacacacccgtgcatggttgggtggatggattgatggaaggctgtgatgactgactgacgaactgaggaactgactgacacctactgcaggcaaaggctgactcggcattccttaactgcgtatccatcaatgtcgtagcctgtcgtccttctgatcctgccgccgctaccatccacatcgctgctcctgctgcttctgcttttccggctgctcctttccaaattgctgttgctgacgtgcctgcattaaacctatactagaagaaccaggcgccagaagacagcaccaaaaattgaaagccttttataggcagcacacatagaaggcccagccctatctgcacttggaaaaaaaatctataaaaatccaacgatattgtataatgccattttcttgaaaatcaaacacaaaataatgtattaatgttgaaaatgtagtcatggttttcctgccaatttgttaatagacttgaatagacttatggtctaacgaactaattcagattaagtatatcataaaaaacatgtatttgaaagatatgccctttgattgtgttttctgacttttagacttttagaaaagcatgtattttcgagcatgttgaagttcggtataggcaattcgctttaataccaatttaccgctgcctgatttaccccgtatcccgtctccatccccagacccattctccattttccatcatctgatcctacccaattcaccccatccagagccagccgagcagaagctgctaaattttttggcaattcaattgacgagccccaaaggcgtttgctcttaaatgctccacttggccctgggttccatgcttcctggcttcctgtgtctgtctaccgcgtctgccgcgcctgctcatcgggtcctgctgcttgagctgtggcccgggatgcgagatgcgtggtttattagctgatcccatcgccgtgacaagctacttttgacacgcccactgccgaaacaacaaatacaggaagtcttaggcggtaatttacttttcagcgctttgcaggcaaattatgcaagactttcgcccactctgccactttcccgagcaccgtaactctgctccgccggatggagcatccgcattcgcatccacatccgcttttcctctgccagctgacttatggcggcagcttaaagtttccccactttttcggtgttcgcggagagcattagaagttttcaagtgcctcgcggattctttggcattgcagggcgtcggaagttgctatgaaaattgataaaaacaagttgatgcaaagtcgcacctttgtgattagcacttaagttcgatttgatataactggttattcttactttccatgaaatccttcttcagtttttacgttattgttttaggtcatgttacacttatctgttaaggcttactttcttattttatatagaataaaaaatgatttattactgtatttgctcaagtgcacttgtggaacaccagcaccccccatccaaggtgtttttaaaagcgcctaaaaaaacgttttcaccacaagctcaaactgcttaaccttcagagctctgaagtatcacgcagttgacggcaattcatggccatcaaaatctattgggggcaaacttgaaatctgttccgtggcacaactgaagttttaacccccgaaaagtgccacctggaaaatgccaccccccattgtcacctttggcagtcgaactcataatcgggacacgtgctggcttcgttatttctctcttattcttggctgcttggctggctttcatttgcggaactttccttcgtccttccgcgtcttttcaaattgtcaaagttttttcttcagcttttttggccggcttggtttggtttggtttggtttgtttcggtttggttggttggtggggggctaactactttgccgtttttatggatgctctttatttagtcaatgactttgacgtcgacaactttaatcgaaagcaatctggtggagagtccatgaggtgaggtgtgcgcacgcgtttcgcttaatgccgcgtaaattgtttcgcagccaaagtttgcacatttcgcgttatccgccatttacatattaacccgaaacccagaagcccgaaacccggacccaaggctcaaaagcccacaagacccagggatccccgggctcccaggagcgctgccgtccaaaaatagttttcaattagtgtgtttcggggcgcctctgactgagcagcggcttcggattgtattttcctatggaaagtggtgagggggcgggggcgggtggttaaggttgggaaatgccgggagttgtacttaagtttatttggacaaactttctgccgagctcagcgaaattatgcgcatttttatcgctcgccggcattttgttcatgtttatgtttgtttatctctggccaaaagttattggccaaatgaatccgcaaacttgttattgtatctggctatccatctttggatggcaatttaaagcgatattcggcgatcactgacagcctgccttagacttgccccaccacataaatcatgggcatattttttattttattgccgccttttgtaccttgtgcagccaacatattgtgcataaatctttaatattaagtatacacacatacattgccgtccaaatttaaatttatcgcctgctgcgcattagttgtactagaaaaaggaaggatggccaaatggcacaagctggagcaggacacaatgttgggagcttaacttgggagctctggatgaaataggactaaaagttaaatggaaatctatggctttgtggcttaccgggcgaatggaaaaggaatgcggcaaaggggtttaggctttgggaaaatggaaatgttataagctgcagcaggtaaatgtatgcaacgaaaggaggttttttttttttttttttgtaaaacgaaactcaaatagaagaaatccaagaagcgagacttaaaaactaatatctcaaaaaggcaagtgtaacaaaggcgtaggaaaggagggagtgggagcgggaagcgattgcaaatgccgagttaccttgttaacttagatgaaaagttgacactcgagcgtggaaaatcagtcagaaatgccaaagcagccaacgcaattggccttgttagcagatggcaattcaagagctccgtgcgcaactgtacctcggtcctttggcctccgtaaactttcctttcttcggatccttcaacttcttccacatatttgacgcttttcaaaacctctcacatatccacaacaatcaactccgattccctgacgttctgagggcccgcatttcgaggctaaatgtcgaaaactttcatattcgcctcccggtgtcccgccattaactttgccccaaaaatccggtgagaagtaatggtgaacagcaggaaatcactgcacatacagggaaagaaataatggcaattcgatagcactgcatagttaaatattgcataaatgtaagaatcgaaaaggaaaaatgcgaaataaaatgggaatttatagacgttaaatttaatacacattgatttatattttagacgcaacaaatactaatgcgaacttttacttgatgcaaaatgactgtgtaaactattgcaaaaagtgatatttattcgtttaaaagctcaatttcagataaatattttttttttgcacattaccttgaatttgtgtcagaacatgttaacgcgtaaatgaattaccacctggattattttcgatgtctaggtgggtaaatcgatattaatttgtatcaatttgcagcctttaaaatgtgcacatattacgttaccgttgagtgcaaatataaattaaattacttaaacaatgcccgtctctctttaaattttgtacacacaacatggagaggacagataaatctgcttcagtgtataatgcgcacttccttgattaggaaaaacgccaggtaatcgtctgcgggcgccgccacaaaagcttggatggatatggatggttggttgagtgggcggtgtggcagggtaaaagtggcaggtgggaagtgggaggggcgcagcccgtacactgtgaaaatcaaataaataaaataaaccacaagatgacgtcgtcgccatgacaatgccccggctggctggcctggcctggcctggccaaaaagctgtggaatcgtggggcgggcggacgggcgtttctgttgtttattcgataaaactatgggaaggcaagcggcgcttggccatcgaaacgagcagaaaaggaaatcagccagcgaatcagccagtttttcagtaactggcaagcgttcgagctgagcgggctaagccgggcccagagtgacaacaacaacaacgtgagcgcagagagttctgtgagtgggcggtggttggctgggtggctgggtggcacttgcactcactctgttgacgaaaaatagcttttccacccaacagtgtttacgtgtgtggccctgtgtgtgcggttgttattattgatggcttcactttaacttgcagctggctgcgggagcttcattaagtgagagttcgctgctggattcgttggctttgtttggacgttggcaacatcgtcgccgttatggattcacctacaccgccaattgtcatcgaagattcaaacggatcagcaatggacgcctgtttcacggcattcgacaaggacaggtgagttgctagaagcgaaatagaagccaaggcatttcggactaattgaaatacgtcagtaatcaactatttataaattaatcctgtaattatataatctcaaattggaacgcagatcattttgttgttttttgttttaacattttcctttcaaaattatataattacctttataattgtgtatgggtttgctgaacactggcatcacaagccgcaaagtagattatatggcaaaacaaataaacaaataacaaaactcgactgaaatatacatatattcgacgcatattcacggtcgtttgaaataaatgaaccattaaaatgttttagttcccgtccggcaaatggaaaattaatttattttataacagactgtccaacgtaaaatggcgtgcattatttctaattgacattttgagtctttttatatgggacatttttagagtgaatcaataaaatgtgtctagttaaaatacgctctgtcacttcgatttttatttcgactttggaaaagccaatttataagttcgtatgatagagcggattggctgacgtcgagtttttgataattggataacctttaagtgaattaaaaccttaacagaaaataataaaacaaatatatccgattcttttttgaaaaactgtcgattttatatagcagagaagtttacaaataatatataatattacaaactttgttgtttaatttatgactaaaaacttgagtgagtcaactttttaagcacatttaagtcaaacccaattggtaatttattcgactgagtctcttatatttcctatgcctctgaactcttaaagatctttcacttatcatcttacatgagttttcccgcttttctatcctatttttttcccagtgatgaccgcctgagtcttgccgaattttcgataatctgtcgagctctgttccgcaacgacaagggacacatctacgatgtgccccccgagcgccttgagcagatattcgccgtcttcgatacgaatggcgatggcttcatcgaccgggaggagtttaaattctgttggaaccagtggataaaaacggtgagccagagtcaagagaatttgccacgtccttgttgaattttttttctcgcactatttatgaattcttgttttgcggttaacgttttgcgttattcagtgattcatatccggggactcgtaaaatcataaaaaaatgtgataataaaatatttgtcaacatgtatcgcaccaccagcacgactcacccacacacatgaagttaaaatttgcaatcaaagtggccgactactcggattgtgtgtgtgtaattcaatcctgatcagtcgccgtcccaaggagttccgacggggatgaaatttgagggggatttaagggcttgggcagcggtaaaatgtcgcttacagcgaatgtcacacgtcatgggtctcgcagggatgctttcatcatcatttccattccgcatttcgtatttcgcgtaccatctccatctccattcccatttccatccgcatccgcatccccatttccattccatcatcatcatcatcatcattgtgctggcctgtcacaacgaagaagcagcaggcggcggcatatgcaaatgtgataatccgatgccgggactgcctcacatagatacacacacacacacacacacacaaacacacatgcacacagaggaacgaacacacactggcacagtggccagacaccgcacgtaaagagataaaaacgcgtgacaaataaaatgccacagaaaactgggaactggaagttgggaattatggaccaagttgcattcaagtcctctccgtcttccgccccagcatattcaaatagaaatgggcagaaaaaatttcaaataattttattgttgtagtctatgacttttgcacatctccatccgcatcacaactttgtttgccacagtcgctgccataaaattgcgtacgtgatggtaccaatttgcaaagacttctttatgtattgcaccacccggctttaagctacttgaagcttggcgaattttgattttcttcctttttatcgagtggaaatcaaagttcgacgagaaattttctctaaaaagtttggcctattgataaaacaatctgaataaaattttatgtgaaagtaaatgggagaaaatgagttgtttgcttgtttgggccaaaatccctgctagattcttcgtacgatggtgtttcctgtttcatttccacatttaagagttcttttagatttaggcaaagattagaaatatgttttaatcgttttcgtttcattggagagtaaagtttatccagaatttatattttatattttttttttagtaaactaatgttcattgacatttttcttaaattgtttttggcatttaaagtggatttatagagtgcggtgcacgtagcgaaaacgttataatacctgtaactgcctgaaacttctttaatacttaaatatttccacaatttataaagttttccatccttttctcggcggtcttcccgtcagacaaacttttaatgatgagtttccacctgatatacagaatacctttaagctgctttaagtttttaattttactatgctgttaggtaggacttatgaacacctgctaaagacctcctgcattttgttcatggttaaaaggtgttcagggcagagacattcgttttatttcgatttaatcatgtatcattttaccatttatattaggtatatttcgtagctttatgttatgtgatggtgaaccagcagtgtatttactttctttttgtccacccaccacacggaggcatcaactttgatgacctcctcttaacacagacgcatccccattacgtatacgcagtggtagcggcagccgatgtgttgccgttgcctgttgagtcctgccctccattgtcacgcgacaaattatttgggagcgagggaaagaataatcattttatttttgatatgccatttagccccgcccacagggaccgccccttccgctggcacacaccaaattgtgtaatattgtataaaaaatttattaacgtataaaaagcaaagcgaatgaaatcttccggcagctgatattgtaataacggcaacacttaaaaaaatgacagtccctaacgaaaccctacttacgcattcgcagtttttgcacgaagaatgaaataaagtcgagttggatggggactttagccgaaaaaaaaaacgtctgaaaaatgccgccccataaaattgacttttgtttgtatttccgcatgaattgcataaatggtaattttgcagtttaatgtttgtatgatgggcgggggcagggccagaaatcagaaagagaagcgcagcgcctaaaaaaaggaaaaacaacagacaagcccaaaaatttgcataataaacaaatcaactgatggacgaacgagtggaagggcgagggtttcggtttagcttagaattatgaggatgaaactttggcacacacacacagacgcaaattaaataaacgcataaatagaacattaacgccataaatcatttgcatcggtcgctaaatattttgcggctcctgcggctgtctgtttataaatacattcgtacatttataaatgtatatacatacatatcggtgtggacgggattgcacattgaaatcgattgaacttgcggaaacggaaatggaaatgaaagcaaatttatggaaataatacgaccgtggctccatcgaatgattgcgcgtgtccagaattcgtttgaatgtgaaaggtagtcgccgactgtctgtccattatttaccccaattttgatttacaagcataattcaatatgaggcgcgttttcgttttgatgtttttattgtgtttgcatttgcccgcccgaaagtgcgtaatttatgtgcctaaatgtgcagaaaatgttttttaaccaactgcacagagttcggttttccgtgttccaatgtggaaagtgcctcgagcgtgaaaagctgcggctttcacatttctgggagccgtgtttttgacgagggacaaagaccttgaggtgaagtttcagtttttgaggttcttgggtccctttgcttaaaatactaattgacaaaggtgaaaggacatatacaacgcagcgttttcctgataaactcgctggcctggcactttatttaatgcgaatctattccttttgtttgggcggcctcccgttgacattttcggccctttcaattgactgcgagaggcattcttttcaggtacaagtacataccgttttttttcatttcgggctcctttgttcgtaaatatttcatttctttaaactgctcttatttctcatataataaatttatggccacctcacctgctcgtttgctcctttgtggaaacgcacacatacgcagtagggagtgggcgttgggtttgggttgtgggcgtggtagtcatatatcatacaacgcatcatcatatagttcattgaaccccctggccataaagcagctcaaaaatcttcaacagctttaagtgtcttacaatgtctaccgttaatcttggcccccacttacaaacacacttacatctcacacactcagacacacacacacacacacaaacacacaggcagcgacacaaaagcagacagtgtcgtttataatgtcttcatttatggcacaaaatgtgggacatttttttgtgctcagttacgcaccaacaccgaaaaagacacggcgagtgctctatgtcttggcgggcagaagaattacagtgagtgccaaaagtcgcctcacaacttctctgctcaccgagcggaaaataatatcgtgctataaattttgctcagtttttcctgtgcttgccccgctcgattccaagcccaatttttccgagcttaatttttgctggtcgctggcttgctggattttcccctggcggtcgagccctgccgattccactgcttccaccgccgactgatgaaagtttaacgaccaaagttgacacgctgcggcgattatttagaaagttaatgacttataacatacccccgaaaaagtcaccggaaatgaacagcagcgaaggaggaaatcagagggagcgagggccggatgaccaaaaggagccagattcactgatttagtgaccagtctgagagttggttttagttgattggactttattgaaaaatgagtcgccatttcttaagctcttgaacagaatcagcgaaaaaatacgataaattacaggttaactagggccggccaatccggccgtcgtggcgcgaatgtaaatttggagaaaaaaggacgagaatctgcaatttgatttcctgtcagctgggtgaccagtgattgcggggaaatttttcaggttctttgcgtagttaaaatattatggcaataaatcaagtaatgatttttccaattcgcttaatgatcacgtaaagtaaagggtaactaactatatgtagtattatttgtataataattgtcacaatattttttatctggaatcttaaagtggaacgtttcaccgacattttagcctatttccgtagaaagtatttttcatttcatttattttattttggcattaaactgataagtctgtaaaaaggtgcaccacccatttccacacaaagtgtatatatatactcgtactagttacttgtgcagaaaccttaccaaactttagccttaatcgaaatcggctcagcaaaacaatttcccaccatccataagttcggtcggaattcaagacacctttaccccaatagcagcgtaagttctgggcgcttatttatagttagttttcacttcttttggcggctgcagctcccacctttctactcctcagcccggctgtctggcagccgcataaattgtataatgtaattttccagcaactgtcagccccagcccggctcagcccacaagtccacaaaactgtcaggacgatgaggactgtctgcctatgcgaaatatatttgtatatatatatatatatctctgttcccatatatatgtatgtatatctcgtacgtatgtacgcttgggagtctccggcgactggcagccaccaacttatgcaacaatttcggagcggaaattgctttagcacctgcctccgctgcccctccc

SEQ ID NO: 16655 - DNA, 991 bp, DROSOPHILA
aagctttcacagctgacggacgcgaattgttccctccaaccggcgagttctttaagtttctcgggaatgtttgtattatctcaaaaaattgactacatcaacgaattctaagtggtataattacagtttgtgcttgctgtgaagatttacagctcgaataaatcataatattgtacaattaacgctgataatcacgaatttgacattgctaccacattcggtgcgtggactctgaaagctctgagtgttttgtttatgcaaagcttttttggactatcgcgtgctggctgcgggagcttcattaagtgagagttcgctgctggattcgttggctttgtttggacgttggcaacatcgtcgccgttatggattcacctacaccgccaattgtcatcgaagattcaaacggatcagcaatggacgcctgtttcacggcattcgacaaggacagatctttcacttatcatcttacatgagttttcccgcttttctatcctatttttttcccagtgatgaccgcctgagtcttgccgaattttcgataatctgtcgagctctgttccgcaacgacaagggacacatctacgatgtgccccccgagcgccttgagcagatattcgccgtcttcgatacgaatggcgatggcttcatcgaccgggaggagtttaaattctgttggaaccagtggataaaaacgtttttcctgtgcttgccccgctcgattccaagcccaatttttccgagcttaatttttgctggtcgctggcttgctggattttcccctggcggtcgagccctgccgattccactgcttccaccgccgactgatgaaagtttaacgaccaaagttgacacgctgcggcgattatttagaaagttaatgacttataacatacccccgaaaaagtcaccggaaatgaacagcagcgaaggaggaaatcagagggagcgagggccggatgaccaaaaggagccagattcactgatttag

SEQ ID NO: 16656 - protein, 36 aa, DROSOPHILA
MDSPTPPIVIEDSNGSAMDACFTAFDKDRSFTYHLT

SEQ ID NO: 16657 - DNA, 2693 bp, DROSOPHILA
ctcctcttggcacctgccgctggagctcgctgcccgtctgaaactgccgtccggtccattaccattatgggcagttggaggcactgctgcacatctgcgccgtcttctaatttcgaatcgtgttccacaacagcaactccaagtgcaacacgtactggagagtgcagcgccataaaaaccgcaatagagctcccgggttactcgtggcggcaatcgcaacaaatcaggaaggaaccggataaaggagcgataatgaaccgagagacggagtatatcgacctcgatgctgctccattcaggaggctattcgcgacttacaagctcgttttcccgctgctttgatatcgcattaccatcccacttgttgcccgacattattccccgatcccccaatcccccgacttctccactcccccacttccaacgatccccggctaatgatccccaacagtgtcgaatttcgtgtacatagtttatggttatggatttgcgcacttgtcaattgcagttcgatcatagctagagtacttgcccacactcgggctcgtttcggagtcccagacaaagcgaacgtgcagctgcataaatatggaaaactgttcgaaatcgacggaatctcccctcattaaaggtggttgtaatagatggcatataactagagatcgactagggaatactgttagtagctgcttaggaaaaggtttggaatgcggattatgccaagttaaataagttgaaaactcatatattcttattatcattattatagatactctaataatattcagccgattttgaattttctgacgtgattacaaagtttacctataataaagttttcaagcatttgtacgcgtctaagctcctgaatacccaccataaattcgaaatagtccacttttcagcactaacagccactaaatattacaaaatattggctttaggttctatataagtaggttttctgagcaactttggtcagttgaagtcgcgatgtcggccagaagggatatattattcgcagtgggcctttgccttatgtttagttttctgagcattgaggctaggtcattggaggaaacctctgtcaagacggtcagtcggttgtacttattaaacatataataatttcaactttttgctttagaaacgcgataccgactggtggactatcctcgaggatatactctatgacaatgatagtgatagtgatgatgccggcgatgagaacgtttgtaagttgagagaccgtcttgaactcagtgaccttttgatttgttattctcagtgatttgtcgtaactgcacggtagttgttcaagctgctccaaacgccacagcgaatggaagcactgtagctccgcaggcaggtggagcagctccagggagttcaccaggtgcgcctgccactcctcctggctcgactcctgcagttccagccacagttgcacccgaaacgcctgctccgtcggcacctgcgacatcgccacaacctgtagtaactgccctacccacagctgccccacctacagctgccccacccacagctgcccctggtggttagattatcttatccttacccacaccttataacacctctctaacactagctattaaatgggatttggtatacgataatgttgcccatgggctaataacccagctcaaataaaacagacgttcattccgttttagccataaatctgtgcggttctcattcccaggcactttgaatcttcaaaatattgtaacgcaattgtcttgacataagtcacaacagatcggctggcactcgccacagacccacacgcattgaggatcgagtctggtggctagggagccaagtcggtggtttttgttcactcggtcttttaagatatgtggcggcgaaaggagcagctccggttccccctcgacgggcacgatggcattcccaacatgacattctgtttgacatttgtaatctcgtgatcgttaattatttacgaattgagttacacgacgagatggtctgtgtgcggttccacaatatccagcgccagccagaaagacacgaagtggagtcaaagatcatggaagcgacaaatatagttgaatcctccaacacatgtcacagtttcttccgtagatatggaggtctgaataaaatgaatctgtatccaaatcgtaagctttaattgaacttcctttagttcaaatgttcaaatctttatttgcttcttttcagtttttttttccaatctctgtgtttgtcgtggaaaatattcgaaatatgcccaatgatggctgcaatttgttggtcccttcaagaacattatctccaagtgcttgacttttgcgctaagcgtccataaatttgtctgaacaaatactttctagttgtcgctgacaaagatcgacgctcttgttttcttctcgtattttcctgtttggatcttttgaagatagctgcatcgttttaatggcttttcaaatacgcatgacatcaattttgggcaattacgaaagattaatggcagccaaagttgagcacttggggctcaattatgatatgtgtgctatgctaccgataagaatcgtacctccgcctaaccgaaaaattggaaaattaattgaatctgctatcggttgattagctgcctgattttcagaattatcccagtgatagtcgctcgttttgcctcgccctcgagt

SEQ ID NO: 16658 - DNA, 588 bp, DROSOPHILA
ccagaagggatatattattcgcagtgggcctttgccttatgtttagttttctgagcattgaggctaggtcattggaggaaacctctgtcaagacgaaacgcgataccgactggtggactatcctcgaggatatactctatgacaatgatagtgatagtgatgatgccggcgatgagaacgttttgatttgtcgtaactgcacggtagttgttcaagctgctccaaacgccacagcgaatggaagcactgtagctccgcaggcaggtggagcagctccagggagttcaccaggtgcgcctgccactcctcctggctcgactcctgcagttccagccacagttgcacccgaaacgcctgctccgtcggcacctgcgacatcgccacaacctgtagtaactgccctacccacagctgccccacctacagctgccccacccacagctgcccctggtggttagattatcttatccttacccacaccttataacacctctctaacactagctattaaatgggatttggtatacgataatgttgcccatgggctaataacccagctcaaataaaacagacgttcattccgtttta

SEQ ID NO: 16659 - protein, 139 aa, DROSOPHILA
MFSFLSIEARSLEETSVKTKRDTDWWTILEDILYDNDSDSDDAGDENVLICRNCTVVVQAAPNATANGSTVAPQAGGAAPGSSPGAPATPPGSTPAVPATVAPETPAPSAPATSPQPVVTALPTAAPPTAAPPTAAPGG

SEQ ID NO: 16660 - DNA, 5674 bp, DROSOPHILA
tgaatacctcttagtagggtacaaaatggttatcgctgcattaaaataaaattatttagccctggtcatgaacatgagtgaagtagacatagaataaatatgccttaaaacatatatatttttaaacagatttctatatatgttctgatcaagtgcgttccccaaatgggttggctgctggccaaatcggaaaatgaaatgatatataaattatggaagtatcacgtttgcggaacgtgacttctaaaagtgcttaaaatagttgaaaatgttcaacattgaggatccatgtaatggtacaggaactgatgttaattacaaaattaacttagtaaattaacttgatgttaataaaggagatgtatgtatacagcggaaattttccattctcttggctagatctgcctagttgattttccatggcgctactaattcagttagcttactattaagaatgcttcagttacgtgacgaagcagtccgcacgcgtaagttactcatccatcaggacgatatgctacgaaatactatttaattttctcatgctgttcagaccaagacatctgtctcttggactttggctactatcaccctactcccgcgatccaccttaaccacagccaatcccggaccgacacaccgcgacataatctccagacgagcctacccaaactaggaaccccatgaaaccggcaatcttatcaaggcgcccatacccatcaacagttggtcggtatgcgatctgtcccatttgccgacggactgcgatcgcgaccgctcgttgattgctcgcatagcggaaccggagatctcagcaggccagtcgcactccgagacgcggttcggtgccctacacatcgcaaagtgctcggcgcgagggtaaaaataaatatatatacgtattttctgtgaatggaaataacgcagcgctagtgcataaataaagcgaaaacgtgtgctttaattgtgcccccgtattaacaaaggcagggattgggaaatggcagccagcgaagcgccacccgcagacccggcggtggaggtggcgccaccagcgaaggactcggaagacgtcactctggacgccatcctgaagcacctggggcagttcggacgcttccagctgatcatattcctcctaatctgcctgccgatgatgttccacgccatgttctcggtcacatacgtgtttaccgctgccacagtgacgcacaggttaagttaatggccatttaatggtatgaatgggtccttggtgcctgaattgtgcgactcgaaatgacggagctcctcttcaccaacagatgtagcgtggaagagtgcgatttgcctggaagcaactactacgagccacacaccaattggagtatccccaagaacggcaaggatctggactcctgtaatcggtacaccaactcggagctgccccagtggaaccattctgtggacatttgctcggccgaccacttcacaaaaaacaaggaggcctgcgcccacaacgagttcgtttttcgcgacgatgaagttaccatttccaatgacgtgagtgtcaaagctccccaggggggtgctattatcgggggctacgaaaactgcatgctagacgttggactttgtcaataagtcatccgattaaccccgctacacactcgtaaaagagtttcatcgcaacaaacccactcttatctttgaactatcagattgaaatcccaaaaatatcattgattgtgctataactccgtgtgctataaaaaacgtgcttgtttataaaacgtgggctcacatactagattcctcattcttccaaaatgttagcacattatgccgttacgcgttttgagtcttttttaattagctttttaataatctatgtagcttatactctacacctaacgggtatactagacttgcagaaggaagtaattccgaccctgtgcgtccgtctgtccgtatgaacgtcaaaattacggaaactataaaagttagaaatgttaagcgagcatcgcaattttgtttcaaaagaatgcccgttctaacgcccacaaatcgcacaaaactgtccacacttttatatattttattagttttcttgttaacctttatcaatatttaaaaaaattttacgattgaatagaaggggtcagaccaaagacactagaattattccaatgtcgttggtctgacagtgcaggaggaactcaattatagcgttatctctttatttatgtagttatttttgtggcaggtttaattgaagcgaacaagtctaggattactaaacctgtccattcacacgggttcaatgactaaattaagcggtaaatacttcactgataatagacattgagtagttgacaatcgtaatcaaatagtgggcactcagccggggcctgaaatggattgagaaagtgaagagtggaatgcagtaaatggtcgtaaaacttaacgtatttataatgcgatatttagtagtgagtataacgcatacgcccagtatgccagctgaatcaacagaaagaccagtgtgaaggtccaaaggtaaacagaattcatagtatttagccagcaatttaggcataatcgaggaattttaccacccatagggtaaacaaatttagttttcgcggtcacatctgttaccctagtctttggacagtttattatgtgccctatgataatgtcggaatctgtagcctaagctttcttgctaaaacattctttatcagacaattggacacgtagatgggagaacagtgactggcagataagtgccacagatgccaggcttggggcacagcaattgcaacatgaaaacacaaattgagattaagatgttcctagtcaaattgggttacaatttaggtaaatattcagtgggactgataactttgactgaatccaatttccattaatttttcacaaggttgatctatgctcggcataaatcagttacggtaagagcattcaaagaactaggaaaaaaaggaattttgtacagtatttcagaacataattttgagctcagacctccaacttcgaaatacctctcgtagcttaataaatatttcgtgtacgccattgctaagaacgtgaattttcaaaatgagcgaattcaactattctcaattcaaagtacgtgtgagcgacaaaagatttgaaatacagttccattgcagtttggcattttctgcgatgatgaatggaagctatctatggtgggaaccataaacaacttgggacaattcttcggcattcccatcgggggctttgtggcggatcggtaagggtacaccacaccttaaccttatgctccttgatcatcacacatcattttaaacagatatggacggagtttctcaatcgctctcggcggaatattgggagccgtgcttggcgtaattcgctccttctcgcccagctacggttggttccttgtgttcgagttcctggacaacatgaccagcagtacgttgtactccacctgtttcgtgatcgggatcgagctagtgggacccaagcgacgcgtgctggcgtgcagtgtgattacggtcttttacgcggtgggtgaggtgctgctcgcgatgtccgccaaggcgttccacgattggcggatcctactgcgcatcacgtacgggccctcgctgatcttgctggcctacttttggatcctgccggagagtgtgcgctggctgcttagtcagggcaaggaggagcgggccaagaatatccttcggcgagccgcccatgtgaacaagcgcgagctgccggagagcgtgctggacaagcttgtgctggccaatcgggacaagttgcagcagtcgtcggaaagccgtttccccatacgagaggctttcaagaacttcaagtggcgcattgctaactgctccctctgctggattgtccacgtgctggtctactacggattgagccttaatgttgtgctgttggatggagacaagtacaataacttcgcttacatcgccctggttgagattccaggcttcttcatgcccctgctcatcatggaccgtttcggccggcggtactccctctgcgggctgatgctagccagcggtctttgctgcatcggaacgatattcaccggcgcggatcagccagtgcttcaattggtgctatttcttgttggcaaactgaccatcactgccagcttccaggtgctctatttcttcgcctcagagatctatcccacgaatctgagaaacagtctgcttagcttctgctccatgatgggcaggtttggttccatgctggccccgcagacgcctcttctggtgggtgctcaaagctacaaggatctcctgttatatctaagtgcttcctttccctttctccacaggccaagtattatgccaatgctcctgccatgctcttcgccggcgccgccatcgtgagcggcctgctcacgctgttctttccagagaccaccaacgtagttttacctacaacagtgcaggaagcggacgccataggcgtcaagaagcaatcgaagagcaaggatcttgatctagtcgtcacggccactcaagcgcagtagttctaacgtaatcttattttaaggcagcctgcaaatacaaagacaaatacatttctcttcaaatgtgttataacgctaagaacaaaccatactatacatataaaatatttagcattgacagagcgttgtgttttattaattaacggatggatggtaatggtaatgatcaacattaatacttaagcctaaaattggaaaaataaaacaaaaaaaattaaatctaagagtttcattactcgatttgaaaaaaaaaataataaacagcagtaaaaaaaagaaataaacaatcctaatcaatttgctgtccagagccagattgagattttaataactaggatatgtgctagcaaaaaattattattgttttttaatttggaattgaatgtgaaaatgttttaatcttaaagtgaagtaaatttgtctgtggtccattcgtaggtacttatacaggttcaaatacttggagcggtgtaagggtttctctaattgctttggctgaaaaactgggcaattgtctttgttccgcttgaagatgcagaaatggttgagttcagtttcttctgagattgtttctttggctgaactggagatattttttctttattcagagctgcggttcgagttcgcagatcctgctggtttagttcacgttgaaggtttctggctacgtggtagtctaagtgttccggcatgtctacacacttgatgaaagccttacactcggggcactgattcatctgtggatcactgggcgcttgctcctgagttggtttggcgcggaagaacttggttatgctgttactcggtggtgccgtactgtaggaactgctaccagaaccagccgtcttcttgctctttttgggtggcgtcggcttaagagatatcttctgtcggctctgcgtcctctcttcccgctcggtgcttcttagcgttcggcttagttcctgggcgaagtgatggtctctatgtgtttgtagggacttaacttcgtcgggaatgtttgctccgcactgatcgcatttgatagtaggcaagatatcggtgcgaaggttgggtactgcaaactctacgtaacactccttgtaattacttacagaactttcgatctcatcgaacttt

SEQ ID NO: 16661 - DNA, 1748 bp, DROSOPHILA
atggcagccagcgaagcgccacccgcagacccggcggtggaggtggcgccaccagcgaaggactcggaagacgtcactctggacgccatcctgaagcacctggggcagttcggacgcttccagctgatcatattcctcctaatctgcctgccgatgatgttccacgccatgttctcggtcacatacgtgtttaccgctgccacagtgacgcacagatgtagcgtggaagagtgcgatttgcctggaagcaactactacgagccacacaccaattggagtatccccaagaacggcaaggatctggactcctgtaatcggtacaccaactcggagctgccccagtggaaccattctgtggacatttgctcggccgaccacttcacaaaaaacaaggaggcctgcgcccacaacgagttcgtttttcgcgacgatgaagttaccatttccaatgactttggcattttctgcgatgatgaatggaagctatctatggtgggaaccataaacaacttgggacaattcttcggcattcccatcgggggctttgtggcggatcgctacggttggttccttgtgttcgagttcctggacaacatgaccagcagtacgttgtactccacctgtttcgtgatcgggatcgagctagtgggacccaagcgacgcgtgctggcgtgcagtgtgattacggtcttttacgcggtgggtgaggtgctgctcgcgatgtccgccaaggcgttccacgattggcggatcctactgcgcatcacgtacgggccctcgctgatcttgctggcctacttttggatcctgccggagagtgtgcgctggctgcttagtcagggcaaggaggagcgggccaagaatatccttcggcgagccgcccatgtgaacaagcgcgagctgccggagagcgtgctggacaagcttgtgctggccaatcgggacaagttgcagcagtcgtcggaaagccgtttccccatacgagaggctttcaagaacttcaagtggcgcattgctaactgctccctctgctggattgtccacgtgctggtctactacggattgagccttaatgttgtgctgttggatggagacaagtacaataacttcgcttacatcgccctggttgagattccaggcttcttcatgcccctgctcatcatggaccgtttcggccggcggtactccctctgcgggctgatgctagccagcggtctttgctgcatcggaacgatattcaccggcgcggatcagccagtgcttcaattggtgctatttcttgttggcaaactgaccatcactgccagcttccaggtgctctatttcttcgcctcagagatctatcccacgaatctgagaaacagtctgcttagcttctgctccatgatgggcaggtttggttccatgctggccccgcagacgcctcttctggccaagtattatgccaatgctcctgccatgctcttcgccggcgccgccatcgtgagcggcctgctcacgctgttctttccagagaccaccaacgtagttttacctacaacagtgcaggaagcggacgccataggcgtcaagaagcaatcgaagagcaaggatcttgatctagtcgtcacggccactcaagcgcagtagttctaacgtaatcttattttaaggcagcctgcaaatacaaagacaaatacatttctcttcaaatgtgttataacgctaagaacaaaccatactatacatataaaatatttagcattgac

SEQ ID NO: 16662 - protein, 542 aa, DROSOPHILA
MAASEAPPADPAVEVAPPAKDSEDVTLDAILKHLGQFGRFQLIIFLLICLPMMFHAMFSVTYVFTAATVTHRCSVEECDLPGSNYYEPHTNWSIPKNGKDLDSCNRYTNSELPQWNHSVDICSADHFTKNKEACAHNEFVFRDDEVTISNDFGIFCDDEWKLSMVGTINNLGQFFGIPIGGFVADRYGWFLVFEFLDNMTSSTLYSTCFVIGIELVGPKRRVLACSVITVFYAVGEVLLAMSAKAFHDWRILLRITYGPSLILLAYFWILPESVRWLLSQGKEERAKNILRRAAHVNKRELPESVLDKLVLANRDKLQQSSESRFPIREAFKNFKWRIANCSLCWIVHVLVYYGLSLNVVLLDGDKYNNFAYIALVEIPGFFMPLLIMDRFGRRYSLCGLMLASGLCCIGTIFTGADQPVLQLVLFLVGKLTITASFQVLYFFASEIYPTNLRNSLLSFCSMMGRFGSMLAPQTPLLAKYYANAPAMLFAGAAIVSGLLTLFFPETTNVVLPTTVQEADAIGVKKQSKSKDLDLVVTATQAQ

SEQ ID NO: 16663 - DNA, 11936 bp, DROSOPHILA
ggctggaaaaagacaggctgccccagccagacttttatctgccccgtctgggcgatctgctgaacattttgtgagccataaatccatgggactctcgcgcagcaatctactcgttatcaacttcttaattcgacttttatttggccttagttgatgtgtttacacatagttgtacatattgtatctgccggcaagtacaataacattctctgatggatactttttttacatatatagagtggttgagaaattgctgggtctgaaagttatccatgaacaaaactagctaataaattttggaaagacgacaatgcatattgcacaaataaatcactaaccatttgcgaatattcatttttatgtccgtccccaaataattttcaggcccaataacttttctttgaattaacaatataggctgagtgacttattaaaatactagcttaaccttctattacttgccgggtcagaaaagcagagacggcaatttcttactcgttcctatatcttggtgatcccatgtaaaagttgtaatttgcaatgaactaaacaaattgcttaaataagtgcaagttccttgtgctgtgacttgcaaatcaattatcaatcaacgttaactatttaagacacacacataatcgaaactatacaacttattggttagctgtacaacaaatttacaggacacccatcgatgtgagctgctaattgtcaaaacaaagcaagcaagtatcacagaagttatatttttggcggtttgcttccgtgtaaaattgaaacaatcaaacacctgttttcgaaagttttttacgatattttgactgttgaagcacgacattttcgtgagtgtccgttttaacaagtcctctgatatgttagagttgagttctgttttctgtactttagcaatttagcgcgaaaagaaatcccataaagcggtgtcacatttggtagcaaatcagaataagagcgtaactgaatctgaaaagttaaacccatcccctgcttttcccaatcccccaactgattttccccccacgccttgtcttaagctgattttaaacgatgcatgtgcaaagattttatagaatcgcagtgtttaaattccgcgactctgcgtatgcatcgctttccatcagctttagttgtaagtttgccgccggcgatcgcttaatgatttcttcgaggaccctgtctaaattgctaaaaggtaacatcaggtgctcgcatccggcgtgttggccaaaatccttgagctcctcgacaagtagccgtaccagtagaacacgttgataaggatgaatagcagtgggaagacgatcctcgaggcgcgatcgatcttcgacacggaattgtactgtggcgttcgtttgcccttccttcgggcctccatctcctcgcgtcgatagtaggacatcctgcggcgacctccagttggaggactaatccgagcagcctgtgcagcagcttgtgccgccgcagctgccgcagacgtggtcggtgcttcgttggcccttagctgcgtctgctcgtcatcctcatcctcgtcggagtcggcacgtggcggctttcttcttcgccgccagtcgaagagacccagaagcttcatactccacagaccatgacgcctgttccggggcctccgattcctggaggttagcatgcccagccgagtgggaggcggcggcatgctaatagcgcacatggacagcggaatgacttcgtagatcttggactctgtgctgccccgaaagtccgaggtcagtggctccgtctccgattcccccgattccgagtccagctcctcgattatgaaatagcactcccccgatccgtacttggtgtagtagtgcaccacggcaaactgcaggattgtggcaaagataaagccgaacgagaggaacacgaagaagtccagggccgtgggataggacaccttgggcagatccgtgcgagcctccagtccgagaaaggtcatcgtcagcacggtagtgatcccgagggaaacccgatcagcagtggcctcgcggttcagccagaaggacacccaactgaggaccaccagcaggcagcagggaccgtacacctgaatcagaaagttgcccatgtgacgctgcaggtggaagtttaccatcaacatggagtactccgctggaaatagcaggttatgatattttatgatagtacgatagcaacggccagatatatttttgcactttaattacaatccgtcgaatgtctcatacttacacggatgatttgtttccagcgtaatagtgccacttagaccggtggtcgaccccgagccaccagttgcatcccgtccggtaccgaaggctcctttgtccagcttgagtcccgtgccgcggacatgctgattctttgccgcgggaccggcgaaagtggtcattaccttgctggtgggtcgtggtggatccttgttgttgaatgggcgacgttgtggtcttggagcagccgccttgtaaacaatgtccgttaaatttccagccggacagtcgaccaaatcgaattgggacagcttcatgtcctcggcaatggcgacgggtggtctttctttgttccaacggtagatgacatccgacgttgtgtagccaactgtttcgattgattttcaaattaatgcaacacgctctggacaaatgtctattaaaagggtgacatgcggaactcagctgtgtcctgaactgtgacttttgggcaggatatttaaattgactaagtcacatgaacatctaccaaagggaaccgaacttagaacaccctgttaggatattaatctgactatcaaacaatataacaaacaagatattgcacagttttaaggatttattaaagtcagtttcaatagccatcataaataactctcaagagagctcaaaagcttaaagtttatttagcaccttacctctagtcatttacggacctatctatctcactataagatcccatccccggtttgcctttcaatcactgactgcctcacgtgtgcccagttattttattttgatgctgctggagctgctgctccaaagtgcacaaattgccaaacattgcgccatatgcgggaatcggtttacctaccacccaaaatccgcatctctcatcctgcaaaccgtcgcccgatctgctggctctgtttggcaatcgctgactttggcaatattttcagttcgctcgcatcaaatgggaaattgtcaacattaagcggctggcaatgtatgtacatacatatatatgtacaagggagcggaggtgtagatggaggggtaattgaattcttgactgcttccatccagcattattcacaacaaatcggaagtaataatacatttctaggttggtgggtggcggcttgttcatttgcgataagctgcaaaggcagttagtgggtttcgcagacatgacaggagacacctttcctatctgtagaaaatgtatccaaatattaaactagtacaattgccttcatttacattgcatactttctgttttgcatttgaataggaggaaatgtgatggaaattcatcaaatgctaggaggtgtttatttttatgttaacgaaaaataatggacatgtcatggccagcacataacctggttcagcatccaaagaggacattttggggaaatggtaattaagtgcgattttagcatgcggaaaagcttagagaattgctaataagcaaacaatttgtatacccgttactcgtagagtaaaaaaggttatacaagattcgttgaaaagtatgtaagaggcagaaggaaacgtttccgaccatatatagtatatatactttcaagaatatatgaatcaagaatatatattcttgatgatcaggatcaatagcccagtcgatctaaccatcgaagtatcaggaactaaaaatactagaaggttgagattcagcatacagattctagagacaatatctatcgatatcccagaaaaattatgaaattttgctttcgcacttacactagctgagtaaggggtatccgatagtagggtaactcgactatagcatactctcttgttcttaaatttagctggtttcaaatattcatgttttaaagatattgtgttcttcattaaaaacactttgttttgctaaaattgcgcataatgctggaatatttatggtggctaaggataatcataagattctgagaaatctcttaaaaaattttgctaaatggaacattaaagtatgacgtctaagcttttggcgggttgtctgatggaaacatcagtaagagcttcattttagctgttacatacatttaaacaattttcgattactcaacgattaacgggcaaaataattattaatagtgaaatcaatttaagttgctactggcgttatattgaatttttgtaaaggagtttccgactttagctaaatatgtattttttttctagtctaaatatagaaaagaatgctattcactcgaaataccttttataataaaatgttagtaaaaacaatatgtctctcgttggatttgcgtaattttgggtttacctattacgtctaaacagatgtaaacaatcttaacaaagctcgccaaatactcgacggtactgtaattggaacaatattcaaaaaatattcccaaggggcacatctgtgtttgcatagaacacattacttgtagcccaaaggttctataaatatcaattttttcggtccattgatattagttcctgatcttctacgaaccctatcgtcatgcgctttctactagctctctccctggccgtcctggtcgttctgatcctccacagcagccaggtgtcctccacatcaaccaccacctccacaagtgcttcggccacaaccaccacggctgctacgacaacaactgattcgtccaccaccaccaccaccgaatcctccacgaccaccactgcctccacaaagaagaagcaccgacgccgccgtgtcatcatcaggcgcgtgatcatccgccgtggcagggaaggacgaagtgagagcggagacaatcgccgacgggtcgtcgtacgcgttcgcaggacggccaactgaaacaccagattaatggttattttctttaaagcccgttgctgtcaatcaaaataaatcattgaaaaattattttctatcgagatgatgacgtgttttttttaaattaataaatttatttattaaggcatacggggaaatcttggagcccctttgtgtccttcttttctattaattctgcccatttgggcgcgccggctaacagagctaattttataataatatttataatatattaagggaggagcacagaagcgccacatttagatatttcacaaattattccttgcaaatatgatccttacggtaatcctatatgatgattctttgaaatggtaagtccttagattgattttgatgtccttgctaaattgctgtgacgatgtgatgaaaaattattgtatatttctatacaaaaatacaagttgtaaaacattattattctgctaaatatttcctacaaaggtcttttctgttggagtgtatatgcaaatcttttagtttaatgaccatgaagtctgcaaatgaaactatataggagttgtcattatacaatttttcggtgcatttcgacactgaatgattctgtaatagggtaacctttaaggtctttaagggtaatctttaaggtcaaagctgaaaatgcaagtaatttaaacttttcgatagcttaatcccgaaagaaatgtgtttcgaaatctgaatggtgtactctacgtacttcaaaccggctggcatatcttaagaaagaaaaggcttgaaagggtctttgagtaaagaactttaaaaaagtgtaatacctgtcattttaaataaatactaagcaagtttagcaagcccttctgtctgtccttaagaaagagctagtcattaggaagttaagaataagcatgcagattctaatgacgccaacgctgtgatagtttgtttcaaaacgtagccactccaacgctaaagcgcacaaactttaaagttctatcttcaagtacctcaaagtaatgcatgaaaacaaaattactattaacgtccaaacaggtggtaataaccctagcaaagcacgataaataatagacggtattgtaaatggaacaatggccaaaaatattcacaaggggcacatctgtgtttgcataaaaacgtaatactttcagtccctggcccaaaggttctataaatatccattttttcggtccattgatattagttcctgatcttctacgaaccctatcgtcatgcgctttctactagctctctccctggccgtcctggtcgttctgatcctccacagcagccaggtgtcctccacatcaaccaccacctccacaagtgcttcggccacaaccaccacggctgctacgacaacaactgattcgtccaccaccaccacgaccgaatcctccacgaccaccactgcctccacaaagaagaagcaccgacgccgccgtgtcatcatcaggcgcgtgatcatccgccgtggcagggaaggacgaagtgagagcggagacaatcgccgacgggttgttgtacgagttcgcaggacggccaactaaacttcgaagccgtgtaaataattatcggctttgatgttgttaccagcccttataaaataaaaaccaatatgcatttccaaaattcttctaatgaatgtacatggtgggaacagtaaccttaaatgcaaataaaccaacctggatttaagaaatatggcgcctccctttaataggagtgcttaatcatgtacttttaagcacatatcccccatcaccgatttggctgtacaaaaggacttgaaaaaaccgtgtcgctcgtttggcatgaaggacttgtatacaaatctagacggaccgcacactttctgtgcctgtggacagctgcagccctgccaccaaagaccccaaacatgccggcgtaactcaaggatgcgtcctgaggccattaccttactctattttcacctcggacccacccaagtttaataggcggctacttgcgcgtcggcgccatgcgctaaatgcaatgcatatacgaatttgcagaccaattacaagaatacttacatacttataaacaatggactcaaaagaggcgcatatgagtcaacacggacaaaagcgccgcatttagcatacaaactacttaagccgtagcaggcgcattgtattgcaagagtatttcctaatggcaccgtgcacgttactcccccattccaactctagcccctacttggcaccttcgctggccaaaagactcgctttcaattcattacagacttctttaattgttctcacatgacctagcatcacgctccatatgcccacaactattgaagaatatgtgttcttttgtatgtaatatgcacccttgagtccaggcccacattaaatacgaaataatctttaaagtatcacagaaccaaacattttggaaaaaggtaaatgctttttttttatattatattctgtagttttaattatctccctactggagaatgatcagaaatagtgcactttaaagtaaggtccgtttccccatcaaaggagctgggaaatgcccaacttggccattctgtgtagggattccaaaccacatttgaatatcccattaaaccattacctcatctaatccgctcccagcattcagacgcatggaaccacttgaatatttccggcccttgtgccatttctttctttctttcatttccccttcaattcacaacatatctcacttcacatttcttgtcgctaacggtttctcgaattcagtcccattccatccaatgtcatggcattcagcctaatccccaccccagattcattgtccttcgtacccaacaagtggacattttgccgggacgagaagaacaaatcacatcaaagcgcaataagcagccattatgcataattatactacagcgctgagtttcgcatgccacttggcattctttcgaaattccttcgtactcacatgaaccgaatttcagaggacacttttgtatatccattggaaaatcggccagattcatggggcagccggctttaattgtcagccggctggagtacagcacgcgtccgttctgatagatcctcacaaacttatttggcgtggtaatcgtgtgcaaatagctctgcttgccgttgtaaaagtacgtatccggcttccaaatccgtgccaacatcgagacgctcagtgccagcgtgtcctgggcgccctcgaatgcgagacgtttatccacccaggattggcggaaataacagtccatcgagtaggtctgcaataaagaaaatcggctgagtctgaattgcagaaaagcaagaaagtcagacaggagatgtcactgcaaattgaattgggaagcagaaatgctgcgttgtcagcttgtttctatggattcttatcagaaaaacagaaaaatcagatctaattaaaagaatctttagaatctttaacttaagatttcaaataataagaaatatcattatgtattaaggtacgtatgtttgtaatcttacattttgaataaagatatttcgattaaaatgattcctattgtataggaaataatataattgtaattaagtaagtaattaattaattaataatattattaatatttctatgttctatattctattcataccatatcgacctctgatattgggcccatgctgcgaaccattatatccacttcaatagtggctggaggtcctgaaataaagtgaaagtttgtaacgaaacaaagttttttgtatgaaaatccaagtatatttttagaatatttaatatttaaaactaacctatgctgaatatgaatgtattgcgtattacatactttagttgcaaggcttattgtgacattattaccttcctcacagcttaccattcaagcctgtgactagtttagttatggaaatgggatttgcttcaactgaaggccacgcaatccaactatataatccccgtactctgcgtatcggttttgttcaaccatgaatattcatatttgagtcgcagcccccaaatgaaaatgttaaatgctcctctgtgcgaacaatgacacttaagccgcttcgcagacagtcccaaaccctctgaatctgttaccatccccggctgacactcatttttatctagcttttctgcactaatatgcaatttttcaggccctagattcgcctcctcccgaagcccccaggaattttttgtatttttgcctatgcgaacagtttttaatgactttgctgctgagctcgctcggcaaacatgcgtcgcgctcgcaggatgcggatgtgcattgccgcgtatcctttgaatcctctccagctggcgccaaacgacgcggtcggagcgctgatgggggcgtgccacggcacattcttaatgaagtgttaaaaacaatgtaatttggtcttaagccgttgagcgaaaacaattttcgccacgttgaccaaaatccattccccaattgagtggaatggcattttaaatttcgaaaatatttaaatttttattgcctcatccatttgcgagattgaaaacgaatcgaattgcttatccgttttgtgcaatgtcctcgaagtaaaagctctggttgcttggaaaagcaaaataaaattgtttgtgtgttggtaaatatttgtcggttttgacactaactatttaccaaataagctgcgaggcaatcatcaaggcacgattcatcaccttggtgccgtttgtgagtgatgtgtcgcctcgcagcgatttccgcttcattaaatgcttccgttgagcggaaaatctgcgaatctatgctgattacacttggaatggggaaggagtcaaaagggtaaacaacgcaggaattggaacaggctgaatgatttggggatgtttggtactccaaatcagtaataatacttatcatggttgtcatagaaagcatgaaaaaataaacttatttatgtaatgttattacctaataacacacctgtagtcattaaaggtatcataattctgttcttgaccagtaaacataatcaacttaattaatcgacatttctatggatctgtcagaataacattctacgcactaactcaacaagtatatagtttatcctatcttttttctgacttttcgcttacttaccaccgaaatccggacgtatgctattgtcatagccgcgcagcagattgtccagtaactcggatatatttgcatggttattgctctgggtgagccacgaggacggcagggatgacgataaggaggtgcccatctcacccaggcggtgagtatcgccgcggcccttgatgctgtcggccgagacagagaagggtcccgatccggggccgatggaccagggccaggcatttgggtaaatgcacaacattaagaggcagcagctaatcaaaagtttaaatatgcgcaagttggagcgctgtccttggtggctggagaggctccttgctgcgatgaggtcagttgatgcatcgccggagccggatgcatctcttgttgctggcattgtgcacatattgttcggttttgtttgctgtttgttcgctggctgcaactattgtttagtcgaagtcttctgctgttgttgccggtctaatctacacatccgtttgtctaacttttgtcactccaactggcctctggctcccgttgccatgcccattcccagtcccattttcattttcattcgcattgccattcccattcccaatcccatcgccattaaaattcccattctggaggtcgtgctgctgctgatgacagtgccttcttcctgagctgtgtgttgactcggctttgctcgtatttattttcatttatgcaccggaagttgcactcgggtcgagagcaattgcatgaagcgttttcttcttaatttctgagattcctttcaggctggcattagttccgtttgtcttggcccggtgtcctcgtctcctttgcgacaagtttctttagatttttttaattgctgaaacttgttggacttgcagttggcagtttttgattggccaattagccagcggcatttttagctatcagttatcagctatgaactattaagattacaggctgtggctaatttgaccgagttcacagttctttgcatttgttgcataagcgtttccttaatagcttggttggttatttgattaatcaacttttgatgaccgattgattcgttcattaccgtgcacaataatattttggcagttttgaattagtgattaaactttgtaaaaacttttcaggatcaatttttactttctggaacacaataaatttagttacattgtaataagtttaagctaagaaattttgttaatcttttttaagagtctattttctcataatacacggcgtatgcgcaattttactttaagttaagaaaaatgcatgtaatcggatggtctttagaaaatcaacttacactgcataaatttatttagtgtgaaaacttattccgcaatctttcttaaggtcatgttttatttacaccccgttgcgtatgcgtaatctgaagtttaaaaattgcacgtttgggagaagtcgaagattaatgagtctactctgtaaaaaaaatgaaatgcaagctgtacaccagtattggctctcatatcctcagcgtatgcataatataaaattaatcttcgctgaactttgtcttaatggatggcaagtaattaagatcaagtatgccggggactcagaattcgatgctgctgcatacaactggctcgacagcggggcgatttgttaatgaaaaatccaccggaaatgtcaaaggtgccgagtgaataatgccgacgatggtacccaggtatgatgtcctcgaggcaccacgacatcatcttattgaataatgcgagag

SEQ ID NO: 16664 - DNA, 2633 bp, DROSOPHILA
gaagaaaacgcttcatgcaattgctctcgacccgagtgcaacttccggtgcataaatgaaaataaatacgagcaaagccgagtcaacacacagctcaggaagaaggcactgtcatcagcagcagcacgacctccagaatgggaattttaatggcgatgggattgggaatgggaatggcaatgcgaatgaaaatgaaaatgggactgggaatgggcatggcaacgggagccagaggccagttggagtgacaaaagttagacaaacggatgtgtagattagaccggcaacaacagcagaagacttcgactaaacaatagttgcagccagcgaacaaacagcaaacaaaaccgaacaatatgtgcacaatgccagcaacaagagatgcatccggctccggcgatgcatcaactgacctcatcgcagcaaggagcctctccagccaccaaggacagcgctccaacttgcgcatatttaaacttttgattagctgctgcctcttaatgttgtgcatttacccaaatgcctggccctggtccatcggccccggatcgggacccttctctgtctcggccgacagcatcaagggccgcggcgatactcaccgcctgggtgagatgggcacctccttatcgtcatccctgccgtcctcgtggctcacccagagcaataaccatgcaaatatatccgagttactggacaatctgctgcgcggctatgacaatagcatacgtccggatttcggtggacctccagccactattgaagtggatataatggttcgcagcatgggcccaatatcagaggtcgatatgacctactcgatggactgttatttccgccaatcctgggtggataaacgtctcgcattcgagggcgcccaggacacgctggcactgagcgtctcgatgttggcacggatttggaagccggatacgtacttttacaacggcaagcagagctatttgcacacgattaccacgccaaataagtttgtgaggatctatcagaacggacgcgtgctgtactccagccggctgacaattaaagccggctgccccatgaatctggccgattttccaatggatatacaaaagtgtcctctgaaattcggttcatttggctacacaacgtcggatgtcatctaccgttggaacaaagaaagaccacccgtcgccattgccgaggacatgaagctgtcccaattcgatttggtcgactgtccggctggaaatttaacggacattgtttacaaggcggctgctccaagaccacaacgtcgcccattcaacaacaaggatccaccacgacccaccagcaaggtaatgaccactttcgccggtcccgcggcaaagaatcagcatgtccgcggcacgggactcaagctggacaaaggagccttcggtaccggacgggatgcaactggtggctcggggtcgaccaccggtctaagtggcactattacgctggaaacaaatcatccgtcggagtactccatgttgatggtaaacttccacctgcagcgtcacatgggcaactttctgattcaggtgtacggtccctgctgcctgctggtggtcctcagttgggtgtccttctggctgaaccgcgaggccactgctgatcgggtttccctcgggatcactaccgtgctgacgatgacctttctcggactggaggctcgcacggatctgcccaaggtgtcctatcccacggccctggacttcttcgtgttcctctcgttcggctttatctttgccacaatcctgcagtttgccgtggtgcactactacaccaagtacggatcgggggagtgctatttcataatcgaggagctggactcggaatcgggggaatcggagacggagccactgacctcggactttcggggcagcacagagtccaagatctacgaagtcattccgctgtccatgtgcgctattagcatgccgccgcctcccactcggctgggcatgctaacctccaggaatcggaggccccggaacaggcgtcatggtctgtggagtatgaagcttctgggtctcttcgactggcggcgaagaagaaagccgccacgtgccgactccgacgaggatgaggatgacgagcagacgcagctaagggccaacgaagcaccgaccacgtctgcggcagctgcggcggcacaagctgctgcacaggctgctcggattagtcctccaactggaggtcgccgcaggatgtcctactatcgacgcgaggagatggaggcccgaaggaagggcaaacgaacgccacagtacaattccgtgtcgaagatcgatcgcgcctcgaggatcgtcttcccactgctattcatccttatcaacgtgttctactggtacggctacttgtcgaggagctcaaggattttggccaacacgccggatgcgagcacctgatgttaccttttagcaatttagacagggtcctcgaagaaatcattaagcgatcgccggcggcaaacttacaactaaagctgatggaaagcgatgcatacgcagagtcgcggaatttaaacactgcgattctataaaatctttgcacatgcatcgtttaaaatcagcttaagacaaggcgtggggggaaaatcagttgggggattgggaaaagcaggg

SEQ ID NO: 16665 - protein, 683 aa, DROSOPHILA
MPATRDASGSGDASTDLIAARSLSSHQGQRSNLRIFKLLISCCLLMLCIYPNAWPWSIGPGSGPFSVSADSIKGRGDTHRLGEMGTSLSSSLPSSWLTQSNNHANISELLDNLLRGYDNSIRPDFGGPPATIEVDIMVRSMGPISEVDMTYSMDCYFRQSWVDKRLAFEGAQDTLALSVSMLARIWKPDTYFYNGKQSYLHTITTPNKFVRIYQNGRVLYSSRLTIKAGCPMNLADFPMDIQKCPLKFGSFGYTTSDVIYRWNKERPPVAIAEDMKLSQFDLVDCPAGNLTDIVYKAAAPRPQRRPFNNKDPPRPTSKVMTTFAGPAAKNQHVRGTGLKLDKGAFGTGRDATGGSGSTTGLSGTITLETNHPSEYSMLMVNFHLQRHMGNFLIQVYGPCCLLVVLSWVSFWLNREATADRVSLGITTVLTMTFLGLEARTDLPKVSYPTALDFFVFLSFGFIFATILQFAVVHYYTKYGSGECYFIIEELDSESGESETEPLTSDFRGSTESKIYEVIPLSMCAISMPPPPTRLGMLTSRNRRPRNRRHGLWSMKLLGLFDWRRRRKPPRADSDEDEDDEQTQLRANEAPTTSAAAAAAQAAAQAARISPPTGGRRRMSYYRREEMEARRKGKRTPQYNSVSKIDRASRIVFPLLFILINVFYWYGYLSRSSRILANTPDAST

SEQ ID NO: 16666 - DNA, 19802 bp, DROSOPHILA
tttcccatgatttacttttgagggtttcgagttaactgacgacttttaatagacgattttttaatgcgtcacagtcttttttagtgatgggaggccttaggggtgggcgataagttattgagcggcacagctaaagtgttttctgttatcgattattgataggaacatacggactaggcgggccattcaagtggggactctatttatatttgtatatttttatacatgttttgtatacatgttgcttgttgagtcaaatgtatgctatattcgttgaaaagcatgtatccggcaaaagaaaccgatttcgacctaataaattatatatattataatatattatatatattatatatataaggaccaatagccgagtcgatctagccatgtccgtctttccgtccatctgtcagtccgtacgaacgtcgagatctcaggatgaataagaagctagaaaattgagattacggaaagcccccaaaacttcccacgcacattttcaaaatgttttgacatttttcatatttttattagtcttgtaaatttccatcgatctgccaaaaaactttaaattgccacgcccacagttatgcaaaatgtgatatttttcatattttgattagtcttgtaaatttctattgatctgccaaactactattactcccacaaaccgccgaaaagccacgcttacaatttttaacaattttaattttttttcttattttattcaccaatatctaatttgcgttcgcatttccaatagttgagtaactggcatctgattatcggggaagtttaaaataggaaaaaaattttaatttactagtttttttttttaaattttattttggaagaagacatcagtaagaatcaataaatttaatcaccactgctagaaagcattatttttatttttccgcctttaagtgaaaaatagttttacattccagaaaaagtattgtttttccatagataataaataaataaaagacccagattcctgctgtttgtatggttgtttgaattttatttggaattgcacttttacttttgccaaattacagcaaccaatcataaaagttttacaattttttttgatgtattttcttgttttgtttgttttttccattttcaacgttaaacatacaatatatgcgtttaaaatgctatagccaaaaaatagtaaatagtcgtacattattcatacttgtatatataaatatatcataatgtatatttcatgttgtctttaatttgtttgtttaacgctttattaataaaattttgtttgtcattgcacgagcgttttgtttttcaacatcgatttctgattttcgtatttttactaaatatctttcttttaaaaattttctaacaattgcacaacttcgcccgcttgatttatacacacatgcacagacatacgtagaaatagctaaattatattttatagatacatattatcgagttgataggaaatcaacgggttacgcttgaaatttccgttaagtaattttgtgtttataaattcaactaataaaaactagaatgactcatttagaacgctgcgaaaagaatacaaaaatatctgtataaatatgtatgtatgccaaaaaattgcactaaaacgtaaaacacaaattgtaaacataaaaaacaaaataattgctgcgaaatttgattaaattgggttatactctcaaaatatcccttcggtcagtgcagcgccgtcttataaaataaaacttaacaaacaataattcattttcataattggctcggaaattgttttaaattggccaggcaacgcggcaggtggagaacgcaaccgaattggggatacggatacagatacggatatggatacggatgcagatacggatacggatacccattataaattcgtatgctttccatctattgaaactccaacttgacgcccgctggcgaacagatgatgaagagaaacttaaatgctgcacatagacatagttcgttacataatccacctatatagctacattatggaattgtttaggtattttatctcgtcgtcagctttcgttattcgttttgagaaatatcgtttaaaggaacaatagtcatgccaaagacagcacagagattgagctccgggagtctttcgttaattcattcattcaatcattattaaaacataatgtacatgtcgcctccaactgtcggctcaactccaatctggatttcatatacaatcagagcctatttgcgatcggctttctttctatcattctatcgttctttcattattattattattttttttttttgttgttgtcgttaactttttcattactttgctgtttttttacgtttttgtttttggtctgttgatttcgtttaattacaatattattatttagcttctctttagacgctttctggatttctggcttctgcatttgagcttctcgtatttgtaattgtaattgtaattgtggttgttgctgcagctggtcatttgcctaagctagatcaagtttatataacaggaatgcatgactaatatacatagctttataatataggccctacaagtagctaggattacatacacatattatttatacgatattagttatgggcattctggtcatctcggccctgtggaatatttattatggtggtgcggtggagcaggattgaggggaatgttataccgctttgtggctatccaaaagccgaacaaaaaattcattaaagtttcctcgtcgcataaattcttcacaaactcccagactgattaaatcgaaacaaaaaactaaactgaaatgaactgaactcaactgacatacaaataatagatctaaaatataaaactcgggaaggcgggcaaacaagaaacgattccggctacacaagccccctaggatatcgaggggtccatgtgaatccggttgtttaggactttttcacattgtgcttgctaactagggcctgcagtttgtgcagctgactaagtagattggcattggtctcctccagcccctcgaggcgcttcttgtagtcatggttttcggtgaccaggatctcgacgcgcctctccagctggtccatgtactccttcttcttgcggcggctttcctgagcagagatctgtaaaatgttacaaaatcaaatataaataaatatgatttcttttagcttcatcgtttagtttgcacatactttattcttgattttgcgtcgaatcttcttcagcgatttctcctcggctttggttaggggtagcttctgcggaatcggatacccttcggccagcaaagtgcgtttctcctcttccgtcagcaacagcgtcccagtggagcccttctgcaaaatccacataattgtccaaagagttagtgagtgagtgagtgacgaatttcttgctaaatctcgccgcgatgacgagcattgattgttcatgattttaaaaaagattctttggcattttcttcttacatcctatgactaatttatgctacttgctactatataaagtcctatcgtcttacttaaaacatatatttatttactgaaacaatggttcttcatatggccaaaactattcctgaaatgactattaaacaaacttaccggttgcgagctaatcagcggcgtgtggatcggctgccgtgtcgtggtaaccgttgagctggtactggagccggatgctgatgcggatccggaggacgagcgtgtgatgctggcagcggtgcggctgacccgtacggatgactcaccgccggctggattggccacagagatggaaacggttgcgttgggcgacagtggcgcaaacaggtgttccggacttaagttaccttcggaatcatcgctgggcagggaggatggtggcgtcagcgggattccatagccgtgggcatgcgatttgtccgagctattgctggtgctctgtttctcgctcttgatctccattttggccatcagtagattgtcctggccaaggatttgctgctggcgctgctgggactttatgaggctgttgttgctgttgctgctggcggttagcaggaggccacagtgctgcaagacaaacatttcccaaaaaaaaaatatataaatcataaataaatatggcaattgaacattttgtgttgagtcctagttgtgctgtgtgaactcacctttggctcgaatagcatttccgactgcaggtgggccagattaaggctgagctggtgctgcgagctgctcgcttgagaagtgggactggcggggcagctggagtccggcgacatgggctcatccttgatggccgactcgtcgatctcgatgtcggagcaaatgtccggcgacatgctgccatcccgcaacgacgacaccgaggagctgcagtcgttgtcgtataggtgctgaggtagttgaaagtgctccagattggccaccaccacgtggctcgagccggatccgtggtgtggctggtgcgcctgcaggctctgcaggccggaggatcgtgttagatccgcgacggaggtgtttagggcgggattgctgctcagccggctgatgggcgtggcgtgcgtgggcgggacgtggaaggtgaggtacttgggatcgatggtcacgcgcccattggtcgccgtcttcggtgaaatggcgggaaagcactcgtcgtccatgtctggggaagcatatatatgaaagccattagagattttagacgaaacttaagggacacgtcatcgcaatccacagcggcaacactgcgtatgagtgatcacaaaatgtgagttacactttcgatacacatatttgtaaaatattttcaaataaactgttaatatttcatttcattgtaaccaaacatttgcttataagccctaaaacataaaagttcataatgattatataaaaaaatttaattgctttggcttgcgtcagttaaaatcgttctctgttagtctcagttaattgttaattttcccaaaaaataattagctcacagccgtatttgctccatccccctttttgttccatagacaatgggcaaaatcaaatagagccaatatgtgggtaaatattatggccaaatattattgcttctaacccacattattatgcaagaattggggctctttagactgtagtctaaagtctgtagtttagactgtaactaagcaaacaccggatcactttcctttgcctgagcacgcgtcaattggccgagttgcacttgtgtttgcatttcatattctgttgtttcagttttttatatttttctggcaaaactttgggcccaacaccccctcccacatccacgtccgtaaaactggcccaacacagtcacaaaaaaattcgttttattttatttacacagttgtcgtacagtttccataaaattacaaataataacagctcgaacaaaaaaaaaacaagagaagcccagaactcaggcagggtaattatacacagtttgccgtcatacatacgaacaactgatatcgcgtcaaagtacaaaacttcatgcacgagtactgcgttaaattgctaaatgctaccgcgacactagaaacagaacagagcggatctgaaacggattttcaactgttattcttgtcagccttgttttcactgtctacatggcccaaattaaccaactgccaactgtgttgggattgctattcggggcttacagacagaccccttcaataatacaaaaaaaaaaattgttcggtctgcgtctaaatgcaattgggcgtgttatcggtgatcgctctgtttcgaacagcaatcgttcaaattgcataggtccaccttgatgggcattctagcacatgctagcattgtaatgcattcattttttaatattttatattacatgcgaatccaccatatactacatctaataaactgttatatgatatttatgaatgcttgcaaatgcagttatcgacaatcgatatgtgtaactaagtacgaccctgttactgttttttactgttatccattcctaaacttggctatttttactttaaatgactttgacgacctgcatgattttgatgaatgccatttaacttttactttgctagattaaatgtattataacacattgtggcttatagttttcttgagatacctaccctcgatcttggcctggaggctttttggtgaatcgggcagggagtcaacgtcgctgctgagactgtaggagtgctccgtcttgatcggctgtgtgccattgagcagggcatccgagatgagcttgtcgttgagtatgacggtgggatctttgacgtcccgatcgaacagccagtcgtgcatatcgtgatcggggctgattttcaaggattcctgtaacagtgcaaaatgggaacaaaaaaaaaaatggtttgcaattagttaatgtacaaaagtcattcatagtcgtgctgcacggcgatagcacgcttatataattaaaacacaaaaactgaatgcgaaaaacaaaagtacatcagctctacctacctatatatacatatatacgacctatggcaaaatcacacgagaatcgcacacccaaaacgcaacgcggccactcgggccatgcagatagctcaaaaaatgaagtatattgtataaaaaaaaaaactgatttcatttgatttgatttgagaagtacattgtatatgtatacacatacatatatatatatatatagcagatcccgaacggcccctgcatatggtggctatgcaatatatttttgttgtcaatcttatcagaagacattttaccatcgaccacgccgccgattcggacgtacccttgaaatcatttttgttggcccggacaatcagcagagggaacaattttgaagttatcaatcgttaagtcattatttttggggacccgcaaatcagtggtgggaatttttctagcctagcctaggtggggtgccaggtatttgcttctaggttgggtaattggtactcgaactttatggggcagcggcaagaggaatgtttggctaacttaaggaaatggtaattcaacagaatctaaacaggtagatagagaaaaaaaaaaaccataatctgctgaaaaactgacaccttaaaagacacaaatagaagttttaaaacatgttttaaaagttctataatttttttggattaggatttaggattaatcgggattttcccgaaggatccatcaaaagcactcaacggtcattgcctctggttccattagagtcgtcaatcgagttttggggcaagtggttggcaaatggttggcacaaatttaaattaaaagccgcgtggagcggtgtttgcaagagtgtaattaattataatgaacagggccagcgctaagtgttttcgatgccgagatgagcgcaaaaaccaaccttgcaaatcactcacaatcacgatcagagtgcagcacaaataatccaaacaagttagccgtgtattctattctatttgcggccaaaaagcccgaagatccaaacagctccagaacatatttattttgaagctaaagcccgcccgatgatgtaatcccgaatgtgccagattttcggactggattcgcttaattgtcgcccgcaatctacggcaataaattgctgacccatttggaggtggcattttgtggcaaatatgcacatggatacaactatttacatacacaccagagtgactgtctgtctgtctgtctgtctgcgataaagaagtgcatgtaattacgctttaaaaacacatttgtatgtaaaatcccagccgagccccacctcaccaaagttcacattctaagccaagccaagtggaatccagttttggccataaaaaaaagggaacgtcttacggataaatacatgcatacatacatacgtacgcatgtacatatatacatatgaatgtaggcaggtacgattcttcccggttctttgtgggtctttggttaatcgaattcttcgggttcctccacgaaatctacgtagaaggaacataccgtgagtccaaacattgattaccgtttgcacgcatgcatttgaaggaatttggaataattatgcggcactcgcagtttcgaacgagggtggtttgatgggttctatcaacgcaaatgtgtcaagtgtcaagaattaatgctcatagttggttcttaatttatagcttaaggataatactataactctgttgttcgcctattaaatgtatgatattcgaatatcttcaatatacaaattctttttttttttctatgtatataagaatacagttctataaaaatcataataaattccagttgtaagctgtagctctctattttttctattattgcggattacctaataaacaataaaatgtatttttcacgtagctcacaaatcacggagcgtatgcaaaaatacagcagcccactaatttgttaagctccaatgttaaaaaaaaaaaaaaaaaatttgaattttttaacaaatgcaagactttatgtttttctaaaaacagattataattatatacgaatttgacgttaagtacatatgttagcactgtaaattcgaagtaaaaccgataattgccaagtagcagcagtattaactgatgtatttcaacgtaaatactttaaaccataaattaccccctgtcgtttatgtatttatacgtaattacaagttttaataccttacgagatatttatttttaccgcattgtaaggagtttctttaatattttacggtgaagtgctaataacgttttcagtaattacccaaaaatggcaaagggccaaagaaagtgctataatagtcgaagtttctcttgaccaaaaaccgctgtcgatgcttactgtaattcgtacattctgaaagccaacgaaagtatggaataaccgagaattaatgatccgcccattatgctaatactcgtgggccgtccctcgcattttgttgttgttgtacatttcattggacagtgcattaaaacacaaatacacaagtgctttctccgcattttagccgtctccgcacatcgggccaagaatcagcaagcagtatggtatatagtatactacttataagcaccgagaagcgtaaataaaatgtgagtgtgcgtgcccagtgtgtgtgtgtgtgtgtgtgtttatgatgagttcaacgaacctcgggaattgttgagaattagcaattcttgaaaaatgctaccaaaacgggcaacacagatacagacaaacacacgtacttcccattcgaaccacacagatacagaatacagatgcccaggcggcagtcgtacaaatacaaatatatgtttgtacatatgtatgtatgaccatcggttgtctgtatacaaatatgtatgttgccgatgatgaaagaaagaagaaagccaggagaaaaatacaacagaaaaaagacggcaaaaatgctcgcaggcatttgctacctcttttgttagctgctgcggatcaggtgggggcatcgtgttccggaggtggggtaatacactgagggaaaatgcacactgcccctttgcaatggtcatccccgtatctaatcttcagccatgacaatttgatgcgacttcgtagcaatatcgtagagctaagataacttttatttattttcaattctatttatgtcaaatcgatcgcaaatctaatcagttctaaacttaaatccacagcattattgtatggagagacccaaacgaagatccgtttaaaatgtgccacaacgaccttgcccggaaaatgtgtaaatcacaaggtaaatatggacattactgtctaatagtagaataatgtatcacttttatttaatgtaggtacataaatatatagattaccatttcttcaacaatttaatttgatttttggaatcaacatataagcaagtataaacaatacttggtgtaaatccgaactaagtcatcatatcactgatgatacgatctaatattacgcaatcccatagctattgcagtttagcttgaaaatatttctcatggtgcacctgtagcaccgtttgttgaacgttccaggtgggtttttgcctccgaaccaccgccacttcgccgatttgtgtgttccaatgaaagcgcggcaccaccggtgaaatggctaagggcgccttctcaagtggaaagcgttgtggtgtggtatgtggtatggtgtggtgtgtgtggtgcgatgctcgagtttggagctcaagttggcgctgaagatggagctggagtggctcttgggccacaaaaaccgcttgaatgcggctaagctcgacttgacttgacttggccgggcaatcgattcgattgcctaaccatcggcggtggagcctgcgtgaaatgcagtcatttgaccccatttcattggcaattcacaaaaaaataaaaaaagaagcaaatgaaaacctgttgctccgttcgaatgtcacgtgcagagaattgttctgcgcgtttctcgcgctcgtcacttgggatcccaatcaggcagccactttggaaacgattaagttggaatcaaatcgaaatagccgccgaaggggttttctttatcttacggcattaaattagcatacacacatgggtgttggtgttgccgggtcccctcgcctttcggtttacccattatacaatcttattcaaatttccagtcttcggctcggtcttcccgaaaaacaaaaacaaaaaaaaaaaaaaaaacgccaagaaagggtgaaaaaaagagccacaaaccatacaatttcataaaaataattaaactggttatagtttggcttggtttctcctctttcttctttctttttacctctgtatattttcattgggctttacttttgccttttctgcctgttttgtctatacattttttcgattttgcttttttttttcgcttgctccacaatttggattgattaaataatgttgcagcaagcgaaaacctttcacatttataaaactgcagtcgtgtgcgtgccgatcattatgtatgtatcgccttttctttgtgttgtgcacagcattttttagccgagtctttatttctttccaatttttatgcccaggctgcatcattcggcgctggagtgttggtaaagtgaaaggtgctcccacaattcaaaaagagcagaaaccaaaaaaacgaagcgaaaaaaaataaaaacacaaaaacacggatactgaactgccttttaacttgaaaaattgctacggtttcgtttttcgtgagcgtggtaaatggtaatggggctacgatgtaaatggccaacgtctaaatgcctctgcttttgccttgaaaagaaagtgcgaaatggccaggaatgccggccaaagaatccgaagatttcaacagctaacagctaaaaatcagaacccgcaatgaactcacatattacgcatacgccatgttgcagcctccaatgcacagtatgagtgcctctgagacttccatgacgtagtgatgtttataaatataacctaatatgtataaaaatagctggcgaaagggagaataggctgggtgggtgggtgtacattgcgggcttagcttatcaccaccatatgtttgtgcgctctttttgcgatgaaagtacgtaagcagcgcgtctgacgtacacatgaacaatttgccaaacggaaatcactgtgaaagtaaccaaaaaatgtagtgggggaaaaatgcgaataggcggtgcccaaggtggttaaaacctgcagaatctttgctaatcctcatcccccacagatggttcatctttgggatagtgggtgctcagcgaagatccaccaagtctcagccttcgagaccgtctaatgcctttcacaaaatcgctggcgagcgtcgaaaagccaaaatcgtacatctgcatatatgcaaaacagacataaccaaccaatttggcaatgcgcggatgagtcagagagctgggcgaccttattggagagcccataatgaattcactttcaaggcttctcggaaagataatgcttgaaaaatgtgcctgtcgccggttaattactgaattctaggccctaacttatgacactctaatggattttgatggagtgaagactggggtttctggtgaatccgattggtgcactctattttgggtttgctaaaaatatcatattaagtattatcatttttatatttattcatattattacattgatatttccaaaagggtgtttttcaaatttacttaagaccaacttatgacaataattctggtttcttcatcatagaaattctcttaaattcattgcagagaccgccggccctaagcactctcccttaacttttccgaatgtacattgaggtccatatggttactagaattacagaagaaaactttccccaaacatctttaaaaggtcttaaggtcaaaggggtataaaaatgtgttgaagaatttttatcatgttacacctaaaataactttttaaaaaattcaaagaaatagtaattgattttatacattgaagacatctgttaataaactcgggagcagaatttctattatttcttaggctcaaaaataaagttttttgaataattctagtcctaatgtaagtgaatgttttttgaccaattaaacattagtcttaagtccttcaaaactacagtgattatcgcttgctcgcatggtgccagataaaatgtcctatcagagggtggtctcctggaaccccgctccttaatcacttcttaaatgctacttccattgtttctccgcccacaagaagcagctaactgttgcttccttgttgcctgttgcctgttgcctgctgttacacttatcgtgtagcacttcattagcactggcaatatgtttgcagcgcccacgcccagttccccagctccccaatccccacagtccaccccctcgatgagtgggggtgaagctgtaacatattgtaacttccgaacgggtccatgaataattcacgctcttcggggctttggccacaagtcaactccttcgacatcctgacattgacgtcaacaaaacaaagcgcgaacagctggtcaaatggcccaaaggccgcccactcttttggccaaaagagagctctgctaccacaactagaaaacccggtcgaaaagagcaagctaagagtggattttccgcgtggacatactatggctgcgcatcctgcaacggcgcagcgcgtgtaaatccgcatgaatggccgacatgaatgggaaactatatatatgtatatatatataggtatatatatatatatatacatatatatctacagagagagggagagaaagagagagtggagccattgagactggcgcacatgtaaaccaatactatgtgtgtgggggcacaaatttaattatgcgcgcttttttttctgcctcgggtttttttttgctctttcgctggctcgccatatgtttggacttttggcatagaaattgtgtcgctggagcgagctaaatttgcaatagtcgtcgctgggtttctttgcattcgctttgtgctttaacctgttttgcagattgcaacggctccggctcattggaaatgtcaaagttaagcaatacacaatacgctgtacagcgtatagccgaacaacgcggcgtatacgcgatatacgagatatacagacgactgatagaccatattgaaagtatctaacgtgcatagctcgaactagttattcaaatatgctcccgagagtcaagacattaagctatcgaagttaacaaaatgccgacacagcctgttgccaagcacgtttttctgatttccgtttcttgacgctggagtttggtagtattctcgtgtgcattttaagtagcgggccttgcatttggccgttagaaaatctcagtctaacctcaacgaaatgcacatttgcattcgacggccaggcaacaggccatattatatagagtgtatagaccataaagggtatcgaattgggcgaaaagaaattgctaataccattatgcatgccccgcgcccccgccaccttttacttttttttctttttgtatattttgcttatataagcgaaagttggcacacaaaaaagaatagctctagaaatgtcagatatatacatatatttgcctttttcgcttgtatctcaatggaagtggtgaaaagttgctgacttctggtcttcttgttaatgctgcactttttccctctgtttcggtctttaactcttaacctctctctttccgttttgaccaacaaataaaatttcggtaagtcgatgattttcgacattggtcagcattcttctctgaaggcgaatgcaatttattttgttcaaggcaatcttttccggcagtctactgtttcgattgcagagcttcttcttgttcgaggccagctctgtgacgatcttgagaacttctagttcgaaacttagctttgttttcgctttctttcgagacacaaccctttctcacatactagcctatataagtgcgcgaattctacttagctattgagaagataagctcgtttctaagtccgcattaattaggcattctgtttccatgtgcttgctactcttatcaacgaaatgtgaaaatttcagcagtaattttagcgctgaacagaaacaatttgattttatattttcttatcatgactggaccacaatcaaaagtcgttaagctgaaacattgatatttttattcgcactggaaacgctttgtttggcctcataaactgtattcttcgtaaattgaataaccagttacacagagatcatcgtaagtattgttgttggtttttccaccgccaatcgattttcacagaattcccccgatcggcgaatatatgtttatattgtatgcgtctgtttttctagagctttacagattctgctgtgtcaactcttcattgctcccaactgatacggatagtcaggggaaccactcaaagatctctgaatgaaatggtaggggatttcttgataacaccgatcggaatctcggaaatgcagggcacgtgacattatcgctctctactggtctctctgaagacgagctaaccccaactgggactttccaatttgtggcctttcggaaacctcttgccaatttaatataattgattatcgacccgtcaagtcattattttgagttttttgttttggtttaacgaaagaacataaaatcccatggcatcataattattatttatttatttttatttttgtcaacagtttaagtgaaaaatggtgcgctaaggctaatcaaaattgggcatttcaggccttatctgggcgcaagtttactttttttttttttgctttatttttttggttacaaaatacggtgagataagattgttgatatgcttgaagagactttagaatgatagtttatattattaaaataatgccaaaatagaatactgataggctcgagctaacaaaacaaacgcttttggatgtgatctttcaaggaattcagctatctagccatggatgatatctaaccgcgatcttgatcttacttcccagaccatttggagggtattacggcggcgacttcccacagaaaccgataatttcttgttatgggcacacacaggcatttgagatacttatgaggtaattgagcgcacgccccgggtacgggtacattgtaccgcttacggcgggaaaaaacgcaatgcaacaaaaccaataaaaactgcacgcgcattttcccgggcattgggcctatttctgtccctccggctacattgtctacaagtcgagtagtcgccggcgcgcatttattatctcccaatagtaatgacactgacgagccatactctatttgactagctgcaaagtgcagcagcagcagcagcaggcaggcaggcaggcgaaaaaagtcattactttgcatttagaccagctgatagcagcctcttatcaactccacatgtgtcctcctcccaaactgtaatagattcttttcttttgtgctcgcccagcagagcttcctctacacagcgcgcaaaagttgagagcgaaaatttatgaaacatattatacaaatttatcgttataaagaaagcgacagaaattttaaattacgttgaaatgtattacaatttttttgttgtattgaatccgttgctttttaaagctaatttttatcaaagtgaaaaacattttatttatttatacttgaacccggaccatttctaagaaaaaatcactaagtacgaaaaaaaacgacgttattaattgaaactgatacaattattgtaagtatctactaaatttgattttgatctgttttttttttttaccgtgtacaacagcaagaacaagtgaaacggacggacttgggctgaatggacgggcggacgacatgtattcattactgtttccgcagcgataagcaatagacgacggcatctccatctatgagtactccgcaaatgaagctcagcccggcacatactcatttcattatattgaaacaattcacgattgcagtacgacgagtagttcaagttgcgggggtgatagtgaatggaactacgacgacaaaacaaccgaaacagaaatcgttcgctaatgataaatttcttttaatttcttggaaaacttcaattatcattatcgccacccaagacaaaacaactttgtaggacagcgaaacttctaagttatgaacagaaatgtttcctgaatgccagatatagtcgcagtcgcttatcaaaaaaaaccatgtaaattgatatattcgaacacaaaaagtcactaaaaattgtctttctcccaaaacgagcacgtaactgccaagataaaaagccttgaaagctgccttttcctttcggcactagagggtttgtttgattcggtcgtatcggtcgtatctatttggcaaagtttttttttttttgtttttctattgagtaatgccattgggttcggcaatccaagaacgtcctccacgaaaatgaaaccaaaactgtgattctgggtgtgttgtatattacggtgtctgatgtctggaagccgggcagttcgattagattctggtttgtttttttcactatacggttattttttttttttttacattcgaaattttggtggtgcggtgagcggacatttttatgaggtggcttgggacaggtttgatcgtaggccagtttgtcggtgatcggtattctctcaggtgatcgcatacatatacatataaatgcgaaccacttaatatgcagagaaagaaaagaaaactggctaaattccgtgggaccctggagatcgaaattcgtttcttcattttccttttctcaaatcgatcatcatacttagaattcagctcatgaataagttcacgttttttctccccaactgataagcttaatgtgggtcattaaagtgtttttctttagattttttaaaatgcaatttcgtttcgtggaagcacgactcttgcatgtttaaaatgtacaccgaaatgacttaataatcgtattgaagatgtctctgtagtcaaagatcgaagttcaaggagttcaccaagtttagttggggcattgccacataaaatttagtgagctataatatacatataagagctaccaatgtatatctcggacattttcttatcgttgcgttcgagttgtcggctttaactttcacatactcgtatagcccatatcaagcatacctgctgtaataaaagctctcaagtatcaatggttctgttctgactgatataatatgggggtacaagttgcttttcgcatttttaattgtgctcgggagtggtaatttgaacacttaccggatctaagtcggagtcccatatatctttgaggtcgccatcgtagaattccatggttggcgctagtcagatgcgctctaagaactcttttagttgttttttttttattgcggttcggggatggtgtggtatggtttaattcggttccactcggttgcagtcacactaatttttctactttaacccacttaagaactgtcttcttataatttttgtagtttatggtattatactattatttttatacgattttgctgactgaaaagtggctctttctccgctctttctctttctttatactttatcttctttattcctcgtgcgctcttctacctctctttctcttttattttttactttactttttttccgtaaagaacagttctgggtgatgactgttggttgcttctttataacacttattaaggggaaacctgttgcttccagagaatgttttcacttgacattgttatagtctgcgtgtgtgtgtgtgtgtgtgactttttcgtttgtatgtgtataccgggcattcattcgtattggttgtggtatttggggtgtatctgtgtacggatctaacttggtttacaactgtcggctggatttaacttgttgcatgcgcttttctcgtcggattatatttggcgttaacattaattgaattattaacttttttcccgattcggaaacgaaacactcgattttcatagaaaatagttattatatgtatgtttagattcaacgttgataaccatataattttagtttatttgatttttcttttcgctgtactgtgttttggactcgattacgatttcaattgatttaattgaattttttgatgtgttttgtgtgtgaatgggcagtaaaccgctttagaaatggctttgctcggcccgtgtataatagcatttaatatgtgtagttaatatcgttaactttagcaataatatttgtatgtttggatgtatgggatggtagcacacaattagaataaactgtccgtagtgcgactgcagccaaaaacggtactaaactaaatgtcggtgaaattcttgtgaatgcgaacgaacgaatcgaaacgtcagtcctctgctgacgtcgctgccgccgctcagtcgctctcttttccgctacaacgctttgtctctcttccgcacgtatagcgctctctttccgtctatctctttgtctctctctctctgcgcttataatgccggcaatttcagaatttcatacagaaaacctcgaacaattgatacttttgtaataaaaaaaataacaaatttaaattaaggatatgatgaattgatgtttcctcattaaaatgagaagagaaaaggtacaataaatggcctaaatatactctttcaatttgaaaagatcgctacaaaataacatcgtatttctaatatcctgtgttaatagtgttattgattcgttaatctacgggaaacgtttggggttgttgcttttcgttcccaaaggtcaactaatcacataccttatgttacatttgctatagtttaattgaatttattgacttcttaacgtgtttggggtagttgtaactgaagactgaagccgtgtactatacatttcaaatattgtattcccatggttcttggccaccaatctacccttgatactgtgtaacatgcgggttagccggcatcgaatccgaatccaaatgcgatagtatccgactctctcccgaaaagcgtgctcttagtgaaactttcacgctctttggggtttcgagaagtgaatgtaagttgattgtcgtaagccggctttgacgtcgttttgagaccggagatcggagaccaggggcccgagatttgagatttgagacccggagccgcataggaaaggaaaacaagtttcttccgacgctatgggctgcgtcgacgtcagcgttgcggcaacatttgttaacctgttttttattatagattttgtgttgttgctgcgagtatttgatttggcccgaatgcacgatggaataggacggggggtgtaccccgctctgcaaccagacc

SEQ ID NO: 16667 - DNA, 4416 bp, DROSOPHILA
atttagtttagtaccgtttttggctgcagtcgcactacggacagtttattctaattgtgtgctaccatcccatacatccaaacatacaaatattattgctaaagttaacgatattaactacacatattaaatgctattatacacgggccgagcaaagccatttctaaagcggtttactgcccattcacacacaaaacacatcaaaaaattcaattaaatcaattgaaatcgtaatcgagtccaaaacacagtacagcgaaaagaaaaatcaaataaactaaaattatatggttatcaacgttgaatctaaacatacatataataactattttctatgaaaatcgagtaaaagcgcatgcaacaagttaaatccagccgacagttgtaaaccaagttagatccgtacacagatacaccccaaataccacaaccaatacgaatgaatgcccggtatacacatacaaacgaaaaagtcacacacacacacacacacgcagactataacaatgtcaagtgaaaacattctctggaagcaacaggtttccccttaataagtgttataaagaagcaaccaacagtcatcacccagaactgttctttacggaaaaaaagtaaagtaaaaaataaaagagaaagagaggtagaagagcgcacgaggaataaagaagataaagtataaagaaagagaaagagcggagaaagagccacttttcagtcagcaaaatcgtataaaaataatagtataataccataaactacaaaaattataagaagacagttcttaagtgggttaaagtagaaaaattagtgtgactgcaaccgagtggaaccgaattaaaccataccacaccatccccgaaccgcaataaaaaaaaaacaactaaaagagttcttagagcgcatctgactagcgccaaccatggaattctacgatggcgacctcaaagatatatgggactccgacttagatccggtaagtgaatccttgaaaatcagccccgatcacgatatgcacgactggctgttcgatcgggacgtcaaagatcccaccgtcatactcaacgacaagctcatctcggatgccctgctcaatggcacacagccgatcaagacggagcactcctacagtctcagcagcgacgttgactccctgcccgattcaccaaaaagcctccaggccaagatcgaggacatggacgacgagtgctttcccgccatttcaccgaagacggcgaccaatgggcgcgtgaccatcgatcccaagtacctcaccttccacgtcccgcccacgcacgccacgcccatcagccggctgagcagcaatcccgccctaaacacctccgtcgcggatctaacacgatcctccggcctgcagagcctgcaggcgcaccagccacaccacggatccggctcgagccacgtggtggtggccaatctggagcactttcaactacctcagcacctatacgacaacgactgcagctcctcggtgtcgtcgttgcgggatggcagcatgtcgccggacatttgctccgacatcgagatcgacgagtcggccatcaaggatgagcccatgtcgccggactccagctgccccgccagtcccacttctcaagcgagcagctcgcagcaccagctcagccttaatctggcccacctgcagtcggaaatgctattcgagccaaagcactgtggcctcctgctaaccgccagcagcaacagcaacaacagcctcataaagtcccagcagcgccagcagcaaatccttggccaggacaatctactgatggccaaaatggagatcaagagcgagaaacagagcaccagcaatagctcggacaaatcgcatgcccacggctatggaatcccgctgacgccaccatcctccctgcccagcgatgattccgaaggtaacttaagtccggaacacctgtttgcgccactgtcgcccaacgcaaccgtttccatctctgtggccaatccagccggcggtgagtcatccgtacgggtcagccgcaccgctgccagcatcacacgctcgtcctccggatccgcatcagcatccggctccagtaccagctcaacggttaccacgacacggcagccgatccacacgccgctgattagctcgcaaccgaagggctccactgggacgctgttgctgacggaagaggagaaacgcactttgctggccgaagggtatccgattccgcagaagctacccctaaccaaagccgaggagaaatcgctgaagaagattcgacgcaaaatcaagaataaaatctctgctcaggaaagccgccgcaagaagaaggagtacatggaccagctggagaggcgcgtcgagatcctggtcaccgaaaaccatgactacaagaagcgcctcgaggggctggaggagaccaatgccaatctacttagtcagctgcacaaactgcaggccctagttagcaagcacaatgtgaaaaagtcctaaacaaccggattcacatggacccctcgatatcctagggggcttgtgtagccggaatcgtttcttgtttgcccgccttcccgagttttatattttagatctattatttgtatgtcagttgagttcagttcatttcagtttagttttttgtttcgatttaatcagtctgggagtttgtgaagaatttatgcgacgaggaaactttaatgaattttttgttcggcttttggatagccacaaagcggtataacattcccctcaatcctgctccaccgcaccaccataataaatattccacagggccgagatgaccagaatgcccataactaatatcgtataaataatatgtgtatgtaatcctagctacttgtagggcctatattataaagctatgtatattagtcatgcattcctgttatataaacttgatctagcttaggcaaatgaccagctgcagcaacaaccacaattacaattacaattacaaatacgagaagctcaaatgcagaagccagaaatccagaaagcgtctaaagagaagctaaataataatattgtaattaaacgaaatcaacagaccaaaaacaaaaacgtaaaaaaacagcaaagtaatgaaaaagttaacgacaacaacaaaaaaaaaaaataataataataatgaaagaacgatagaatgatagaaagaaagccgatcgcaaataggctctgattgtatatgaaatccagattggagttgagccgacagttggaggcgacatgtacattatgttttaataatgattgaatgaatgaattaacgaaagactcccggagctcaatctctgtgctgtctttggcatgactattgttcctttaaacgatatttctcaaaacgaataacgaaagctgacgacgagataaaatacctaaacaattccataatgtagctatataggtggattatgtaacgaactatgtctatgtgcagcatttaagtttctcttcatcatctgttcgccagcgggcgtcaagttggagtttcaatagatggaaagcatacgaatttataatgggtatccgtatccgtatctgcatccgtatccatatccgtatctgtatccgtatccccaattcggttgcgttctccacctgccgcgttgcctggccaatttaaaacaatttccgagccaattatgaaaatgaattattgtttgttaagttttattttataagacggcgctgcactgaccgaagggatattttgagagtataacccaatttaatcaaatttcgcagcaattattttgttttttatgtttacaatttgtgttttacgttttagtgcaattttttggcatacatacatatttatacagatatttttgtattcttttcgcagcgttctaaatgagtcattctagtttttattagttgaatttataaacacaaaattacttaacggaaatttcaagcgtaacccgttgatttcctatcaactcgataatatgtatctataaaatataatttagctatttctacgtatgtctgtgcatgtgtgtataaatcaagcgggcgaagttgtgcaattgttagaaaatttttaaaagaaagatatttagtaaaaatacgaaaatcagaaatcgatgttgaaaaacaaaacgctcgtgcaatgacaaacaaaattttattaataaagcgttaaacaaacaaattaaagacaacatgaaatatacattatgatatatttatatatacaagtatgaataatgtacgactatttactattttttggctatagcattttaaacgcatatattgtatgtttaacgttgaaaatggaaaaaacaaacaaaacaagaaaatacatcaaaaaaaattgtaaaacttttatgattggttgctgtaatttggcaaaagtaaaagtgcaattccaaataaaattcaaacaaccatacaaacagcag

SEQ ID NO: 16668 - protein, 518 aa, DROSOPHILA
MEFYDGDLKDIWDSDLDPVSESLKISPDHDMHDWLFDRDVKDPTVILNDKLISDALLNGTQPIKTEHSYSLSSDVDSLPDSPKSLQAKIEDMDDECFPAISPKTATNGRVTIDPKYLTFHVPPTHATPISRLSSNPALNTSVADLTRSSGLQSLQAHQPHHGSGSSHVVVANLEHFQLPQHLYDNDCSSSVSSLRDGSMSPDICSDIEIDESAIKDEPMSPDSSCPASPTSQASSSQHQLSLNLAHLQSEMLFEPKHCGLLLTASSNSNNSLIKSQQRQQQILGQDNLLMAKMEIKSEKQSTSNSSDKSHAHGYGIPLTPPSSLPSDDSEGNLSPEHLFAPLSPNATVSISVANPAGGESSVRVSRTAASITRSSSGSASASGSSTSSTVTTTRQPIHTPLISSQPKGSTGTLLLTEEEKRTLLAEGYPIPQKLPLTKAEEKSLKKIRRKIKNKISAQESRRKKKEYMDQLERRVEILVTENHDYKKRLEGLEETNANLLSQLHKLQALVSKHNVKKS

SEQ ID NO: 16669 - DNA, 3726 bp, DROSOPHILA
ttttaaatatttctttacttgcagtcttgcgggtttacgccaaagcattgggagagcctcttgcggaaaatactaagcaagcaggaggcgctgcccaattggaaggcacacattacgggtttgtagcttctactatattaaaatacttacgtaattcaatggttaacactttcgcagagattttaaacaatctggtggctgagctgagctttgaggaactgttgcaatgctttcccagcgaagcgattcaaaatcgcaacaccgcacaatatttcgccacggaatttgccgagacatgtatcttgtatgaaaacgaggagcttgtctttaagaatcctgatctaaaggagggtcacagggatcacatgccgatggataacatagacgaggacaatgtgtttgagttaacactacgcaaggcggtggccaagcagcggagtattgccctgcggtccatgatcgagtccacaggaactcagctgttcgacgcaactagtaatcccatgtataacctgtaggcgatctacattcctcgttaaaatagtttaaaccaaaattatcatattgaaaattgataagattgatattaacgtagcaaagaaagcttttccacttttaccacagaccgatcgaaatgtactttgtaattttaggttacacccaaacagggcgttaattattgacaattatgtgtgacacaaaacacaacattcgaatactctagccttcggtgatttatgaaactgagctgacgaggaaaactcccaagctgtaggttgtaaaattaactagctcgtcgcgcacttatgctttagttgccatatatgtataaccagatgtgcgaccgatacttcaatttaattcatttatacctgcatttgtaactgtactaaatcttcaaccaaccgagtttcctttaaactttgctttaaaacctaagcagtatttgtaacctagttatacgttggtttcatctacccttttatttgcccacttccagcacacttttatgacaaaaacaacaaaatctagtgatatttttacttctttcattgaatctgaacaataaagcataaatacattataatggccctactatttcccgatgagctgaaaatttattcacctgacagcattaaaatacggttgcattgaagccgctaatagtcactacttattctggcaattaaattctggcttctgtggccgtcctaaggtaatttaacgtgcgaaaacttgcggacagatttctccgccgtgaatagcttagccaattaagggagctagacatcgcgcgagtgccattctaagcaggattggctgcaattggcgatatcgacagcagcatgttaaagctggaccaatcgaagttggtttcgggggagcctaaatccggatcgggtgacatagacataccgaagacgtcagaggagaaccagctggacgcgatcatcgttgagattggccagttcggacattttcaagtcttcaactacttgctgctttgcctgcccatcatctgcaacgccttttactccatttcctacgtcttcaccgccagcgatgtgccccacaggtgggtcagtgaaatggttatggtgctgtacttttacgccggaaattcttcataggtgcaacatcacaatgtgcgatgggttagactccaggtatgaagaaccattcctaaatttcaccactccacaacgtcacggcaactgggctcaatgtgagcagtacgccgtgcgatccaacctcgtgggtcaaccttcgtgcaatgtcagcagctttgatgttggtcagagggtcccctgcgatgctggctataagatgacggacggcgaaaagacaatagcagctgaggtatgatacaaggtgtcttccagcaacgccgatctaatttatattaccacagtttaacattttctgctttgaccagtggaagctgtcaatggtgggaaccgtcaacaacattggacagtttgtgggttatctagccaatccgtgagaataaagcattttaagtttccgtcagatctttcctgttctgcttcatgtggttcacgcacaccctgatcgccctcggtctgagcctgcattctgcccagttgagtgggagcaagttcgaaaactttagcgtgactggtcttatgcagctgcctggtatcctgatggccaccacactcatgaactggataggacggcgacggtcgctcagctcctgtcagttcacttgtgcagtcctcctccttgcagtggctgccacggatgaaggtaagcatgggacctaattcgtggttaactgagactaaaatgttgtttgctggattagtgtaccctgtgacctcttcaatcctatacttccttgctttatgatcctgtacttcttcacctccgagatctttcccaccaactgcaggaacagcatgctctcctcctgctcaagtatgggtcgctttggctccatgctgtccccccagaccactctactagtaattaaaccttagcttaaaagttaatagccgacaagttacaatggattccccgtacagatcccctactacaaatttgcgcctcacctactattcgccctattcggcttcacctgctcgggattggttttgttcttcccggagacaaccaacaaggtgctgcccaccacgctggctgaatcttgccccctggacaagagtataccaagaataaaagtgttaaaaagttctaactaatacacactatcgcgtcgcccactttggattttgtagtttttctcggctaaaatacttgcaatacttggtttgggcaaacaaaattcatgtttttggaaccaaaaatatgttcaggctaataagttattcgacagtggcgaagattacgttaaaacaaaaacaatcaaataaaagattcatcttttatgtgacatgcataatggtgtgcaggaccgaaagctgcacatttaaaactgtaaattttgtatggaagcaatagaacaaagctaaatgccttttaagtgcatgggaatacatgaaaatacaatgtaaaaatgagttacggcagagaccacagaagtaaaacaacgcagcgcaaaaatgaaatggtttaattggatgtaatgaatgtaagttggttactaggtctctcagcaaaaaccttgattttgattataaaataaagcaagcggaatagaataacgtagtagatttacacctagatttcatatagtaaataaagacaattcacttgtaaccctgaacaagaattaagttagttttaatccgaaattcaaatacgttgcagtaattaaacatttgcaaaaacctatgaataccgaagaacactttattttaaatttgtttgccagctgttcctatgtcagatttccaacatggtcgtacaattgccaagaaattaaaatgaaaatcttaataaagagaaattatattgatttaaaacattttaatttattttcactacactctacaaaataaacacttttttaataggaaaatatgcgggaatatattaaaagatagaatgaaatacttgctactaataaattaatttatggggggtaaacatacttttctctaatatcaaggcttcacaaacacaaaaattcacatctagctgtctttaagatcgagcgagctcatttgctatgctctttgacttctttatatattcctattcaggtctttttttcacccatctcattacattttttttata

SEQ ID NO: 16670 - DNA, 1357 bp, DROSOPHILA
cacacttttatgacaaaaacaacaaaatctagtgatatttttacttctttcattgaatctgaacaataaagcataaatacattataatggccctactatttcccgatgagctgaaaatttattcacctgacagcattaaaatacggttgcattgaagccgctaatagtcactacttattctggcaattaaattctggcttctgtggccgtcctaaggtaatttaacgtgcgaaaacttgcggacagatttctccgccgtgaatagcttagccaattaagggagctagacatcgcgcgagtgccattctaagcaggattggctgcaattggcgatatcgacagcagcatgttaaagctggaccaatcgaagttggtttcgggggagcctaaatccggatcgggtgacatagacataccgaagacgtcagaggagaaccagctggacgcgatcatcgttgagattggccagttcggacattttcaagtcttcaactacttgctgctttgcctgcccatcatctgcaacgccttttactccatttcctacgtcttcaccgccagcgatgtgccccacaggtgcaacatcacaatgtgcgatgggttagactccaggtatgaagaaccattcctaaatttcaccactccacaacgtcacggcaactgggctcaatgtgagcagtacgccgtgcgatccaacctcgtgggtcaaccttcgtgcaatgtcagcagctttgatgttggtcagagggtcccctgcgatgctggctataagatgacggacggcgaaaagacaatagcagctgagtggaagctgtcaatggtgggaaccgtcaacaacattggacaatctttcctgttctgcttcatgtggttcacgcacaccctgatcgccctcggtctgagcctgcattctgcccagttgagtgggagcaagttcgaaaactttagcgtgactggtcttatgcagctgcctggtatcctgatggccaccacactcatgaactggataggacggcgacgtgtaccctgtgacctcttcaatcctatacttccttgctttatgatcctgtacttcttcacctccgagatctttcccaccaactgcaggaacagcatgctctcctcctgctcaagtatgggtcgctttggctccatgctgtccccccagaccactctactaatcccctactacaaatttgcgcctcacctactattcgccctattcggcttcacctgctcgggattggttttgttcttcccggagacaaccaacaaggtgctgcccaccacgctggctgaatcttgccccctggacaagagtataccaagaataaaagtgttaaaaagttctaactaa

SEQ ID NO: 16671 - protein, 336 aa, DROSOPHILA
MLKLDQSKLVSGEPKSGSGDIDIPKTSEENQLDAIIVEIGQFGHFQVFNYLLLCLPIICNAFYSISYVFTASDVPHRCNITMCDGLDSRYEEPFLNFTTPQRHGNWAQCEQYAVRSNLVGQPSCNVSSFDVGQRVPCDAGYKMTDGEKTIAAEWKLSMVGTVNNIGQSFLFCFMWFTHTLIALGLSLHSAQLSGSKFENFSVTGLMQLPGILMATTLMNWIGRRRVPCDLFNPILPCFMILYFFTSEIFPTNCRNSMLSSCSSMGRFGSMLSPQTTLLIPYYKFAPHLLFALFGFTCSGLVLFFPETTNKVLPTTLAESCPLDKSIPRIKVLKSSN

SEQ ID NO: 16672 - DNA, 2689 bp, DROSOPHILA
gtacttcttctcgaggtaggccgcccaggcgaatagatactggcccacggtggttatcaggaagaggataaaggcgccctcatagagcccgatcttgcgcatacgtcggtaatagtagagggcagacttccagttgggcatgccctccttcagtacccggtcgtacttctctcggcgcgacggatctttgagaacctcgtagatggaaacgaggttgcggaactggatgttggcatcctcggccggattcttgtccggatgcaggacaatggacagggtgcggaaggcgcgcttcacctcggcgcccgttgccgtttggttgatgcccatgaactcgtagaagttgcggtttacctcctcgaccaagtcaaagatctccagttcctccgagtgccaggcgctggcgccagtggcgcagagcagcaggaggccggccagcgtcagctccggtcgcatcatcatcgtggtccgagttccgaatccaggtcaggtccaaatcggagtaaaatccaaatttaatgcgccagacccacgcacgcaccacaaatacacacacacgcaagcaaacacggataggctcagctggaaagtggcaacgtcagcagactggtcgctggtgcgacagcgttgccaccactcggtaaagtttgtgtagacaaaaagatatttgcaacgtttctattatttatttttacgaatttctgtttttttgttcaaaaataatttactgcactaattctgtaaccatatatatgtaatcaaattttacaaatttttttttccaactaacgacacacagtaggtcaaacagatttcgtttgtttgctcattaaaatttgctcataacatttgtcaagttcttcctgaaaacaataaaacaaattctctttctataccgaattttgttttaacttgatacacgtttttcacctgtttcaaaccaaaacgcccaacactgtcgactgttatcgataagctctcgatggtgcatcacttgtgcaactaaatgaatagaagcgacgcgacgtttcactcttataagaataagaaatcagacgacaatgaagctgctctatatgctgtggctgctgagcatcttggtcctggtctcaggccagcagaagcagacagctaactccgccaccaaggacgccccagtggtggccaatgcgacgaacgtgctgcaggccaaagttattccaggatcgaaattggaatctggatctccgggagctgccagccagctggtgccgggtaaggatgcagctgtgttgcaacaggacaagaacttaaacaaaacggccacagcagaaaatgcaggtaaagccaaaaatctcacaaacaccgatacaggagtgcccaccattcctttggtcacttccaagccggctgtggagcaaaaggcggccaaggaggcgaccaatacgacctccactacaacttcttccaccacgaccaccaccaccacggcaaagccagctgcaggatcagccatagtcaccgagggccagtccatgaaggatgtcaccaagccgagcaactcgtccaccaacggcgcggcaatatccccgaccaacagcacccacaccgccacagccaccaccaaaactgtcaattcaaccatcatcgcaaccacgccaaagccgaagaagcccccagtggtattgagcactgatatacaccaggagggggaggatatggcggagctggaaaagagtcaggataagccaggtacaaagggcgctcccacccagccattggccacaccaccagagccattggtgcaggggcttactggaagtaatcttgccgatcacggagagaacgggtatgtggtacccattgttaccgtgctgctgaccgttccgctggccatcggcgtggtgaccatcatgtaccgccgcttccgcgacatgtggagcaccaggcactaccgtcgcatggacttcctggtggacggcatgtacaacgactgacgaagacgcggacgacaggctggcggcaagggcggccacttcaccgggtgctccaacgcctcctccggcgcactcggatgattattagttgtttaagttatacacgactggacgtgcttgcattcaatgcaagatcgccggatcgaaagcagagtgagagtagcggagagcagaggaggcggtgggaaaacgaaacgaaactatgatattgctcagtcaattagaggaggaggagaaagggattcgctttgcagcgtggctaggatacccttccgagcggccaaattgaatttaaagccaactgattttcaacactaaattcgagtggactcttaagtttaagcatttggattattgtcaagcatttgttagcaatcaaaaattgataccggcacttatatgtaccctatatatacatatatctacttaggctgctgctgtacatcgaaggctgcggactctcaaccatcaaccatcaacatcaacatcagcgcaattagcaatcacttgatgcatccacaatctagccgtaatgtgccttacgaaccagctctatatacacctttacacatgatattctccatcgccgggtcttcgaggtgatttcttcgcatttactttacgcaaccaagcagcagcactcactcaaaaaaaaaaaccagcagaaaccaaaaacacaagcaatcggcctgaaacaagcaaatttattgcat

SEQ ID NO: 16673 - DNA, 1285 bp, DROSOPHILA
aactaaatgaatagaagcgacgcgacgtttcactcttataagaataagaaatcagacgacaatgaagctgctctatatgctgtggctgctgagcatcttggtcctggtctcaggccagcagaagcagacagctaactccgccaccaaggacgccccagtggtggccaatgcgacgaacgtgctgcaggccaaagttattccaggatcgaaattggaatctggatctccgggagctgccagccagctggtgccgggtaaggatgcagctgtgttgcaacaggacaagaacttaaacaaaacggccacagcagaaaatgcaggtaaagccaaaaatctcacaaacaccgatacaggagtgcccaccattcctttggtcacttccaagccggctgtggagcaaaaggcggccaaggaggcgaccaatacgacctccactacaacttcttccaccacgaccaccaccaccacggcaaagccagctgcaggatcagccatagtcaccgagggccagtccatgaaggatgtcaccaagccgagcaactcgtccaccaacggcgcggcaatatccccgaccaacagcacccacaccgccacagccaccaccaaaactgtcaattcaaccatcatcgcaaccacgccaaagccgaagaagcccccagtggtattgagcactgatatacaccaggagggggaggatatggcggagctggaaaagagtcaggataagccaggtacaaagggcgctcccacccagccattggccacaccaccagagccattggtgcaggggcttactggaagtaatcttgccgatcacggagagaacgggtatgtggtacccattgttaccgtgctgctgaccgttccgctggccatcggcgtggtgaccatcatgtaccgccgcttccgcgacatgtggagcaccaggcactaccgtcgcatggacttcctggtggacggcatgtacaacgactgacgaagacgcggacgacaggctggcggcaagggcggccacttcaccgggtgctccaacgcctcctccggcgcactcggatgattattagttgtttaagttatacacgactggacgtgcttgcattcaatgcaagatcgccggatcgaaagcagagtgagagtagcggagagcagaggaggcggtgggaaaacgaaacgaaactatgatattgctcagtcaattagaggaggaggagaaagggattcgctttgcagcgtggctaggatacccttccgagcggccaaattgaatttaaagccaactgatttt

SEQ ID NO: 16674 - protein, 299 aa, DROSOPHILA
MLWLLSILVLVSGQQKQTANSATKDAPVVANATNVLQAKVIPGSKLESGSPGAASQLVPGKDAAVLQQDKNLNKTATAENAGKAKNLTNTDTGVPTIPLVTSKPAVEQKAAKEATNTTSTTTSSTTTTTTTAKPAAGSAIVTEGQSMKDVTKPSNSSTNGAAISPTNSTHTATATTKTVNSTIIATTPKPKKPPVVLSTDIHQEGEDMAELEKSQDKPGTKGAPTQPLATPPEPLVQGLTGSNLADHGENGYVVPIVTVLLTVPLAIGVVTIMYRRFRDMWSTRHYRRMDFLVDGMYND

SEQ ID NO: 16675 - DNA, 3308 bp, DROSOPHILA
gacacgcagccgtgactcactcgcagctggcgcgatatgtcgcagggtcggatgcccaggcgggccagctccacgatccgcatcctggtcgcattgggcagcggacggccgttgacaaagacgccgcccagctggttcacctcgccatactgcggacactgcgactctgcaaagagaagattgcggattagttaggttggtaacataaaggaataaaggaagtgtctatacattttaacataaatatgaaaaactgttttcggaaactgttcatatgccagagtatgccacagtatcatccgaaagctattcccggttcccagtacaaaatgcgaacaaagagcgttgcctgggaatgggaaggcgaacaaaagcacatttgcgtctaattagtttcggtggcaaatgagtgagccgagtggctaggagtgggacctgcagaagcggtggagcggcggagcggaggaggattggcgagcggcagcccaagttgagtggagagccgtttgttcggctgaaaatcgctaccatttgcttcttagaactgcggatgtgggtgccccgattgtgactgggaaaacacaatttgaatgcccggaacgtgcggaaatgcactttgagcgatgacgcaaagatttccccttggcgcatagaacactacttaaggataggtgcacatgggtgtatcctattcttgagattgaagaatgattaaggttcagcagagaagctattttcacaggaccataaataaagtaattaacaaccactcctgcgaaagggacaatatgggaacaattgtcaattatttaagacatgaagacacacccctcaaaacaacctgtgcaattttgcacgcaaataaaggcggttcttttcgtgaataactaactagcattggacaattaaacaacgcgtataaatgcaactagtttagggtactgccctcagtcttcaggtgacaaagttcaagtcaatcgaaacctctaaactttcaaaaatgatttttaagtacattcaagagccagtccttggatccttatttcgatcccgggattcgctgatctacttaaacagatccatagatcaaatgggatggagactgccgccacgaactaagccgtactggtggctctattacatttggacattggtggtcatagtactcgtctttatctttataccctatggactgataatgactggaataaaggagttcaagaacttcacgaccacggatctgtttacgtatgtccaggtgccggttaacaccaatgcttcgatcatgaagggcattatagtgttgtttatgcggcggcgattttcaagggctcagaagatgatggacgccatggacattcgatgcaccaagatggaggagaaagtccaggtgcaccgagcagcagccttatgcaatcgtgttgttgtgatttaccattgcatatacttcggctatctatccatggccttaaccggagctctggtgattgggaagactccattctgtttgtacaatccactggttaaccccgacgatcatttctatctggccactgccattgaatcggtcaccatggctggcattattctggccaatctcattttggacgtatatcccatcatatatgtggtcgttctgcggatccacatggagctcttgagtgagcgaatcaagacgctgcgtactgatgtggaaaaaggcgacgatcaacattatgccgagctggtggagtgtgtaaaggatcacaagctaattgtcgagtgaggaagaatggaatactctttgcagaatgccataatccactcaattttcctcattagatatggaaacactctgcgtcccatgatatccgccacgatgttcatccaactactatccgttggcttacttttgggtctggcagcggtgtccatgcagttctataacaccgtaatggagcgtgttgtctccggggtctacaccatagccattctatcccagacctttccattttgctatgtctgtgagcagctgagcagcgattgcgaatccctgaccaacacactgttccattccaagtggattggagctgagcgacgatacagaaccacgatgttgtacttcattcacaatgttcagcagtcgattttgttcactgcgggcggaattttccccatatgtctaaacaccaatataaaggtaagataatatcatacaaaaccattacattttattgtaaacaaaatctttcagatggccaagttcgctttctcagtggtgaccattgtaaatgagatggacttggccgagaaattgagaagggagtaattcggtttagtgccacaaatttgatcaactcaatttaagagagtagtttcacttgtgcacaatcaataaatgaaaatatatagaatgattatataaaatttaaatgtgttgcaaacattatggcaatctattagatatctggaaaatcagtttgtactttcgttatcataacttttctggcaaacaaagcacaactgaaactttactataatagcttgccattatatggtgtcaaatgggtagccctcttatctggagactggaggagtctcctcctcctcctcctcctcttggcacctgccgctggagctcgctgcccgtctgaaactgccgtccggtccattaccattatgggcagttggaggcactgctgcacatctgcgccgtcttctaatttcgaatcgtgttccacaacagcaactccaagtgcaacacgtactggagagtgcagcgccataaaaaccgcaatagagctcccgggttactcgtggcggcaatcgcaacaaatcaggaaggaaccggataaaggagcgataatgaaccgagagacggagtatatcgacctcgatgctgctccattcaggaggctattcgcgacttacaagctcgttttcccgctgctttgatatcgcattaccatcccacttgttgcccgacattattccccgatcccccaatcccccgacttctccactcccccacttccaacgatccccggctaatgatccccaacagtgtcgaatttcgtgtacatagtttatggttatggatttgcgcacttgtcaattgcagttcgatcatagctagagtacttgcccacactcgggctcgtttcggagtcccagacaaagcgaacgtgcagctgcataaatatggaaaactgttcgaaatcgacggaatctcccctcattaaaggtggttgtaatagatggcatataactagagatcgactagggaatactgttagtagctgcttaggaaaaggtttggaatgcggatt

SEQ ID NO: 16676 - DNA, 1194 bp, DROSOPHILA
atgatttttaagtacattcaagagccagtccttggatccttatttcgatcccgggattcgctgatctacttaaacagatccatagatcaaatgggatggagactgccgccacgaactaagccgtactggtggctctattacatttggacattggtggtcatagtactcgtctttatctttataccctatggactgataatgactggaataaaggagttcaagaacttcacgaccacggatctgtttacgtatgtccaggtgccggttaacaccaatgcttcgatcatgaagggcattatagtgttgtttatgcggcggcgattttcaagggctcagaagatgatggacgccatggacattcgatgcaccaagatggaggagaaagtccaggtgcaccgagcagcagccttatgcaatcgtgttgttgtgatttaccattgcatatacttcggctatctatccatggccttaaccggagctctggtgattgggaagactccattctgtttgtacaatccactggttaaccccgacgatcatttctatctggccactgccattgaatcggtcaccatggctggcattattctggccaatctcattttggacgtatatcccatcatatatgtggtcgttctgcggatccacatggagctcttgagtgagcgaatcaagacgctgcgtactgatgtggaaaaaggcgacgatcaacattatgccgagctggtggagtgtgtaaaggatcacaagctaattgtcgaatatggaaacactctgcgtcccatgatatccgccacgatgttcatccaactactatccgttggcttacttttgggtctggcagcggtgtccatgcagttctataacaccgtaatggagcgtgttgtctccggggtctacaccatagccattctatcccagacctttccattttgctatgtctgtgagcagctgagcagcgattgcgaatccctgaccaacacactgttccattccaagtggattggagctgagcgacgatacagaaccacgatgttgtacttcattcacaatgttcagcagtcgattttgttcactgcgggcggaattttccccatatgtctaaacaccaatataaagatggccaagttcgctttctcagtggtgaccattgtaaatgagatggacttggccgagaaattgagaagggagtaa

SEQ ID NO: 16677 - protein, 397 aa, DROSOPHILA
MIFKYIQEPVLGSLFRSRDSLIYLNRSIDQMGWRLPPRTKPYWWLYYIWTLVVIVLVFIFIPYGLIMTGIKEFKNFTTTDLFTYVQVPVNTNASIMKGIIVLFMRRRFSRAQKMMDAMDIRCTKMEEKVQVHRAAALCNRVVVIYHCIYFGYLSMALTGALVIGKTPFCLYNPLVNPDDHFYLATAIESVTMAGIILANLILDVYPIIYVVVLRIHMELLSERIKTLRTDVEKGDDQHYAELVECVKDHKLIVEYGNTLRPMISATMFIQLLSVGLLLGLAAVSMQFYNTVMERVVSGVYTIAILSQTFPFCYVCEQLSSDCESLTNTLFHSKWIGAERRYRTTMLYFIHNVQQSILFTAGGIFPICLNTNIKMAKFAFSVVTIVNEMDLAEKLRRE

SEQ ID NO: 16678 - DNA, 11502 bp, DROSOPHILA
aacgatttcgggaaacgcttaccatcttgatttcgtgaaggcgaaaaaagaaggaaatcacatagcgatggcagcgtgccgtcaagccatgcgctatcgataggttttcgtttcattgttgtgacttgatatgcatatcgatgtttgtatagttcttaagcactgtttaaactattttctactttttgaagtaaaatcaattgtttttacatttgttttgaatgtgcatatattgaaacttagtacagaagaatactattattattagttaatgaagtttgtaaacgccttatcaattaggtataccatgtttgtttgttttatgtatttttagtgtcacgaaactttatctgcgaacctacgtataatacatttttgccccacattaattattttcaagtaatttttaatgttcatggaactgaatgcttggttttttcatcgatctccacagaaatatgctaataaaatgacaaaataatatatttcatatataatatttcgatatcttaacggtcacttgatgctgagcgctgccagatcaatcagattttaagaaaataccaaaaagtgaaagtggcattgccatcgagggcgaaacatatgttttgttttgctcgcgacttgcagcgataggcggcgacaagcaacgtcgttatcgaagaccgatagggcccgatacaaaaaaaaaataaatcgaaatattttcaacaattttctgtggaaaataattggaaatatagcgaatctccagcagccgaaaccggatgcgctggtggcccgggcccagcggcaagtcgtgagcaatggcagcagccagcgtgcgctggctagagcaaatctaaacggccaaaacggcaaccagttagatagccaaaaatttgcataaaaagtgagcgattaaaatgcagaaaatgtacgcgttgctagcaaccttgacattctggacgctggtgctgcaaacagagcaggcccacccgtccacatcgccgtcggcgccatgcgatcgcagccggaaggtgttcacggagccctacggcgaaatctccgatggaccctccggctttaactacacgcaggactcacattgcgagtggctcatcaaggcgcgcaatgatagccagtacatcacgctaaccttccacagcatgggcaccgagtgctcctacgactacatttacgtctatgatggcgactccttcaactcgacgctcctggggagcttcagtggacgcacccagccccagcgactggtggcgcgcagcgggagtgtaagttgtgttttgccttgacgagtggttaaatatataggatctatttgtggaataaagttattcaaaaacttgcacaattagaaacccggaatatttttaccattcatgaccttcaatgagacaggctccaaaataatctgttgaatattatctttatgcattagggtcaaacttacatccgctaagcttgatcttgtaccaatatatttataacatggtggcagccattaagggacactgttcaccattcatagatgcccttctcatagcttatcttctttctgcagatgctcatcctgatgtacagcgacacgaattacgtgctggacggctttcgcgcctcttactacatatcaaactgtcttaacaactgccataatcatggaaagtgcgtgggtcatcagtgcgtttgtcacggcgagtgggtgggccccgactgcgaggatgaggcctgtccccagcgatgtggtgagagccagggacgaggtcgttgccagaaaagcatatgccattgctcgcgcggttacagcggccggctctgtgatctgagtgatcatccagcgggcagcagctggcgctggctggccaccgacgccgagggaatgacggcccgtgccgcccacagcgccgtatacatggaagacgaggacgcactttacgtcttcggcggatatgatctaaataacgtgataagcacgcttcaggtaagtcgtatacactattctattgtattcacgatacaaaagaacgtactaatttggttggatttcagatttatcgcttcagcaccagccagtgggaggatgaatggggtattgcgctccagagtcgccgtcacttctaccatcctcaaaaaatcgaccataccttgcttaaggccgttctccagcacaaaaacgaggacgaggccaagctatggggtctgaatagcgacgtaagcttcttccgcaacattctgtacaccttggcggaatccaatctgcaccagcgccgcacgcgctcctccctgcctcttacgattgtgaatgcgaattcgacggatgaagagttgaacgagtatctggaagatatattggaggaggttacggatcacaagccgcacggacgatatggccatgcagcggatagtgtgcccggcggcttcgttatctatggcgggaagcatgccaatggtagtttctacagtgatctctggcagtacaataatacggaaagtggtggcaaatggaagcaaatggccattaggtccgcagtgaagccgcctgctttggccaggcatacgcttaacaccgctggatcgtatctctatatattcggtggtagtctggagacgggtgagttctcatccagcgtatatcgtatcccacttcccctctctgaagattcgcaatgggagctggtgcaaccgagaggcggcaagaccttggacgttcgcctggcagcgcattcgacggtctattacaaagccaccaattcgttaattgtgtttggtggaatcatgacgagcttggcccgcttctctaagctctcggatcgtatttacgcatttcaactggatcaaatgcactggacggagattttatacccccgaacggcgctcagggacaccaatatacccagggagcgagcattccacacggccaccatttcgggcaactacatggttgtcttcggtggctatactcaccggcacaacaaagatgagatttgctatgacaaccaaatgtactggtaccatcttagctgtcacatttggattaatcaagtggtttccgctgatgatagtctttaccccaagccgcagggtgtatttgcacatgcggctgctctgcgccggaatcacacactcctgattgtcggcggttaccatggaaatgtgaatgcggatctctttgcctacgaacttccccaggtgctaagggttgagaatactctttacaatccggagatctcctgcagattgcattcctcgcacaccgcctgcctttcgaatccggaatgtggctggtgctcggcagatagcagctgctacggtcgcaccatcggtgccaactgcacaactaatctgcaaaccaccagatgcccaggtatatgcccctcactcggcgattgtcactcgtgtttggtacatggttcgcaatggggaaagtcatccggaaataaggcagcattctcggtggccagcaaactgggattaaacgagtgcacatggtgtgtacagaatgcaaaatgccatcatcgcgatgacaactacggaatatgtggagatagttcaggctggtggggtgacaagggcactgagattcggcgaccatcgttgtgcaccagtactgatcgacgcccgggacttacatatatcaagtaccactttccgatcaactacaccatgccggattacgtgggtattgtgaatgctactatggtggattttgcctcgccgccgtttaccacatattttgagcacaaactcgaaggagaaatgctggcccgtttggtgggattcgtgcgtccgcaacatcaatggaacaactcagccatccaggtgtgcaccagttactcctcggctgtgttgcgcgctggcctgggtcttaatctcgatgagcttgtaaacgtcactacgcagagctcaaaccagagctactgcagcaatgtccagcttccaaccaccgagcaacctttcaccattgattttcaggtgagtgctttacacaattttctctacttctaattaaaaaatattaaactacagactcgacgaaggattggaggaaacggtatttacaacgcctatcaaaagaccaagatggaacttcagcacctgcataacggccagctaaacgccttcacattcgagtatttggaaccatactactctggcaagtgtactcagtactccaactgtctgcactgcctcactgacgcctcctgtgcttggtgtcctctcaccaatatctgccatttgcgatccgtcaacgagactgaagtgtgcaagatggagactctggatacctttcactggtcatacctgatcagccagcccagtcagtgttcgaactgcactaactacgttagctgcgaggcctgcgcccggagtggggagtgcgagtggtggaccgaggacgcccgttgcggtaggattggcaagaccaatagcagtgtgcgggcggttgagcattgcccacgatcctgcagagaacggcatggctgtcaggaatgcctcggcgagcgtggacgatgcgtttggtgtgaggccagcgcacagtgcttcagtttttccgtttacacaagcgagtatcagtttggaatgtgccgagaatgggtggatcaggtagtcagtcgtcagacgcaagaaatagccgatcacaaaccccagcagacaccgcattttcttcagcagcaatgcaaatcctgcgaacagcatcgaaattgttcatcctgtctacgaacactgagctgtggctggtgcttcgatcgtgacaatcccatcgagggcatctgcatgcagggtgattttagctacagtgctggaaattgttcactggctttaaatagttcctcgcatcacgatgcggagtgggcgtacgcccagtgtccagatgtcgacgagtgtggactgggtctgcacgattgccataaggaggcgaagtgcaccaatacccagggaagctacaattgccattgccgaagaggttacataggcgatggcaagttcagttgtgtgaggacctgctatgagttatgccaaaacggaaattgctcaggaccgccggattacacctgccgctgtgctttgggttggactggagcggattgtggactaagttgtggatgcaataatcactcgacatgcaatgaacgattggggaaatgtgatcagtgtcaggattggtcggaaggtgaaaagtgcgagcgatgtcggcaagggagctatggaaacgctaccgctccacacggatgtcttccctgcgagtgcaacggtcatggcaatcaagatctgggtgtctgtaatgtcagcaacggtgagtgctattgcaaggacaatacccagggacttaattgtgaactgtgcgctcccggctactacggagatcctcgaggcggcggtaaatgctattaccaatgtgaatcacgcggaatattaactaatattggcaagagtgctattggctcatatcaatcttatcgatcaccatggggcgccagcctggaggtaaaagagtgcttgtggatattacaaccgaagacattgcaggcagagaaatcgcttcttcagctggagttccagtggcagagtctggccatggattgtgatgagaatgctgtgtacatatatgacagtctgccggacctgacaggtgccactcagcagaaccagctcttagccgttgtctgtgctccctacagctcgccaaggattatcgaggcacgttccagtcatgtcacggtccactataagcagggaagtgagagacgacactttggatttaatgcattgtactccgtaatgaattgcgtggccggaagttgtatctctccgcacatctgcgatgcccaacaacgttgtgtttgtccagccggatatgtgggcgcaagctgtgagattgaaatttgtccaagcaactgcaacgccaagaggatgcagggattctgcgacacagagtatggccggtgcatctgcagtaatgccaattatgcaggtgctgattgcggtaccctagttcagcggaaccatctggtaatgacggagctctttaatacacaactgctaagtgaaagtctggagcacctgaggaagacgattccgcgatttggacactcggtgaatgcagatcgcaggggatcgctttggatgttcggcggatactcacccaatcatggacctctcaacgatttccgacaattcgacacaaagaatagtacgtggctgcaggtcacagtggaatcgtccactccagaggatcgaatgcctcttggtcgctatttccatgcgtccgaaatttatgttaaaaaacagattatctacatttacggaggaattggtgctaactcgcagctgctaaatgatttttggatgttctcgattcagaatcaacgctggagtcaaataaaagtggaggtagaaccacctgaagcggactacgaggtgagtgcctgggaaaagttgataaaagacaaatactgatgaataatggttattccttacaggttgatgtaccaccgcctctagccggtcatacgcttacccatatacgctaccaagagcacgagtcgttgattctactgggcggactatcgctaaacaaatcccgaccactcgagttgtgggagtttaacctggataccgggcgatggcaacagctcgctgctgtgggtgctagaatgcctgttctttatgggcacacttccgtttatcaccaggagacaaacagtgtttacttgtttggaggatattccacggaaccacagagcaatctatatgcgttggacttgcagaagctgagctggacggaacttcccagtttcagggaactgaattcacctgcatcgctgctgccaagagctcgctattttcactcggccgtcaccaccgaacactacatgatactttatggtggacggacgcagcccttcaatggaaccgatgttcttattgcctatgtttacgcatgcaatcaatgggtgcgactgaccgaggatgtagagctcataggtcgtgtgccagcctcgagttatgctgaggacatggcaattgatccggatacgggtgcgatttatgttatcggtggatgggatggcagctccacgcacagtcacgtcaccaagataaccttgcccgatgatatttgccagctgtggagcaacggaaagtaccaatgtcggcactatatgggctgcagctactgtactattcagaacacttatagctacagtagccactgctttagtcatggacgaacaccgtgtgccaatcacaatggcaccctggtggtcaacaatggcgctgcatgcgatgatgactggatggcgagtagaaactgctcgagctttgcaacttgtggagcctgtttggcggcctggccaacacatcaagaagtggctcctgtatgccactggtgtgacgactgtggcattcgaggcaggtgcgttccagctggagttgattgcggaaggaggagtgcctggtgcaacaaggaactgagtgttggagttttaggtctgtgtcccctgccacaatgttatcaattgagctgtgaaagctgtatgcttcagccacaatgcaactgggccagaaacgaactgggcactgttgaatgcatagccaaggaattggtggaaaaaaatcaatacagggtggtcgaaagttgccccctgccatgccacacctacgaaaactgcagcttgtgtttgagtcaaacgccaactcaagatcaccaggagtgcaaatggtccactatgctcaacttgtgcttgacgcccagttcgcagccactactttgtgctggtggcgtttgtggactggtattggaagctagcgagctgcaacgatgtccggaaccatgtcatgtatacacacagtgctccagttgtctggagcacgcccattgtggttggtgcgcccgcgagggttttaatggtgatggcatttgcacggagggagcattggagcacaagcaggaacatccatcgggatccacttgcgatcttatatatgccagctggcgaaacgattcacagctaacccatgctgatgttgtatcctggcactatgtgcagtgtccggcggagaatgagtgcatcaatggccatcacaattgtgacactgtgtcggaacagtgcatcgacctggacacagcagtgggatacaagtgcgtctgtgcccagggataccgcgaggagcagggtgcctgcttgccggtttgcagccaaggatgtgtccgtggaaattgcgtaagtccggatcaatgccagtgcgactttggctacgtgggcgccaactgtagcatccagtgtttgtgcaatggtcattctaactgcgagtccagcagtcggttggatatttgcctcaagtgccacaacaacacgatgggcgagcagtgcgaaaagtgtcagccgctttttgttggcaatcctcgcgaaggtcatgcctgccaaccttgcttggattattgccacggccatagtgatgtgtgtgttgcctacgatgcggatccggcagtgtttaatatgacacgctcggagctggaaaggatattacaagagggtccagcctataatgccacctgcctgaggtgtggcaatcataccgctggtgatcgctgcgatagctgtttaactggatacttccgtggcagtgaggatttgcacaaggagtgccggccctgccagtgtcatggacatggaaacatatgcgatcccgtcaccggggagaaatgcaattgcgcgaacaacacggaaagcgatgctacctgcactgcgggtgggggcaagaattcggcgcagctctgctggatggttcagtgctccaagtgtcgtgattcctacgctggcaatcccacagatggccatcagtgctacaagcagataactgttgagtcgcgaatgtgcttcgacgccaagccaattggtaagtgccttctgtgttttatataattataccccttactcgtagagtaaaagggtttactagattttactagatgttgaaaatgtatgtaacaggcaaaaggataataattttcataattttattagtcttgtaaattttataacattctttcttgttttctatatacatttaaccacagaggaatgcaaatcgaagccagctgccctaaagcccggccaaacagtgttcttcgtgatccagcctcgttttatgaacgtggatatacgcatcattatcgatgtgacccaaggcgagttggatgtttttatgtcaccacaggacgactcatttatagttgagacgaatgagacaaccggctaccacgagatattccttgacaaccgatacaattggggaccgaagataaaacgggagcatccattgaatgttgctttgccgaggcacgataatgtaactatacagaaattgttttcacccgaacgtcgcattggtggcgggggcctaggaggaggcggaggagagaggatcggagccaatacgtattacgtgccccagttacaggactgcaagagccatggtggtcacaactttatagtgaaggatcagcacgccaaggatttgagtacacatgtaacgcttaatcattgcaacacattgttgcgcctctttggtctaaagaatcgcttggtgctgaccctgccccagcatgcccacaatttgagtgcaacacgcttttttattgctctacgagcgagctctggaccagaacccagttacggctccgtcgtctttcgccaggatcagctgcacattgatctgtttgtgttcttctcagtgttcttctcctgctttttcctcttcctcgccgtctgcgtgatcgtgtggaaggtgaagcaggcagcggatctgagacgagctagaagacagcatgtggtcgagatgttgcacctggccaagcgtccattcgcccagatctttttggcctcgaacggccttgatatggacagtccgcagccgacctcctcctcctcctcggcccgtgccatgcgacagcgcgcccgccaggcgcttcttctccaagagcaatctgctggtgactcgcaatcggtgatgcaccactccacacgacgccaaagctcgcgcattatgatggtagccatagagcccacatttgacaatttggcggctgtgggtacggtgtttattagcttgccaggccggtcgcgagctccattgagcattgctttggggtccactctcatttcctattcgcggcaatatcccctgaatacgcgacactttatgcgcgcccaaaggggccaaaatgtggcgaatcacccggcctaaactggaatctccatcagcacgaacaaactatatgttagtcaatgtctaagagtcgaaccgagtttaatatctatgcaagaacgtatttaagaggagcataaagacatacgtttagatatcggtgtatatgaatagtgtaggtaatttttgtacataaagtttagataacgcaaataactaaaatactatgtgtacataatatgcaacaaaggtgtgttaaacgacagattgtgtacgcacaaatcgtctatcaagaagaataacatacaggaaatggataaaatattcgattataagcataatataatggaattgggtctcgaatctgcaacaggatacagcaatgcattcacgtagtttaaaaacagaacaaattttcggactgatttagatgaattttcatttggctaaatatgtaaactaaaagataatttaaaataacccaaatcataagcatctggagcaatgacctagtgaaatgtgaagatgcagcagattaaatttgatacagtaaaaaagtacttataggaatgtcaattttatcgcgcaacagaatgtcgtacaataacatttagaagccatatgaagaacaaagaaatcaagatatacgtattaattatagtatactgaaagtgtcatagcaattagacgttggtgattccaaaaacacataagtgcatgtctgtcgctcaaataggtttctttttagatatgtacgatattatttgcatacctagtatataattgtattgtataaagtattaattatgatattccttcccagttgtggtggctagcatttgctcaattagttctttagctctctactgcgcactcttacgcaccggtgtacctactattttaagaacgagaaactatttttatgatcaatccagttttttacacacacttgttatgtttacacaaaagctcactgacacaaaaatggctgggtaaattggaatgatatccaattttgaaatatttcgaaatatttcccagctgcacatcacaaacgaacaaaatcctacagaatctttcctaatctctgtaaccaaatggttgtaagaaattctcactatatcaatttagtttacaattccctccctataatgtggtactatttttgtatatttgagtttacaaaattagagaaatttttagaactgatgtatattagaaattaatcaattcgtcccgttttgcaatatatttataccctattttataatttgtatttgtttttttttgcaa

SEQ ID NO: 16679 - DNA, 8865 bp, DROSOPHILA
atgcgatcgcagccggaaggtgttcacggagccctacggcgaaatctccgatggaccctccggctttaactacacgcaggactcacattgcgagtggctcatcaaggcgcgcaatgatagccagtacatcacgctaaccttccacagcatgggcaccgagtgctcctacgactacatttacgtctatgatggcgactccttcaactcgacgctcctggggagcttcagtggacgcacccagccccagcgactggtggcgcgcagcgggagtcttatcttctttctgcagatgctcatcctgatgtacagcgacacgaattacgtgctggacggctttcgcgcctcttactacatatcaaactgtcttaacaactgccataatcatggaaagtgcgtgggtcatcagtgcgtttgtcacggcgagtgggtgggccccgactgcgaggatgaggcctgtccccagcgatgtggtgagagccagggacgaggtcgttgccagaaaagcatatgccattgctcgcgcggttacagcggccggctctgtgatctgagtgatcatccagcgggcagcagctggcgctggctggccaccgacgccgagggaatgacggcccgtgccgcccacagcgccgtatacatggaagacgaggacgcactttacgtcttcggcggatatgatctaaataacgtgataagcacgcttcagatttatcgcttcagcaccagccagtgggaggatgaatggggtattgcgctccagagtcgccgtcacttctaccatcctcaaaaaatcgaccataccttgcttaaggccgttctccagcacaaaaacgaggacgaggccaagctatggggtctgaatagcgacgtaagcttcttccgcaacattctgtacaccttggcggaatccaatctgcaccagcgccgcacgcgctcctccctgcctcttacgattgtgaatgcgaattcgacggatgaagagttgaacgagtatctggaagatatattggaggaggttacggatcacaagccgcacggacgatatggccatgcagcggatagtgtgcccggcggcttcgttatctatggcgggaagcatgccaatggtagtttctacagtgatctctggcagtacaataatacggaaagtggtggcaaatggaagcaaatggccattaggtccgcagtgaagccgcctgctttggccaggcatacgcttaacaccgctggatcgtatctctatatattcggtggtagtctggagacgggtgagttctcatccagcgtatatcgtatcccacttcccctctctgaagattcgcaatgggagctggtgcaaccgagaggcggcaagaccttggacgttcgcctggcagcgcattcgacggtctattacaaagccaccaattcgttaattgtgtttggtggaatcatgacgagcttggcccgcttctctaagctctcggatcgtatttacgcatttcaactggatcaaatgcactggacggagattttatacccccgaacggcgctcagggacaccaatatacccagggagcgagcattccacacggccaccatttcgggcaactacatggttgtcttcggtggctatactcaccggcacaacaaagatgagatttgctatgacaaccaaatgtactggtaccatcttagctgtcacatttggattaatcaagtggtttccgctgatgatagtctttaccccaagccgcagggtgtatttgcacatgcggctgctctgcgccggaatcacacactcctgattgtcggcggttaccatggaaatgtgaatgcggatctctttgcctacgaacttccccaggtgctaagggttgagaatactctttacaatccggagatctcctgcagattgcattcctcgcacaccgcctgcctttcgaatccggaatgtggctggtgctcggcagatagcagctgctacggtcgcaccatcggtgccaactgcacaactaatctgcaaaccaccagatgcccaggtatatgcccctcactcggcgattgtcactcgtgtttggtacatggttcgcaatggggaaagtcatccggaaataaggcagcattctcggtggccagcaaactgggattaaacgagtgcacatggtgtgtacagaatgcaaaatgccatcatcgcgatgacaactacggaatatgtggagatagttcaggctggtggggtgacaagggcactgagattcggcgaccatcgttgtgcaccagtactgatcgacgcccgggacttacatatatcaagtaccactttccgatcaactacaccatgccggattacgtgggtattgtgaatgctactatggtggattttgcctcgccgccgtttaccacatattttgagcacaaactcgaaggagaaatgctggcccgtttggtgggattcgtgcgtccgcaacatcaatggaacaactcagccatccaggtgtgcaccagttactcctcggctgtgttgcgcgctggcctgggtcttaatctcgatgagcttgtaaacgtcactacgcagagctcaaaccagagctactgcagcaatgtccagcttccaaccaccgagcaacctttcaccattgattttcagactcgacgaaggattggaggaaacggtatttacaacgcctatcaaaagaccaagatggaacttcagcacctgcataacggccagctaaacgccttcacattcgagtatttggaaccatactactctggcaagtgtactcagtactccaactgtctgcactgcctcactgacgcctcctgtgcttggtgtcctctcaccaatatctgccatttgcgatccgtcaacgagactgaagtgtgcaagatggagactctggatacctttcactggtcatacctgatcagccagcccagtcagtgttcgaactgcactaactacgttagctgcgaggcctgcgcccggagtggggagtgcgagtggtggaccgaggacgcccgttgcggtaggattggcaagaccaatagcagtgtgcgggcggttgagcattgcccacgatcctgcagagaacggcatggctgtcaggaatgcctcggcgagcgtggacgatgcgtttggtgtgaggccagcgcacagtgcttcagtttttccgtttacacaagcgagtatcagtttggaatgtgccgagaatgggtggatcaggtagtcagtcgtcagacgcaagaaatagccgatcacaaaccccagcagacaccgcattttcttcagcagcaatgcaaatcctgcgaacagcatcgaaattgttcatcctgtctacgaacactgagctgtggctggtgcttcgatcgtgacaatcccatcgagggcatctgcatgcagggtgattttagctacagtgctggaaattgttcactggctttaaatagttcctcgcatcacgatgcggagtgggcgtacgcccagtgtccagatgtcgacgagtgtggactgggtctgcacgattgccataaggaggcgaagtgcaccaatacccagggaagctacaattgccattgccgaagaggttacataggcgatggcaagttcagttgtgtgaggacctgctatgagttatgccaaaacggaaattgctcaggaccgccggattacacctgccgctgtgctttgggttggactggagcggattgtggactaagttgtggatgcaataatcactcgacatgcaatgaacgattggggaaatgtgatcagtgtcaggattggtcggaaggtgaaaagtgcgagcgatgtcggcaagggagctatggaaacgctaccgctccacacggatgtcttccctgcgagtgcaacggtcatggcaatcaagatctgggtgtctgtaatgtcagcaacggtgagtgctattgcaaggacaatacccagggacttaattgtgaactgtgcgctcccggctactacggagatcctcgaggcggcggtaaatgctattaccaatgtgaatcacgcggaatattaactaatattggcaagagtgctattggctcatatcaatcttatcgatcaccatggggcgccagcctggaggtaaaagagtgcttgtggatattacaaccgaagacattgcaggcagagaaatcgcttcttcagctggagttccagtggcagagtctggccatggattgtgatgagaatgctgtgtacatatatgacagtctgccggacctgacaggtgccactcagcagaaccagctcttagccgttgtctgtgctccctacagctcgccaaggattatcgaggcacgttccagtcatgtcacggtccactataagcagggaagtgagagacgacactttggatttaatgcattgtactccgtaatgaattgcgtggccggaagttgtatctctccgcacatctgcgatgcccaacaacgttgtgtttgtccagccggatatgtgggcgcaagctgtgagattgaaatttgtccaagcaactgcaacgccaagaggatgcagggattctgcgacacagagtatggccggtgcatctgcagtaatgccaattatgcaggtgctgattgcggtaccctagttcagcggaaccatctggtaatgacggagctctttaatacacaactgctaagtgaaagtctggagcacctgaggaagacgattccgcgatttggacactcggtgaatgcagatcgcaggggatcgctttggatgttcggcggatactcacccaatcatggacctctcaacgatttccgacaattcgacacaaagaatagtacgtggctgcaggtcacagtggaatcgtccactccagaggatcgaatgcctcttggtcgctatttccatgcgtccgaaatttatgttaaaaaacagattatctacatttacggaggaattggtgctaactcgcagctgctaaatgatttttggatgttctcgattcagaatcaacgctggagtcaaataaaagtggaggtagaaccacctgaagcggactacgaggttgatgtaccaccgcctctagccggtcatacgcttacccatatacgctaccaagagcacgagtcgttgattctactgggcggactatcgctaaacaaatcccgaccactcgagttgtgggagtttaacctggataccgggcgatggcaacagctcgctgctgtgggtgctagaatgcctgttctttatgggcacacttccgtttatcaccaggagacaaacagtgtttacttgtttggaggatattccacggaaccacagagcaatctatatgcgttggacttgcagaagctgagctggacggaacttcccagtttcagggaactgaattcacctgcatcgctgctgccaagagctcgctattttcactcggccgtcaccaccgaacactacatgatactttatggtggacggacgcagcccttcaatggaaccgatgttcttattgcctatgtttacgcatgcaatcaatgggtgcgactgaccgaggatgtagagctcataggtcgtgtgccagcctcgagttatgctgaggacatggcaattgatccggatacgggtgcgatttatgttatcggtggatgggatggcagctccacgcacagtcacgtcaccaagataaccttgcccgatgatatttgccagctgtggagcaacggaaagtaccaatgtcggcactatatgggctgcagctactgtactattcagaacacttatagctacagtagccactgctttagtcatggacgaacaccgtgtgccaatcacaatggcaccctggtggtcaacaatggcgctgcatgcgatgatgactggatggcgagtagaaactgctcgagctttgcaacttgtggagcctgtttggcggcctggccaacacatcaagaagtggctcctgtatgccactggtgtgacgactgtggcattcgaggcaggtgcgttccagctggagttgattgcggaaggaggagtgcctggtgcaacaaggaactgagtgttggagttttaggtctgtgtcccctgccacaatgttatcaattgagctgtgaaagctgtatgcttcagccacaatgcaactgggccagaaacgaactgggcactgttgaatgcatagccaaggaattggtggaaaaaaatcaatacagggtggtcgaaagttgccccctgccatgccacacctacgaaaactgcagcttgtgtttgagtcaaacgccaactcaagatcaccaggagtgcaaatggtccactatgctcaacttgtgcttgacgcccagttcgcagccactactttgtgctggtggcgtttgtggactggtattggaagctagcgagctgcaacgatgtccggaaccatgtcatgtatacacacagtgctccagttgtctggagcacgcccattgtggttggtgcgcccgcgagggttttaatggtgatggcatttgcacggagggagcattggagcacaagcaggaacatccatcgggatccacttgcgatcttatatatgccagctggcgaaacgattcacagctaacccatgctgatgttgtatcctggcactatgtgcagtgtccggcggagaatgagtgcatcaatggccatcacaattgtgacactgtgtcggaacagtgcatcgacctggacacagcagtgggatacaagtgcgtctgtgcccagggataccgcgaggagcagggtgcctgcttgccggtttgcagccaaggatgtgtccgtggaaattgcgtaagtccggatcaatgccagtgcgactttggctacgtgggcgccaactgtagcatccagtgtttgtgcaatggtcattctaactgcgagtccagcagtcggttggatatttgcctcaagtgccacaacaacacgatgggcgagcagtgcgaaaagtgtcagccgctttttgttggcaatcctcgcgaaggtcatgcctgccaaccttgcttggattattgccacggccatagtgatgtgtgtgttgcctacgatgcggatccggcagtgtttaatatgacacgctcggagctggaaaggatattacaagagggtccagcctataatgccacctgcctgaggtgtggcaatcataccgctggtgatcgctgcgatagctgtttaactggatacttccgtggcagtgaggatttgcacaaggagtgccggccctgccagtgtcatggacatggaaacatatgcgatcccgtcaccggggagaaatgcaattgcgcgaacaacacggaaagcgatgctacctgcactgcgggtgggggcaagaattcggcgcagctctgctggatggttcagtgctccaagtgtcgtgattcctacgctggcaatcccacagatggccatcagtgctacaagcagataactgttgagtcgcgaatgtgcttcgacgccaagccaattgaggaatgcaaatcgaagccagctgccctaaagcccggccaaacagtgttcttcgtgatccagcctcgttttatgaacgtggatatacgcatcattatcgatgtgacccaaggcgagttggatgtttttatgtcaccacaggacgactcatttatagttgagacgaatgagacaaccggctaccacgagatattccttgacaaccgatacaattggggaccgaagataaaacgggagcatccattgaatgttgctttgccgaggcacgataatgtaactatacagaaattgttttcacccgaacgtcgcattggtggcgggggcctaggaggaggcggaggagagaggatcggagccaatacgtattacgtgccccagttacaggactgcaagagccatggtggtcacaactttatagtgaaggatcagcacgccaaggatttgagtacacatgtaacgcttaatcattgcaacacattgttgcgcctctttggtctaaagaatcgcttggtgctgaccctgccccagcatgcccacaatttgagtgcaacacgcttttttattgctctacgagcgagctctggaccagaacccagttacggctccgtcgtctttcgccaggatcagctgcacattgatctgtttgtgttcttctcagtgttcttctcctgctttttcctcttcctcgccgtctgcgtgatcgtgtggaaggtgaagcaggcagcggatctgagacgagctagaagacagcatgtggtcgagatgttgcacctggccaagcgtccattcgcccagatctttttggcctcgaacggccttgatatggacagtccgcagccgacctcctcctcctcctcggcccgtgccatgcgacagcgcgcccgccaggcgcttcttctccaagagcaatctgctggtgactcgcaatcggtgatgcaccactccacacgacgccaaagctcgcgcattatgatggtagccatagagcccacatttgacaatttggcggctgtgggtacggtgtttattagcttgccaggccggtcgcgagctccattgagcattgctttggggtccactctcatttcctattcgcggcaatatcccctgaatacgcgacactttatgcgcgcccaaaggggccaaaatgtggcgaatcacccggcctaaactggaatctccatcagcacgaacaaactatatgttagtcaatgtctaagagtcgaaccgagtttaatatctatgcaagaacgtatttaagaggagcataaagacatacgtttagatatcggtgtatatgaatagtgtaggtaatttttgtacataaagtttagataacgcaaataactaaaatactatgtgtacataatatgcaacaaaggtgtgttaaacgacagattgtgtacgcacaaatcgtctatcaa

SEQ ID NO: 16680 - protein, 2820 aa, DROSOPHILA
MGTECSYDYIYVYDGDSFNSTLLGSFSGRTQPQRLVARSGSLIFFLQMLILMYSDTNYVLDGFRASYYISNCLNNCHNHGKCVGHQCVCHGEWVGPDCEDEACPQRCGESQGRGRCQKSICHCSRGYSGRLCDLSDHPAGSSWRWLATDAEGMTARAAHSAVYMEDEDALYVFGGYDLNNVISTLQIYRFSTSQWEDEWGIALQSRRHFYHPQKIDHTLLKAVLQHKNEDEAKLWGLNSDVSFFRNILYTLAESNLHQRRTRSSLPLTIVNANSTDEELNEYLEDILEEVTDHKPHGRYGHAADSVPGGFVIYGGKHANGSFYSDLWQYNNTESGGKWKQMAIRSAVKPPALARHTLNTAGSYLYIFGGSLETGEFSSSVYRIPLPLSEDSQWELVQPRGGKTLDVRLAAHSTVYYKATNSLIVFGGIMTSLARFSKLSDRIYAFQLDQMHWTEILYPRTALRDTNIPRERAFHTATISGNYMVVFGGYTHRHNKDEICYDNQMYWYHLSCHIWINQVVSADDSLYPKPQGVFAHAAALRRNHTLLIVGGYHGNVNADLFAYELPQVLRVENTLYNPEISCRLHSSHTACLSNPECGWCSADSSCYGRTIGANCTTNLQTTRCPGICPSLGDCHSCLVHGSQWGKSSGNKAAFSVASKLGLNECTWCVQNAKCHHRDDNYGICGDSSGWWGDKGTEIRRPSLCTSTDRRPGLTYIKYHFPINYTMPDYVGIVNATMVDFASPPFTTYFEHKLEGEMLARLVGFVRPQHQWNNSAIQVCTSYSSAVLRAGLGLNLDELVNVTTQSSNQSYCSNVQLPTTEQPFTIDFQTRRRIGGNGIYNAYQKTKMELQHLHNGQLNAFTFEYLEPYYSGKCTQYSNCLHCLTDASCAWCPLTNICHLRSVNETEVCKMETLDTFHWSYLISQPSQCSNCTNYVSCEACARSGECEWWTEDARCGRIGKTNSSVRAVEHCPRSCRERHGCQECLGERGRCVWCEASAQCFSFSVYTSEYQFGMCREWVDQVVSRQTQEIADHKPQQTPHFLQQQCKSCEQHRNCSSCLRTLSCGWCFDRDNPIEGICMQGDFSYSAGNCSLALNSSSHHDAEWAYAQCPDVDECGLGLHDCHKEAKCTNTQGSYNCHCRRGYIGDGKFSCVRTCYELCQNGNCSGPPDYTCRCALGWTGADCGLSCGCNNHSTCNERLGKCDQCQDWSEGEKCERCRQGSYGNATAPHGCLPCECNGHGNQDLGVCNVSNGECYCKDNTQGLNCELCAPGYYGDPRGGGKCYYQCESRGILTNIGKSAIGSYQSYRSPWGASLEVKECLWILQPKTLQAEKSLLQLEFQWQSLAMDCDENAVYIYDSLPDLTGATQQNQLLAVVCAPYSSPRIIEARSSHVTVHYKQGSERRHFGFNALYSVMNCVAGSCISPHICDAQQRCVCPAGYVGASCEIEICPSNCNAKRMQGFCDTEYGRCICSNANYAGADCGTLVQRNHLVMTELFNTQLLSESLEHLRKTIPRFGHSVNADRRGSLWMFGGYSPNHGPLNDFRQFDTKNSTWLQVTVESSTPEDRMPLGRYFHASEIYVKKQIIYIYGGIGANSQLLNDFWMFSIQNQRWSQIKVEVEPPEADYEVDVPPPLAGHTLTHIRYQEHESLILLGGLSLNKSRPLELWEFNLDTGRWQQLAAVGARMPVLYGHTSVYHQETNSVYLFGGYSTEPQSNLYALDLQKLSWTELPSFRELNSPASLLPRARYFHSAVTTEHYMILYGGRTQPFNGTDVLIAYVYACNQWVRLTEDVELIGRVPASSYAEDMAIDPDTGAIYVIGGWDGSSTHSHVTKITLPDDICQLWSNGKYQCRHYMGCSYCTIQNTYSYSSHCFSHGRTPCANHNGTLVVNNGAACDDDWMASRNCSSFATCGACLAAWPTHQEVAPVCHWCDDCGIRGRCVPAGVDCGRRSAWCNKELSVGVLGLCPLPQCYQLSCESCMLQPQCNWARNELGTVECIAKELVEKNQYRVVESCPLPCHTYENCSLCLSQTPTQDHQECKWSTMLNLCLTPSSQPLLCAGGVCGLVLEASELQRCPEPCHVYTQCSSCLEHAHCGWCAREGFNGDGICTEGALEHKQEHPSGSTCDLIYASWRNDSQLTHADVVSWHYVQCPAENECINGHHNCDTVSEQCIDLDTAVGYKCVCAQGYREEQGACLPVCSQGCVRGNCVSPDQCQCDFGYVGANCSIQCLCNGHSNCESSSRLDICLKCHNNTMGEQCEKCQPLFVGNPREGHACQPCLDYCHGHSDVCVAYDADPAVFNMTRSELERILQEGPAYNATCLRCGNHTAGDRCDSCLTGYFRGSEDLHKECRPCQCHGHGNICDPVTGEKCNCANNTESDATCTAGGGKNSAQLCWMVQCSKCRDSYAGNPTDGHQCYKQITVESRMCFDAKPIEECKSKPAALKPGQTVFFVIQPRFMNVDIRIIIDVTQGELDVFMSPQDDSFIVETNETTGYHEIFLDNRYNWGPKIKREHPLNVALPRHDNVTIQKLFSPERRIGGGGLGGGGGERIGANTYYVPQLQDCKSHGGHNFIVKDQHAKDLSTHVTLNHCNTLLRLFGLKNRLVLTLPQHAHNLSATRFFIALRASSGPEPSYGSVVFRQDQLHIDLFVFFSVFFSCFFLFLAVCVIVWKVKQAADLRRARRQHVVEMLHLAKRPFAQIFLASNGLDMDSPQPTSSSSSARAMRQRARQALLLQEQSAGDSQSVMHHSTRRQSSRIMMVAIEPTFDNLAAVGTVFISLPGRSRAPLSIALGSTLISYSRQYPLNTRHFMRAQRGQNVANHPA

SEQ ID NO: 16681 - DNA, 4739 bp, DROSOPHILA
cccagttattaacttggctcagctccctggcttgtctaatgtgtctggcttaattgtttgaagttgagttttgagtaagaaggggttagttttgatttgtagttgaattaaacaaggaccccgagtagcctccggactgcttgagtttgtaatgtaagctatcgcgtacaacatgtcgtatgagcaaccaatcttgccgagaacattttctcagcaggagttattgtcatatcagcagcagatcctgtcgctgctcgtatcccgggcatttaatcttcccaggcattccctgaacccaaattacccaacacttcctttcacttagacactcggtttccatccgacacacacgaacttggctaaattgatacattaactaccttgatccggctattatctggctgcagtagccccccttaccactgctccccagttggaaactattctcaaaatgttgagaatgttcgtcatgtaaatgtaaatcacttcctctcgactgtgggctccattctaccgcctggcgcctcctatctgctatctcctttctcctctcttggcatccaaagtggttgcatcccagtggcaagtgcgactgccaacatggtgataaatcatcaactgcttaagcgctgtctccccgctgcccagaactccttggttcacctgcttgtggatccttgcagctgcagcgcacgttccagcgctttaaggcatttagctggatgacatattttaaatgccctgccagcccaaacaacacaaatcaaaaggagctggaagagctggagcagcaggagcagcaggacgacaacaagccggagccggagcagaagcaaaagcaggagcaggagctgcaactgcgtctgtgtttgcgcatagatcataatcattcataatcagcgtgcacataaataacaaattaaaagcgcttcactaattttaaatatgctcgaacataatcagcttacagtgagccacgaggatgcgacagaggacgagaatgagcggcagcagcagcagaattcagatgggaaaggggatgaggatgaaatggggatgggggaatggggctgttgatgatgctttcgacactgttgatgatgccgctgctcctgctgccagtcaagatagcaatgacaacctaacgagctgctccctgtgtgtctgtgtttgccaaagtctgcgcgtgagtttgtgcgagaaatttagatgctctacataaaaaaaaaatggaaagaaataatggatggcgaacaacggttggccccagaaaatctaaaaagctattttaaagtggttaaattgaagtaaaacatcacaatattcaatgttatttttcatggagcaacaagtacttgcattgaaaaaggaaaaatgtataaggcaatgaagcgagctatctatgaaattaaagctaatagcatatttcgaacatttaaaaaataaatgttaaaattaaacaaatagagtgcaacgtatatagaatatataaaagttatttagaatttgtttgtagttcaaacaaatccaaatcctttaatatgatttttcatatataaataaaaaatatcaaagaagacatacctaacttctttttataaaaagcgtacccacaattccctatacctccaaatggatcttctatatttctattttttttattcccttattttttgactggcttttacttcatttaaaacgcatttataacgccggtcggcgaaaaaagaaactcatcagtcgacggagagcacacacacacgcacatacaaagagtccgatacacacgcacacgctaatgcagagctcatatatgtatacaaattttcttttaggttttcatgtttgtgctccgggtactctgggtccgcccagaaacggccccgcccccttgcctcgcctctcctttcaccttgcaccccgtaccgcctttgtggcgcctgcttcacttactttgcccatacaatttttcttacaattttctttcatttttccgttgtccctgctcctgttttccttttttttcgtggctgctcatgtttcccgctgtaacattttcgtgatactcaccatctctctcgcttttttttctcctcttctctggcagattgtgcgaccggtgaacgcgttcctcattgttgatgtacaaaatgattttataagtggttccttggatataagtaattgcagtgcacagcagcaaggacacgaggtgagcttcggagtcacaaatggatgcgggcgggcggggttttcgggtggttaatgtggcagctacctggccagcagcttagccccgacaggtgcggtaagcggcgacgacggaaggacataaaaaagtaaagcgtaacaagaaatgaaaatgaagggcccggcccggaccgggttcgagacaaagtcattgccgctccagatgatgaggataagctggtcctgggggatgggcgctctgcatgtcagacctcaataccagatactttccagggataagaagcgagatgagaggagagagacagcgagaggcagcgagtgagagaaagagtgggggagtgcagaggcggaagcggatatgctttacttaagtcgcttccgcgctgcgacacacgccggaagtcgtcgagatctctcgtacccgctcgctctcgcattcagtgccccgcaatgccactccaacgcccactccatttccatttccatctggaaactgacatggctctgtggctggtacatgaaaatttgtcaaaattaataacacgcacttccgtctcgtcgctttatggactccgcccggctctcaagttgactttgtgtgtaaagtgccaccgcctcctaaccagcttcttatcccaacttcacctttactgcagatactggagcccatcaacaagctgctggatacggtggactttgatgccgtcttctactcattggactggcatcccagcgatcacgtttcatttattgataatgtcaaaatgcgccccatggacgagtcctccgcggtaagacatcgatggtaattgaacggaagtgtcggacacttaacagacatccgctttgtcatctccccccgctctttagttggactcggattccgccaaggtgtttgacacggtcattttcgcaggaccgccgccgatgaagcagcgcctgtggccacgtcactgcgtccaggactcgtggggagccgagctgcacaaggacctcaaagtggtcgaccacggcatcaaggtgtacaagggcactaatcccgaggtggactcttattcggtgttctgggacaacaagaagctatctgacaccactctaaatgcccagctgaaaatgaagggcgccacggatatctatgtgtgcggattggcctatgacgtctgcgttggagccacagccgtggatgctttgtccgccggatacaggaccatcctcatcgacgactgctgccggggtacagatgtccacgacatcgagcacaccaaggagaaggtcaacaccagcgatggcgttatagtccacactaatcaggtaaggtctaacgcggtgataaaagtttccacactttccaaaccgagaactaacaatcattgttttctaattcgtaatattcatttttcaattctaggtcaaggcaatggccgagggtcgggatcgtcgtcctgaactgggctacaaactggccatggagctgaagagccccgattcggttctttcgcaacgcaatggcttcaggccctcatactaaatgcgagaggcaactaaatcacgctaggcttattttcatggatataaaaagacaaaaggcttttgtgtagtcgacggttagatcgtttcgattagattagtttagatcacctgtgaagtgcctctgtagtttggctagcttttgctaaaaatattctagaattggtaaaatcttttttaagcctgttatccatgtggattttacatgacattacaatactaacaacaatcgaaaacgaaaagtgcaaagttcttgcctacggagatattgaggtaaataaaatgtcgtttaagtattaccgagctctctctataacccaagcaccataaaatacaattccaacagcaataaagtactaagggttcttaatgttgtgcgctgcacctgtttgaatcaaattgatattatatacaaccaacaaatatataagtagagaaaattatttattttaaaacaaaatagaacaactgcttcagtgagaaatattgtatgtacttaaaaatgttcaaataaaagtatggaagtgggaaagtcaaattgaaatgataatacctatttgaggggtgaataaagtaaatacataaattgataccaatagttcaaaagttgcttaaatatcaattcgtaatttatttcttatggtgcgattcacacgctccagtttgtcgaatatctgtcaaatcagtgtccaatcgaagccattttcagatccgtggaagccatagaaataaggtttacttatccccactttgtccactctgcctgacgaatgaatatatgcgtgttttctttaagcgaatttcaagttgaaaggcaaaaacttcaaaacaaaccgtataaatgtcctggccgaaagtgtggcacagactgtaaaacgtttttttttattttctcccatgcgttttttttttttttttttttggttctattttcgagctcaggagcagcagcatgaggaaaacagaaataacaatccatgcagcgtttaaggaaacttttc

SEQ ID NO: 16682 - DNA, 987 bp, DROSOPHILA
atgagcggcagcagcagcagaattcagatgggaaaggggatgaggatgaaatggggatgggggaatggggctgttgatgatgctttcgacactgttgatgatgccgctgctcctgctgccagtcaagatagcaatgacaacctaacgagctgctccctgtgtgtctgtgtttgccaaagtctgcgcattgtgcgaccggtgaacgcgttcctcattgttgatgtacaaaatgattttataagtggttccttggatataagtaattgcagtgcacagcagcaaggacacgagatactggagcccatcaacaagctgctggatacggtggactttgatgccgtcttctactcattggactggcatcccagcgatcacgtttcatttattgataatgtcaaaatgcgccccatggacgagtcctccgcgttggactcggattccgccaaggtgtttgacacggtcattttcgcaggaccgccgccgatgaagcagcgcctgtggccacgtcactgcgtccaggactcgtggggagccgagctgcacaaggacctcaaagtggtcgaccacggcatcaaggtgtacaagggcactaatcccgaggtggactcttattcggtgttctgggacaacaagaagctatctgacaccactctaaatgcccagctgaaaatgaagggcgccacggatatctatgtgtgcggattggcctatgacgtctgcgttggagccacagccgtggatgctttgtccgccggatacaggaccatcctcatcgacgactgctgccggggtacagatgtccacgacatcgagcacaccaaggagaaggtcaacaccagcgatggcgttatagtccacactaatcaggtcaaggcaatggccgagggtcgggatcgtcgtcctgaactgggctacaaactggccatggagctgaagagccccgattcggttctttcgcaacgcaatggcttcaggccctcatactaa

SEQ ID NO: 16683 - protein, 328 aa, DROSOPHILA
MSGSSSRIQMGKGMRMKWGWGNGAVDDAFDTVDDAAAPAASQDSNDNLTSCSLCVCVCQSLRIVRPVNAFLIVDVQNDFISGSLDISNCSAQQQGHEILEPINKLLDTVDFDAVFYSLDWHPSDHVSFIDNVKMRPMDESSALDSDSAKVFDTVIFAGPPPMKQRLWPRHCVQDSWGAELHKDLKVVDHGIKVYKGTNPEVDSYSVFWDNKKLSDTTLNAQLKMKGATDIYVCGLAYDVCVGATAVDALSAGYRTILIDDCCRGTDVHDIEHTKEKVNTSDGVIVHTNQVKAMAEGRDRRPELGYKLAMELKSPDSVLSQRNGFRPSY

SEQ ID NO: 16684 - DNA, 4773 bp, DROSOPHILA
agatgacttggacaagttttcactgatctgccagagaagcacgtctgaaccagacgatacctccgactttaattttctgcaaggcctcagtctaaaatatgagtatgagtggccattgaatcttttgttctccccaacaacgatcgagcggtacaacaatatattccgatttttactgatcattcgaacatatcaatacgaaatacaaagggtctgggccaagcagacttggagggcgaagagtgcaaaggatgtgcctccaaataacaaaatcataactcttcgcaactatctaatgttctttctgaacaacatgcagtattacattcaagttgatgtgctggaaagtgagtttttgagcgcaatacgaaattgatcgaaaataactcacattttgttacaggtcaatttggaattttgatgaatgtgatcaagagcaggagtgatttcgaagttatacaaagggctcacactgtatttctggcaaatgttctttcgcattgcttcctgcttaacgaatcagagacccaattgaatgtcaccgggagccaaaaccgaaatcccatttatggaacccttcttaaactctttggcatatgtgagaagtttgcgcatatgacccaaacgaaagatccgtctgatgacttagaggatgaagtcgaccaacttaatgaaaggtatgtctttacattttggataagtgggttattattgtataataataaaacgttgttttcttatagttttggtgttcaaattgcgagccttatccaactattagtcgatgtaaaatcagcttcttgtttgggtccgctttcgcagctgcttttgcgtttggatttcaattgttggttcagtgccagtcataatacgtccgcatgaatacgatgtttttgcctaaagttgtagccgcttaatgtcttctatacgaaagtcatttctgaaaaacaaacaaacgattaataaactgaagaaaatgttatattttaaataaactttcttaccttaacgttaaaaatgtgcgaacttcgttaggtgtgagatgccaagatgacatctctttgttattctccggattccagtactccgatagctccgtaatcttgtccagattgaggagcgtagctatttgggatatacgtgtcatcttatctcgaaccgaccacgatgtagctcctgttagataacttcccaaggcacgaacttcctgatcaagcaccaaaccgccaagcttttgaatagaacataatccattattattctaattccacaaggtaaatttgacctgctgagatacatactctattaaagctgattttcttaatagcccgttccaattgaatagtcacttcggtcgccaaaatgctaacgagtgcatcatagttgcgcggactcaacgagttcttaaaagagttaagtagtccatccaattgcactatgaagaactggacaaatgtctccccagcttcgtaagcagcaagttcctcctgtaaaaacagattgcattgcgttctcataaagatactttagtccatacagatacttacctcattcaaattgtgactgtagttcaggaactgattgatccagggattaaggcgtggctttatgacactggatcgcagctgctgcattccaaaatcaacggtggctttcaacgcgtcccgcacagctttaagttccgtgaggcaactgtccagcatttgacgctccacctgggtcgtttgtggaaatgtgccagcaatttcctgttccatcgtctgacacaaggtctcaatatactctgtcgatatgtcggcattgttcagctgaaccaagaaattggctcgacctcgatcggcatcactggaatgtagttttccctgctgcagcgatgtttgtatagcattatatgcctgggccaagtcgatgtagcccgagggatagccgcttttcaagggcgccttcagtgcgttcacaaaatcaccatccaggcaggcagccacgttgttgatcacagcacaggttccgtttatcgattgggttgtcagagccctgcgaatggatttgcgaagaatgaagaacacatcgtccaccatggacgaacactgctgcccagactcataggtgtccaagccgatggccttcagtacgctctcctccatgaaatatctaaaaatatatatacaattacaaccatttaggcagcttacaatagtttccgaattttacctttccagcagcaaataggtgctcagaatttcctgcatttggcggcgcagatcggagttcttcatgatcttctcatagcgttccattatatcaaactgctccttttccggcacacacgtctccacatgtacctgcaatactaatagttatcaaaccattttgtgagagccttttctccttgcctgtaggcgccgacgcataaatcggaagtacaactcgaccctggcgtgcatgacggttatttcagctataatggcatcgatttccttgggatttagcttgtccaccgagccgccagatggtttcctataatgacccagtgcttggatgctgttgctcccgagatttccgccaccggccgaccgctgagtggattcatttacttgcttgctgcggtactggatctgccggttcttgttgaactccattagaagattcttcacctccgtatcgcattcgtgctgcagtatggacaccatgtcgatgagtgatgatgaactgcgggagaattacatattttaagagatactgttttgccataactaagctacctacgcttgtccgtaaaaggcttcgattatcggctgattgacttccaccaccctggcgaagttttccaaaatagcagtcagccgatctgcgtaggccaattgcaggcgcgattccgccttggctatgtcctgggcgttccttagttccttctgcgccttgtttgccagcttttggcaaatgtagagcgagaacttttcgattccggtgcgatggcaaccgactagtggaaagattttgaagaatctttccacagaggccaaatcatcggctttgactgcctcatcgaagcgcttggcaatcagcacgcgggtcttctcggtggcatcctccagcgtcttgaccgcatcgctaaccgacgttatggagccctgaacgtcgtcggcggtgcgccgcagcaattgctgatccatcgccaggaagcgggcaatgtgggtggcactcttctcgtagtcctcctcgccgatggccttcaccacgccctggctacacagatgcaggtcgatcagatcgtgcacccgctgctggcactcggaggcacggcacctggccaaatccaaacggcgcaccttggcgctcaccgattcggccaactgggcagtgtttacgatctggtcgttcagcttgttggaatcgctgtccaccgtgtgaagcaggctgagtgatcgcccaatgccactcattttggcctcaatctggcattgtttggccagcagcgactccagtttctcgttaacttttgcctaaaacggaggaaacacataagactcaaccggagttttattgacatgggactccacctcttcgtcggcaatccgctgcagcgtttcgtccacctgctcatttgtaccgatatctagagcacccagctgttccagaacactcattccgctgccgtcggtccggatttccggatctttgttaaatttcttgatctctttttccaattggatgaattatctgatacgtggaatgaaaaatttgttttgctttgaaatagcgatgggagtttgcggctctggaccaaatgtatcggaatgtggtatatcgatacatgagggcaacgataagacggtgaaaatacttttaagttcgatctgctgtttaattaaaagttaatgattttacaaatacaaataatgtattttcttagttaaaatacaatcgttcaaaagcgacaagtttaaaagcaaatgttacattaacaccatacgtcactaaaaatacgggcaccctcgattttccaaacagctgatgcagaattcaaagcccaacaaaagtattgatttgcaatttaagtagaattagcattagcgtagcattccgatagataagtgtaggcctagtcatggatttcacgggctttgaagtgcgaaaggcaagttaataacacccaagtgtctcgagtgaagtcctcgttatccttgcttatcctttccagtgcccaccgactgtcatgtacattccgaacttcatcacttccgaggaggagcagcgcatcctgagccacatcgagcgcactccgaagcctcgatggacgcagctgctgaaccgccggctggtcaactacggcggtgtgccgcatcccaacggaatgattgccgaggagattccggagtggctgcagacctatgtggacaaggtcaacaatctgggggtgttcgagtcgcagaacgctaaccatgttttggtcaacgagtatctgccgggtcagggaattctgccgcacacagatggaccactgttccatcccatcatctccaccatttccacgggtgctcataccgtgctggagtttgtcaagcgtgaggacaccacaactgaaacagaagctggagatcagacgacccgtgaagtgctcttcaagctgctgctggaaccgcgcagcctgctcatcctcaaggacacgctgtacaccgactatctgcacgccatctccgagactagcgaggatgtgctctgcgatcgcatctccaactacgatctgtgcgagaatacctacaagatcgggga

SEQ ID NO: 16685 - DNA, 2412 bp, DROSOPHILA
caaactcccatcgctatttcaaagcaaaacaaatttttcattccacgtatcagataattcatccaattggaaaaagagatcaagaaatttaacaaagatccggaaatccggaccgacggcagcggaatgagtgttctggaacagctgggtgctctagatatcggtacaaatgagcaggtggacgaaacgctgcagcggattgccgacgaagaggcaaaagttaacgagaaactggagtcgctgctggccaaacaatgccagattgaggccaaaatgagtggcattgggcgatcactcagcctgcttcacacggtggacagcgattccaacaagctgaacgaccagatcgtaaacactgcccagttggccgaatcggtgagcgccaaggtgcgccgtttggatttggccaggtgccgtgcctccgagtgccagcagcgggtgcacgatctgatcgacctgcatctgtgtagccagggcgtggtgaaggccatcggcgaggaggactacgagaagagtgccacccacattgcccgcttcctggcgatggatcagcaattgctgcggcgcaccgccgacgacgttcagggctccataacgtcggttagcgatgcggtcaagacgctggaggatgccaccgagaagacccgcgtgctgattgccaagcgcttcgatgaggcagtcaaagccgatgatttggcctctgtggaaagattcttcaaaatctttccactagtcggttgccatcgcaccggaatcgaaaagttctcgctctacatttgccaaaagctggcaaacaaggcgcagaaggaactaaggaacgcccaggacatagccaaggcggaatcgcgcctgcaattggcctacgcagatcggctgactgctattttggaaaacttcgccagggtggtggaagtcaatcagccgataatcgaagccttttacggacaagcttcatcatcactcatcgacatggtgtccatactgcagcacgaatgcgatacggaggtgaagaatcttctaatggagttcaacaagaaccggcagatccagtaccgcagcaagcaagtaaatgaatccactcagcggtcggccggtggcggaaatctcgggagcaacagcatccaagcactgggtcattataggaaaccatctggcggctcggtggacaagctaaatcccaaggaaatcgatgccattatagctgaaataaccgtcatgcacgccagggtcgagttgtacttccgatttatgcgtcggcgcctacaggcaaggagaaaaggctctcacaaaatgcagtttgatataatggaacgctatgagaagatcatgaagaactccgatctgcgccgccaaatgcaggaaattctgagcacctatttgctgctggaaagatatttcatggaggagagcgtactgaaggccatcggcttggacacctatgagtctgggcagcagtgttcgtccatggtggacgatgtgttcttcattcttcgcaaatccattcgcagggctctgacaacccaatcgataaacggaacctgtgctgtgatcaacaacgtggctgcctgcctggatggtgattttgtgaacgcactgaaggcgcccttgaaaagcggctatccctcgggctacatcgacttggcccaggcatataatgctatacaaacatcgctgcagcagggaaaactacattccagtgatgccgatcgaggtcgagccaatttcttggttcagctgaacaatgccgacatatcgacagagtatattgagaccttgtgtcagacgatggaacaggaaattgctggcacatttccacaaacgacccaggtggagcgtcaaatgctggacagttgcctcacggaacttaaagctgtgcgggacgcgttgaaagccaccgttgattttggaatgcagcagctgcgatccagtgtcataaagccacgccttaatccctggatcaatcagttcctgaactacagtcacaatttgaatgaggaggaacttgctgcttacgaagctggggagacatttgtccagttcttcatagtgcaattggatggactacttaactcttttaagaactcgttgagtccgcgcaactatgatgcactcgttagcattttggcgaccgaagtgactattcaattggaacgggctattaagaaaatcagctttaatagacttggcggtttggtgcttgatcaggaagttcgtgccttgggaagttatctaacaggagctacatcgtggtcggttcgagataagatgacacgtatatcccaaatagctacgctcctcaatctggacaagattacggagctatcggagtactggaatccggagaataacaaagagatgtcatcttggcatctcacacctaacgaagttcgcacatttttaacgttaaggtaa

SEQ ID NO: 16686 - protein, 761 aa, DROSOPHILA
MSVLEQLGALDIGTNEQVDETLQRIADEEAKVNEKLESLLAKQCQIEAKMSGIGRSLSLLHTVDSDSNKLNDQIVNTAQLAESVSAKVRRLDLARCRASECQQRVHDLIDLHLCSQGVVKAIGEEDYEKSATHIARFLAMDQQLLRRTADDVQGSITSVSDAVKTLEDATEKTRVLIAKRFDEAVKADDLASVERFFKIFPLVGCHRTGIEKFSLYICQKLANKAQKELRNAQDIAKAESRLQLAYADRLTAILENFARVVEVNQPIIEAFYGQASSSLIDMVSILQHECDTEVKNLLMEFNKNRQIQYRSKQVNESTQRSAGGGNLGSNSIQALGHYRKPSGGSVDKLNPKEIDAIIAEITVMHARVELYFRFMRRRLQARRKGSHKMQFDIMERYEKIMKNSDLRRQMQEILSTYLLLERYFMEESVLKAIGLDTYESGQQCSSMVDDVFFILRKSIRRALTTQSINGTCAVINNVAACLDGDFVNALKAPLKSGYPSGYIDLAQAYNAIQTSLQQGKLHSSDADRGRANFLVQLNNADISTEYIETLCQTMEQEIAGTFPQTTQVERQMLDSCLTELKAVRDALKATVDFGMQQLRSSVIKPRLNPWINQFLNYSHNLNEEELAAYEAGETFVQFFIVQLDGLLNSFKNSLSPRNYDALVSILATEVTIQLERAIKKISFNRLGGLVLDQEVRALGSYLTGATSWSVRDKMTRISQIATLLNLDKITELSEYWNPENNKEMSSWHLTPNEVRTFLTLR

SEQ ID NO: 16687 - DNA, 32503 bp, DROSOPHILA
gttggcgaattccttgcggtctgcggaacgaaaagaatgggatgacttatagccccatcaggaaaactagacaattaccgctcatcaccaccgggatgtcaacatcgggacgacccagtacctcgagtttcatcttgagcgacagcatgctttcaacggattactatacaaaaatcgattcgctctgttaatttacaaaaaatgttacagccggctgtgcttattcttatcgcccaaatttaagggatggaacattaaacgagaggacttatcgacgtagaaattgggctgccaacttgctgtgataaagctgttcgaatttaataatctcgaaaaagtatcgatatataatttttaaatcaaatattttgtaagaaactacttactgtcaaaaagtattttttccgataattatttttttgcacatcatattattcaattaattgaagaactattaatacaattttaaagctcttcattgaccgattaaaattgtcaattaattaaaaaagtcaaatttatcccggaacacgcgaattcttaatattaatgtaagttcttttaaaattgatttttgaaattgtaaatttgaacaaattgacattgtaaatacaatgcacaaattcccaatcgagtaacatcgacctcaatgctgaaagtacagcctaataacagacaaaagatcttgttactagacatttttgaaaacctagacatggtatttaggtgctcaattgcatattatctcgaatatacatttatataataatctttcgctcaacagtgaatgtcctacgctgaacagaagcaatatagtttataataatataataagaaatattttgggaatgcgttaccataggattcatcaatctgaccaattgatttgcactgaaaaaatcgaaatgagttctaaaaagtatttccccgccaaaaaatatttttcccttatcagcgataagaaacgacaagtacaaaggctgtattgtatatcatatatgtatgtatattaattaaataattaaattaagtttgagggacatacatttacatcctagcaaattatagactaataactacacgttatatatcgagatgctgagttataatatttgtttgcaaacaactacacgaatacacgtatcaacagcagcagtttcctattatctcccaatatcttgcagttcctctggatccagaggatcgccaccggaaaccggaaggacctctagacttgctcatgccagaatctggagacatttcattttcgatctcttatgtagcacgttaattatgtgtgagaaagtttagtatacaaattggtgcacccacccatgtatggttttgcattaattgtttattggtttcctaacgccaagcattttgggtgtgggtgtggatgtgtggttattagtcctttttgcgtgcttctctacagctttagttcgatttgcttcgctttgtgttttatagcattttatggtttcgttttgttttgctttgttttcttggttttatttgttttgcattttaaattaagattaagataaaaacctaattatttatcttgtcatttacgccttaagtaagttcgatataaaataaaacgaagcagcagcacttccagcaaataatacagttaacataagattacagcattagggtttcattttttcgatttttcatgtttcgtttatattaattatgtatgtatatgttatgtatttttatatattatatcacctaatttgatttcaatttaaattgtttgcttgccttcatctgagggtttttcatttttgcttgtttgcttgtttctctcgcttaatttcatttccattcgcctccgagttatgcgattaaaactaagaagttggaattttcgcagcccatcaatacatcatacaacatcatacacataaacataatacaaaatgcagtgctgccacttacatgtgccttgtaacattgcgtaaaaacaaaaatacagtgaaatttacataatagttaagtatgtacaatggtttttagtcatctctaaggattcgtccttctgcaacatttagaccacattgaatccaataaactgccttatatacgtgttgcttttaaatatttccgcgtgaactttggtgttcgttcagttcgatcagtttatgagttcctatgctgcacattgtggtaatatgtaggtattagtaagtggtagaatttaaaaactatcctctatgtatttatatatcaatgtctagatgtacgtatgtatgcattcatcccttttacatacacaattcattctcatgtaatttaatgttagtttatgcatttatttatatatatatttaatatacgataaaccgtagcgtgcgtatgcatatgtatgtgttagttattcctcctcgctcgtcgcttcatttttattaaatttagtacaataagtatgctgtgtgcttgaatttcgctcttaactttgttatcctccgtttcctatcttcacgttcgactcaataataatccccgatcctataactcgatcggttagtatcagtggttctgctccgaacagtttccttttcgaatgatcataactatgctgcttcaatttcttaatgcttagggtttaggtttagttatcatatttactatttttagatttgagtgaaaaaatatacagttgttattgtattgactgttacagtgatggattggcgagccattccatcgcagatacattgcaggcgctgcacctgctgagttcccgtttacgtatccttagagttcggacacgagttctcgcacatcgtgactctctctctctctcttggcgccatacttaagtaaatttacatgcccaccccacatggatgcaggtatcatcttctggtcttgcacttcggagttgctcctgggcccgctgttcaaccaccgaacgccagcttagtcgactgcccctcgcggggttcgtggccagtagtaggacgctggcatcattgtcgtatactacgcaacggctgtcgttgttcctgcattggttggtggaggtgccgctggttgagcgaccgctgctccggcggacacgctcgacgatgtgggcggaccaacggaagcagctgccgccgccgcagctgctgctgccgctgcactggcattgcttaaagccgcagcagcggccgcagctgcagccaccttgctcacctgctgctgatcgctggcaatcgctgctgctgtcgctgatcctgctcctgttgcggctgctgatggagcggctaccgtgatcgccgattggctgctgattgcactgctactgtggctgctgttggtggtgctgttgttcgtctggttgctgctggccgtaccgcagctgttgctgttggtgctgctgttgctgacgtcgttgaacgtcgctgccggcggcaactgctggctactgttgctgttctcatcgttgaccactgccgtagtggctgctggtgcgggcttcgcttcagtggaactcgtttccgtcgatgcagtctccgcttttactgtcgcacttcctcctgcactggctgcttgcttccctgcaggaccaggtcgcagctgttgttgttgccgctgctgcagcagacggaactccacggagtgaataggccctgttcctcgcgacacttggtaaagaacacgcgaaataatcagagccacctgttggtccaggatgtgcgacatgaccagaccaagcagccgctgttcttgttgcatgaacagcgaccggttatccggatgcttggccagatggagcagggtgccggctgctctccgcagcatgtccaggctggtgcccatcgagtcaggattctcgcgcaggtagttgattccgtgctggttcgccacgcctagcgccgtctgttcggcctgctcgatgaaggccaccaggtatgagatgcacggagactgaagcgccacggtccgagccatggcgctgtcagcagctgcaaggtagtgcagcaggttcacagagaactctcgcagcacctgatcttcgttgcggcacagatgtcgggtgagcacggcgcacagcttttccagacgcgagaatggtggagtggcaatgacgaggtcaacattggcgtccgtcacgcacagcttgcaaagtgcctcgagtgccagtcgttgtggcgagagaacactattgggtccgcatgacgggaacggatcctgtccatgagcactcgggcatacggcccagtgcagcaggccgtcgatcaaggggcgggcaattagctcatcgtagcgcgacagctccaagtgtccagcaatgttggccatggcaacaagcatattctcccgaatggtaatcagatagtcccaccaccattcacgttcgccctgcagcgaactgcacgagtcactgaagtccgtatcctcctcgcgatcgtagtttcgcgtcttcggtgtgcgccgcaagtgctcgtggttcaggagcagcagtcgaccaagtaccgccagaaatctggtagacttggccagcaccgtctcgttgccgggcacaaatgtcaggttgcggaagatattggagagagcgatgcagcgccgcgctaacgagtcttggctctcgctgaccaggtggagcgacgcctcatctcgtgtgtagcactcatcctcaaagctggagtcacgccttcgctgaagcacccgcgcttcatctttggcagtcgtccggggatcgaagatggcgggagtcgaggagcagggtgccacaccattggtcagacgttgttggggtgcttcgatatccatatcaacggggcgacaatcgctgtccgccgtacctggctcctttttgacttcggcgtttggttgggcaaattcctcactcgtcagcttggacttcttgccttcggcgtgggctccgctgctgctgctgcctccgctaaccaatcgccgtttcttgttaaacgtctgttcctcggtactattctcctccgtctttatttctggcttcctggatgaggaagccaactccgttcgctttctccccttcttgtcagagcggatgtagcgtgcaaatggaatgttaacaatctccgacttgaagacgtcaataatgccgtctaagggatctggctctgtgaacccgtacgtccacgcatcgctacctacgggttctagttgctcatacaggcggttggtgtctatgtcccacgccttctggcgctcatccacaaatatatcgttttcggcgggctgtatgcgcactggcacaccctttcgcgtgaccatcgtgtagttgggcgtaaaggagagcagcagtgagcgctcctcaggattaggctgtactcgcacttgacccaaatcaattccctcgtcggcgtcttctgagtcgctgccgttgccagctccatccttgccactgcgatccatattctcataatgccgcctgcggttgtagctgctgatgctgcgcacacatcgaggttgccgtccgctggtacgcagcttttcgcacatcacagtgccgctgtccgcgtcgtcatccgcatcttccgccagcagagcggactgctcctcgttttcccgttcgtcgaacatttcggcgagattcttctgaaagtgttcaagcagcagagtcaacaggccgggcaggtttgaaatgccaaagaactggactgttgagtcatcgaataatagcacgttaagcacatctagtgcccacgtgcactcggtcagcagaccagatcgcatggccatgaatatacgccatggatccaccgggcacacgtccgccttcataagccgctttcttcggtaaagtacaggcgtggtggattccacgctgtcatgtggaaagatcagctccttctttaccagctgcgctccacctccgggcattcctggaggaccgtatccaccgggggcagtctggttgggcggcatctggtgcggatgctggtgctgtggatgctgatgggggtgtgggtgttggtgcgagggaggctgctgctgcaaaggctgttgctgcattgcctgtcccggcatcggcggtggcttttgggacatcatgccgccgggtggcccctggcccacttgttgaccaacaccctgtgatggtggcggtggcatagcgtaaggtggcttaaccattccaccgggtcccacttgtggcaatcctggcgatggaacgccgccgtgggatgcctgttgcggcggtggctgcggaactccaccttgttgttgcgactgctgctgctgtgctggcatgccgggcatcctattctgctggcctggccccgagggcgggcgaagtggtgagcccggaggtgctattcctgattgcgcagtttgcccggggttcatctgtgcccactgtggcggcgcctgaggcggctgctgcccaggaggtccagccacctgctgatacggcggttgctgctgttgctgttgaggctgctgttgctgctgtggtggcggcggaggaccttgttgaggcggatagcggtgctgatcccattgagccactcctgccggctgctggatgggcggtccatgtggtgcgccaggcggaggtgcagcaccacgtggcggagcacctccccagttttgcggagcaggcgatgatgggtattgtggccggtactgctgggtaccgctttgccaagcacctgatcaaaaattaaaagtcaattattggtcatttgctatgctcgcaatgctgcagcaaaggacttaccataaatttgaggcctagcattgtagcctggatagggctgtgagtctttgataaaatcgggatgccttcgtggttgtggactctgcaaaaaaaaaaaaagacaaaggcattagaaatattcaaaagatggatgataaacgtttgtagtacgcttattctgtttggctatttcttaagaattccagacttacttgatctggtggtggttgatagtagtcctgttgagagggcctgcccgtgggataggcgctgctggggggtgctcctggagctccgccggccggcggtccacccgcaaccgtctgcgttggcggctgaggacctcccggtggaggctggctgtagggtcggctgccgtaggggccgtactgattggcaccagttggaggactatggaagaattggaaaaaacataaaacagaaattagtaatgcctgccagtaataaatcacaactctcaagcttagtccagtgagattatatcgggcagctacagtacagaggttgttgagtgtacgtggggtctggatgtggatgtgatgtgatgtcgttgaaggtgtgtgtgtgtgtgtgttgaaggggtatgaggtgggttaattggggtgcactcacgcttccccctccggcccgtagggagggtacatgtttcggttctgcggcggatattgtcctggaccctgtccgaatggctggccgggtggcccagtggcgttgtactgatcgctcgagccgtactgcccgtaagctccaggctgtgatgggtagggtgagcctgcaaatatcatacataaacaaggtaatgataagaacaattccatcaattctgggtattgcttgtgtaagagaaatataaaaacgattacgaaaagacggccaattgacatgtgaaacatccgtctgaaactaataagttgttaaaggaaattttttcatacaaatttgaaaacagtaacataatttcaattaaaataatagtaaattagaaatatacaatcaatatttaaagttggccagagtttggactcgttcttttgcacttaatgattaaatgttaaagccaagaatcaatacataacaagatacaaaaagtggctgaaaatactttaaatgttataatgtagtagcttagattagaaatgttaggtgcacagaacatgcaatcattataaactagttcaaattagtcattagccaaagtaagtatgagtagaaagcaacacaagatgaacgaaatcgatggcagatgaagggcaaaatgtgaaaataggataaagaaagagatgagggagcaaaataaaacatgagtatacctggcgttctagacacaggcgttgggtagccggagccacccggcggataaggtgctccggcggctgggcgcacatgctgctgaggcgacggcggcacctgaccaggcccatgttgctgtggtgctggtggtggcccaccgcccactgatggtggtggctgctgcccctgctgcccctgttgctgctgcggcggtggtggccccggcaggccaggatgctgatgctgcggatgctgctgttggtgttggccggccgcctgttgggctgcggtgtgcggtgagtgtgggggcggtggatgtggttgtgggccaccgcctacagcaccaacagctccagcaccaccggatgcagcacctggacctggaccttgacctgggccaggaccggttcccgaacccgggccgccaccggcagcaatgggatcctcgaagggattgcttacgcttatattatcgccggcggcaacagcggcggcggcgcctgaggggcggcaagcggcgatttggatggtttggtttggatgaatcgaaatgaatgagtcaatgaatcacacaaatgaattgtttggttgttgttgttttggtggtggagatacatggaagcatcgttgttgtgatggtggttggtggtgggtgtggagttatatattttagtagtgcgcccacacaaacgttacaaaaacataaaaatgaataaacaaaatacacatatcaaattaataatgattgatcaacataaacattaagaatcgtatacctaattacacgtatatatgtacacaaaagtagggtattaggcgaaatagttatcagaataagcatatcatctatcagataacaatttagtaattatcaaaaacgaaaataccagaacacaaattggttacaacaaaattaacttaatagtatatgtattagagtggcaagatcagtagtacttgtaacaaaagtacaaatcgacatagctccgatttttagttagtgaatcaaatatgaatattgggagactaatttcaaacaaatgtcaacgatctgaagccactgtataaaccttatacttatcaaaagataattccaaactgattcttaccggggtgaggagtctgcgggttgttttgggagggcggacgctgcatttgacccgctgtcgcataatccggctgtggtccacttgctaccggatatggactgccgcccgggtagccgggatagccatcgatcgcagcgtttggtgcggaacctggcggagccgggaacgagtcctgtgagttcgacgaacctgttgagttcgttgttccagcatccaaatgtccaccaccgattggttgcaaattgtttgtagattggtttttttcgatgacgttttgaagatgatgcgagcagaaagtgttaaatagttgtgagcgagttgtcgggtgggtggtacgtacgcaaaaacaaaacgaaaaaaacggaaagaaattttaaattaagcatcgggtgttaggggaaaacggcgcaggactgcaagcgttctttgcacgtgataaacacttacctggcgaaggaaccgaagcagccttggccgtcttcttcttgctgcccgcctccacctgttgaatgatcggcagaggatcgatgtcaccgcgatcgaagtggcactcgaaggtcaataggttcttggtgtagtgctttcgcagcgtgtatgccgcactactactcgccccgatgcctaggagtccggcaatatccttccaggtcttgctcttggtcacctgacggaacgagagagtcgagttgatttgaattgtgagccaatgttggcattcaagagttcatgacgcaagtgtcgatcgaaaaaagagtatcaaaagattgcgagcacaaacgtattttgtgtggatgcatttagcaagtgataggaatcaacattctaaggtaaacgataaactacaaatacaatttggtcaaatggggttagggtaaggaaactacgaaagattaaggagtagcacacgctcgttattgagtttccaaataaaaccaaacaaaaacaacaaaaaaaaaaaaagaaatccgtgtcataatttcttgttaacataattcagattcagttttacgaagcgaaattaaaaaaaaaagcacaagagttgcaaattaaaagagaaccaaaaaagcacaagctgataatgtgatgacattccaaaattttaaatctcgataattcgagtggcttattggtggatgctattggtgactagggatttcaggcttcgtctactaactaacgttatcaaaacataaaaatcgaaaactaattgggaatatttaaatggcagtcgatattggcaagataatggtaggaacctttttgaagttttaaaaatgaaatctgagacatgcctgataaatataaaaagtatttgagatcaaaatagttaaaggtaaggccaagatgtgcttatactcggcatagagcatgcaatctaggggaaaaccaagactgtacaacgagtgctttggcatttcccaagtgaagctagcccgcggcaaggtaagctatactcaggatgcagctagaatttggacacatggatcggaggctgatgctgggtcaaaaggttggtacataattagctgggtggcttgactttagttggcttttaactgtagccgaatcacaatattgattttgttctatatatatggatatttcattgatttggatttggtttggttcgtgttaactacgttggtggtgttttggtttggtttggtttggttgatttggtcttgctagtagtaaatctaaaaagaagttagtaaaaggagttactacggcaccttgcatacctcgacgaatccgccacgttcttttacataaatatataacctatataaatcgagtggctgttttgagatggtggggcaggctgtgatcggagtgcgccgctcttccatgaaagcccgcagcttgtccagccagcctcgccggtccgggttgtcgtccatttcgtacagtttgcacaacgagtccgacttcttggtcgtggtaatagtgctgcggaacggctcctgcggcaccggaacgtggttgaacacctgctgtataacgatatatatgaacaatttagtatgcacttgagatccaaggacaatctctacttacagggctaccagccggacgtggccagttgggtggcgaactcatatcgtactcttcaccggggccaccacctggatgcatcacaactgggtggggtgacgtgctcggcggggctaagtgactttggctatagggatcattcttccgcgactttggtgtggtgcattgtggatcttcgccggatgctgtgcaaaaaaaaaccaataacattagtcgaaaatcttttaaagtcgtatatataggccaactcacctgctgatgcattcgaaagcgtgctctgctgactgacttcgtccatggacgttccatccggcccggtggtgaccaccgatgtgaccgcatgcattcccgcagcacccgttggtcccgacgagcttatcccattgtcctgcgatatatgctccggtccaccgctttccggtccgccactggcaccctgtccctgcggctggccgccttggagcatttgggattgcggcggcgtgctagtgggtggacccatgttggtgggtccgtgcgggggtcccatgtggtggggtggccccattggcatgccaggatgcattccggtcggcccgttgccgtacccctgaggcccctgcggcggagtcggacttccaccatagccgcccttgtgctgtaaatgctgcttcagatagttaagtggacgcggtgatccactgccctgcggtggtggtggtccgcccacaactggaggtggcggtgtgcccttgccttggacgtgattgcctaccatcgcaccaccgggagctccgccgggcacggtctgttgcggcgatggcggtacccactggtacggtggatattggccagtgtggttgggcataccacggcccggatagccaccagcttgggcaccagagggcatgctgttggcaccaccagctcctgcttgacttgtgggtggcggaggtggtccggtggcgtaggcgccaggcggatactgcgggcgtggcggatagttccctgaaaacaagccaaagaatagttgtgttgtagaaagcagaatcttttcttggtatggaaatcatgtacatgtggaattaacctgcagcaggagcacctttttaaattcaaaatgatgcagggatcttacctggtggatattgctgtggctgctgcggtggatatccctgagcaccgggactctggcccggtccgcccatcttgtaaccgccgtgcatgtgcggtggcatcggataacctcctccagccgcgccttgcggtggtggtggaggcgtggccatgttgttcataccctggttgggcggcggagccggcggtggcgtttgctgcggcgaattgctcgccgacgaggccgaattcgatgcttgttgctgctgagattgctgctgttggggcggacctcctggcattcccggatgcggtggcatcggcggtggacctcctgccccaaccggcggctgttgcatgggcccaccgctgcttgattggttgctcgccggacgcgagattggatggttttgagctgcaacagaaatgggtaattagactggcttcaagattgaatcaatgctgaatactcaccgactgccggggacatggaacgcgaaccggaggagcctgttggcgagggtgtgggtctcatcacctgttggggattgggtgtgcctggcggaccggagcccatgccactgtgcgccccgccgctggagctgtcgttgctgttctgtccaattagctcctggaaaggtaaaagacaaccggaaccagttccgctattagagtgcattcaatcaagtgcaatggcatcaaatgccggccggcaggtggcattttttgtagtatttattcatttaaacgaaagtgatagcaactatgaattagccaagcggcaaccgcaattaaagcgaatgccaacgcacacagatatggaacacgagcatatgactgagcgtcgctttgggttggtagtcgtcgcaggccagcgtaaacatattcatggcaatcagatgttttgggtgggtatttcgacccattccgatgccaaatgttgatgccaaacgatcccagaggttgggggacatgtactccccgcgcgtcccgcgaccttttctgacattgcctcaggaatttgagactccttcaccgctcccacacccactcacccgtgctcacaattattataacccggtcaggggggaggaatccgaattcataaacgccaagctgctcgaacaataacaactcttaaaacagtctgcaggcaccagaaactcggtgcgatgcgacacgactttaattttttgccgcctataacttataagaaaatcaagaaaaagctccacactaacagccccactcgcacactcgcatactagcacacatggcagctacaacaacagccagcagcagacgtgcacataaagcttaagtcgacagcaattcgaaacactcacacacggggccatggcaaaaaccccagcggagagagctcagtgggagcagtggcgccatcgaatagggagtctttaagataccacgaaggtacttctatatgataatataaaatataaactatacatatttaaaataagaattatatgtacttatcagactgcttctataaaaatatattagtttattctgtacatctaagcacataatattaaaatctctctacagcaaaactctccccttaaaatataataagcctaagcccctgacaatccacagcggcagtagaaagaaaaatacaacgaacgaacgaacgagcgagcgaacgttgttcgttttggtatctgagaaattaagtgaagtgaaatgaaatgtacgacgacgaactgacggcacaaggcggcggcatgggatggtatggtatggaatagtatgagatggcgatgtcgatggggtgcggagacgtagctgagcggggcataaaagctatgtggaacgaaccgagcaaccgagcaagcaaccaaccagccaacgagcaagcggacgagcgacaacagcaaaggcaaaggcaaaggcgacggacggctgcaacttgaagcgttccaaggggcgtttgagaggtggggggatggcggcgggtgttctggcgacggatggaggctacgactacccggggttcgggcaagtggctgtggtagttatggcgcgctcgaagcgaacgaaaggcaacggcaacgatgacaaagacgtagataaggaacagaaacatgcacacacagatacacacccataccgaggcacgtacactctaaatgttggaatataataaaatgaaataagcaacgacggcaacggcggcactgccaggcaagacgaccaggccattcgtacgaattcgaattcgcattttagcgaggggttttctcgagggggcaaggcggtacggtacgggcacgggcacggtacaccacttgagttgcgagacgatgacgagaatagcaagcaagcaagcaagcaagctggcaaaaccaaaagcaggcgggcagaagcaaagctaaaggccaggccggatagaatgctttgtccaacggggcgtagtggggttagattttaggggaacggacgggcacaaacaacaagcggcccacgtttgtagtccgcatccgtatctgtgtgtgtgtgtgtgtgtgtgtgtgagcctgtggtcgcgtagaaaaattacttggaaagaaaaacaagcgccttgcggatacaacaacaatgaaatcatttataacgaaaataatgcgaggcaaacacaaataaaaaaaaaaaagataaaaatatggggaaacacacctcctcccacacctctggcccggcccccttgccccatcaaatcgcaatcgagcgcagctaaataaagttcagccaagatttgcgcgccaaaagtgttgagagttcgatttttgggcacgatttcagagaaggggactcgcccttggaccccacttgaaaaccgaaagagcaaaaagcaaaagaccccatcatctttcatcgttcgttctcaagatgcgatgatgatgtagcagcattggccacaagttcgacttttggccctcgaaagcgcacttcaccgcattttatgccgtgtcatctgtggacgttcatttaaataaagaatatgcatgcctacatgttagttgttggctggatgggtaggtaggtatgtttatgtctggctgtcagctgctgccgatggaaccgctggtactaccggcggtactggtgcctctggtgggacctttgtggcttatcaccttaaaacctttagcagtgaatgtggcaagcgagcgttgcaaaaaataaaaaggaaaccaaaaacaaggactggcatacatgtgcttgttatgcggccagcgaagagataaaaaataagagaattaaatgcacaaaggagcggcacacacgaaaccggcggaaaggagaggggcagccgggaatttataaacacagccattctcggagagaaaaagtaataaactcggggatatcataaaaatgaaaacaagagggaagggccaggccaacgcatgcaacccgcattctgaaataccctagctgaaaggttttgccattccaattagtaagtttcaagctagtaggatgatgcgttgtaaagattacgctctatcgtcatagattaaaaaaaaaacagttccattaaaaattgcaggaaagcaatattcctaataagcaccgttgtaagagtgtttaactagctataactatttatctagttaaaagtattagtattttaaagcaactaaaccttttgctaagaataccactcaagtagcacaaattataatgccccactgcaaagggtgaaaacctcaaaaactgaagcaatgagaatgcgaaacaaacaaaaaaatagttcaccaccacatcccgcatagtctcagtctcagtcccagtacccgccgtcgtctccattctcgcaatctccaccccctcaagtgcaatggttggttttcattatgcacagcttgttcgccggatcggaggggtttaacctcagagccagggaacgagatactatatatatatatatatgtatataaagaacagagcacagctgagcgacagccagtccgactgtcgctcattagacatccatcctccacctcccagtgtgggagagggtcggtctacgtctccatctgcatctgcatctgcgtctgggtctggggtctggatctgtttctgattctgaatccgattctgggtccgagtccgctcggatccatgctcatgcaatttctgtttgcgcttgctggaaattttatgagcgaatcgaaagtttgtgcaattgtgttgagtgtgcatggcgcacattgcacaaggcaacccagacagtaccacaaaacgcagatgaacatacagtccaacttccctgtgttgatctacaaatcgaatcatactgaataattacagattcctggaattatgattaagatctaagaagtagtagtacataagttttactcattattttctattgaatccaaatcatgaattaatcagaaattatatttttaaccaaaatgttatggaaatcaagcatttcgaaaattatagcaataatcaaccatctgaagtccttagggaattcttgggttttttttttgttcatgataaatagttcgagttatagaagttcgactgtatatagagaacaaatactcgcatattcgtttattcgtataccagcagcagaagtcgctttggatctgctcggttcggttgggtttggttcgcttcgttttgtttcgtaccgtttcgtttgctcgttggctgcttttgccagcggagcagcagtcagtcggtggccccaatccttgccccgcaccttccgccctcatccacttacaatatggcaaactaacagactgtcagactgactggcaatccgacgcagcaacagagcaacagaccaacagccactggcagcagtaaaagcgaaaaaacgaacaacgaacgaacaacaacagccaacgttggcagtcaaccactttgagtgctcagacaaatgtcccattaatcgcacactgggctccaaccgaaaacacacggcccagagtcgcagccagagctgccagaaccggcaagagccagagccacagccacagccagggcaatagctaaagcaaaagccaaagccatagccagagccagagccaggccagaccagaccaaagcgatccaatccgaccgaccctactcgactcaactcgactcgtttcgagcaacgtttcgattcgttcgtggtgtgtatccaaacgagtgaactgaaaaacaagcgcacaatcacacgactctctgtatgtataaaatttgtatgcgttcgaaacgaggcagtacactgaaacataagctgggcggccttttgataggatattataaagaaccattaccttgccattttcattaaattattgtttctgatcaagtcactcatcaaaagactgaactttggcctaagattccaaacccagagtaatcatatatttctttcaaagaattcttctctgtgcatcagcgccaactgaaatgaacgttctttttatttcgactttatttttgccttttttactggctgcgccgcctgttaaaatgaaaaacgatgatgatgccgccgccgccgccgctgctgctgccaacaataacaacaacgacaacgcagcagagtcgcaggcacagcaatgagtggagcactaaaatcccagcaacaacggacgaagaaaaaccggcaaaattgttcattggcagttggaaggcaccataatgaaggggcacagggcacggggaagatggggggacccggttgcggaaaggccgtgccatgtggctctggggcttttgggctcgcaatcgcaatagcaatagcaatggcattcgcatgccggtggtttgagtttgggcccaaagccccaaccgtgtgcactgcaccacagacaatttcggctggcattaaatgaatgcagcagttgtgtgctgctggcggctggctggcccgcaaatttcagatgctgataggcatacagatagatagtcatgccaattgcccacagagcagagagaatatgacgcagaacagtcgacttgaaataagtttctaaactaggacacgtcgatggggctggctgtgtgctcttgaaaatcaatgggactgccaccagccactgggtggcttaaataacacgctatatagaaaaggtgtcccaactgccgcagaaagaggaaagcggcggctaaaagccatcagtagttaaatattattgctggcagttggcttttgttcagcaacacacggcgaatttaaagcggcttacaaaatgcaattcgaaatcgaccagcttaaataacaatggacgggcggcagggacttcccccgactttggaagtttggagtggcttaaaaccagcattggctgcggctgattacagttttcgttcggtttcggctcgttttcagttggtttcagtgttgaattggccagaaacgcggatttaaccttgcaacacccaattaaaacgcaaaggaaaaccgattggtttgattttgtaaagtgttttgagtgcactgggttgagacaacaaatatactatattatattgacatacgttcgcttttcattttggcatccaatggaacttttggttatgaaagtgatgtggtgaattgaataattcaacgtttcgtatacatccaaatcgaatacattcggttatgacgcaggaaaatgggaaattaagatttggttaggggtcttaaggtgaagggataataggatagttggcagttatatatgacttcccatctcttaagatcttgggaggagagtttatggccacctcaattatcgctaatgatatggatcgatggcggctgaagaggacctgagttgatgagagtacacataaaatgtaaacaacccgctatacaacaacggcaacaagaacaacatcgacgacgcgaaggagatggaggtgaagcaagaacaagaacaacaatgaccttggcattgacccaaatatatggtaacagacgctttgtgtgtgatcttgagtgtagtcatgcgagtgtgttggttgcatatacatgccacataccaaaatataaagggaatgagggggaaaaaaccgaaatacgaaataaagaaatgtggtatggggcacaggaggattgtcgaccgtgcagagcaatgtgcgagggcgatgggggattgcgggtggaacaggggcaggggactcgcaggagaaaggggagcagggacagccacgacggccgcggacatgctgaatgaataaatggggtacaaagtaaacgcacacatccgcaggcacgtcacatccacagatgcggccaatataataatactatggatactatggaaaattattcgccaaataaaagtatttgcatatcgacaatatagataaatcaaacgacaaaatttgtagaatcccagtgaagagcattgtgcatatattcatttgaaactttttcaattaactgaacccaaaaatgctgataacacgtgcatatgccatttaaacaaacaaacaaaaaaaaaaaggaaggggtgggggtgggggatttaccagactgccagcgttgcgaaaaataaaccaaaagacaaaggggaaaaacgccgccgctgccataagaaatagtaatcaaaacaaaataaaaatcattaaaattcataaaaacaaatcaagacagccgtcgacgacaacaagaagaaaaagcaacgataaggttaaaagcaattttaaagttaaggtaaagggaggcgggcatatggttgggatacgatagcggttcaagttcaagggaacaaagggaggtgtttaggtacacgcatatatatgtacttatgtataaatagagaaaataacatcataagcccacacaagtattaagatctaaagagcgctgggcggaggacaggaaaatccgccagagcagagcaatctcaacccaaaaatgagtactagagtaccctcgtgtgggggtatgagtgccggtatgagtacgaactacgagtgccatggccaggcataaacatttgacctgaacaacttttgtagactggctgcctgcctcttgttgggctaaatggtggacgagagaatggtgcggcagcgggatggaggcactggggtacgttctctggttgggaggatggggggaatgggaatcacaggtaaagagtgcgacgccgatgtagacgtatatgtgtgacgtcacgagtcaagttcacgtgctgttcacgcagcacagtttattgacccactttcgatgtgtattatctagaaaagctgccaacacgagtagtgtagtgaatgggggactactgggtggtcccacggccaaacatccaatgaatgtgcaaataggaaatgtgcttgcccatataaagctgttattgtatcataacatactatgggtgaatgcattaccgcacattcgattggaacgtactcattgaggtttccttacaacttttatagttagagataacaaaccatatgattatcaatgcttataccaattgtgtttgctaagaaaatgttgtttttgttttttggtatctaaagagcaattcaagagccaatggactacattgtctttttctgtatctgaatgtttgcttatagatggagaaatgacggaaatggtgtccttggagttgctttcgttacttctcatagtgcatcaactttctagataatcttttcaccaacaatctttcttcagagatcgaataaatcttcaatcaaatcatatccaatcgcttacctggtgcggtgagggcgacgcctgcgatggttgtggcgatggactgggcgcatggcccggactgctgctgggaggaggtccgccggcgctgacgtgtggcggtggtggcggctgctgctgcagtggcggcacatggtgcggtgaggcgggcggcaagggatgtccggaaccgggactgggcgaggacccacctggccaaggtcgattcggttcgggatactgcgcatgaagatggttgattgattaattctgaaagagacgctgctatcttattgctccttacctggtgcgtcgagtaggcagttcgatggttagatccgccagccggcagacccggcggtgttggatagcgttgcgggtacggcgaatattgagatgttggcggtgtgttctgttgcggcggctgctgtccggtacctggaggtggtccgcccggcacaggaccgccgggctgctgacccgcctgctgttgctgctgctgctgttgttgctgttgctgctgcggtgaactaggataggaacctgaattttgaccgtgagctggcggatagggtgactgacccctggaagtgtttgtctgtggatggaaaatcatttggatcaataaaagccaaaagcaaacttataaatatctaatgaacgtcaaagtttaacccactaccttctagtggtcatatgtatgtagaagtatactaaggataaagctgttgaatcgttgaattcattattgaaaatccaattagcgcttcaccacctacaacaattcagttcttcgattttcaacatgaaatgttaatagcgagttttctatcgagctacggatatgtcacgtgggtctttagagggttaaattggagaagcgatagagacggcacatgggtttttaattacaggcatctcgctctttctcagtacgactctatttatatcctcccacactctgctatcccctgcaattcatcaattatttgcgtttggcttcgccgatgcttcgtcggtgtgcgagagctgcacattcaattttattgtatatatcattttaatcgatattccacaaccgattcccgtaaattcgcgcccaaatacacaccctcttggtcatgtgtgttcggcagctctacagtggatgtcctcggattaggactctcggcattggaaatttccagcaattaatattcgattgtgcagctgcaagggaaaactagacagtaattggaattgaccccgactgcacagaccccgacaagtgcccctaattatttggcgcccactgtggcgtgtgtgtacactgcacattcatcgcattcgggggttggggtgcaagggagcgacatcgacgcaccctcgggtgtgctgctgtcacttgacagtcacaaatgcgcagattaaaaggagacagttcagaaaatatgctgccaaaggatcctaaatgcaggcaataaaaagttgaaatacaccaatataacggcaaagcacctacacattcgtttttacaatgtagggaggaaagttagatacagaggataactaaagcaagctttttccagtttttacctcgaattaaattcagaaactaaggatatttttaaaaagcaactaaaacatattttattaaaatacatctttaaaataaaacagcatttattcctctatataattaagctattgttttgcaccaatattagcaagtcagattccagagatattcaatgaatttcagtacccgtcttataatcttggcaacattccacagtgctagaaaagcgacctgcgttgtccatgtccttcccaatcagttcaaattacgaagctctgtcctgaaggaggacgcataacttctagctgggacgggggcagtcgattgcctgccactcgtggctcctgctcctgctcctgattccctctgccactccgtgacccgtcacagcgccagaagaagaaatccacttgagtggaatataaagtgaaacttacggacgcacatacatgaggatgtgcatgtgcagaggcgaccagaccaggccaggccaggccatgccaacgacaaagttgcaacaaagccagggaaaaggagctccgagacggagaggacacctcgctgcggaacctggcctgcacggcagacaactggagcaggacgagcaaaaaccaggcatgccatgtgccatgtggcggtgtatgtgtcaaagactgtctgtgtgtgtgtgtgtgtgggaaagagctttggatgccattaatgaaaggattttcaacttgacgtggtgcgacaaggcggaccaagtcgcaacgcagcacagagcagcgaccgtctgacatggcaagtggagaggcgcttggcaagctcgcacagacttacggttcgccctcgcaaacagaaaaccccacagcggcgtacacacaaatgtagccgggcaacaacatcgctccgaatgccacagcccggagtaaaatgtggcaataaatctaatggaaactcacagcaatgagggaacgaacgagggagccaaccaagacagggaagtgctggcatctaagctacttttgtgactgtcgggccttaaacaattttattcattttctgttcaactgtgcagctgtataaccaaacccgctatcacccatggcttaacacatttaaaaaaaaattacaaattgcaatttaatatcccttgagtccgaactatctataacaaaaaacaccctactattattatacatttgctataagattagttagaagagataggacaaattgttttcgaacccataaggtgaaaaaacataagaatatttgaatggatataaaagcacttatagaaagggatatctaaaaaatttctaagaaaaaaagcaaatatgaatattttagagacattgcttttaagccctacttaaggcatttgttataattccctctgcaagcaagtcaacactactcccaacactgttggtctggccaaaggtaagcaatgctaaggaaaggaaaggcaaggcagggcaacgtaaggcacggaaggcagcgctatatagctagaatcagaaacagaaacagccagagccagttaagtcagaaccaagggccaaagccagatcccgtcgttcgggcaacgagaacaacaacggcaactccaacaacaatcgacaacggctacgacgtcgacgaggatggttggtcgttcctcgttcggttgggtcggtccactgcagggtgacaggaaacatgaatggatggttttcgtgctccgctgtgtgcgtgtgtatctgtgtgtgcggagcgagcgaacgaggcaacgagaaataaagttaaaaaggaaaaaaaaaagaaaaagggaaaactcatcatggatgaaaatcaaaagcagaaacggcaacggcgggtagaagctgaagtggaatttgaattaatgcagcaagggtcgtacggtggcacaaacgcacacacacagatacacacagccacacactcatacaaagactgtaacgaacgaatgacggttggaacgaacgtcgctcggaattaagttcggggaaatcgggataggatcggggggttgggacgggaacaactgaaattctgaattcagggctctgagttctcgttcggatggtggtaggttttccagctaaaagccggctacatgtattaaaatatcgcgggaacaaaaacaaagcgcagcagccaagggagtggtcctgtttgcctctgtcccctgcgctccgctccgctcctcgtctccttgatcctgggtttataatttcataaccaacagacacacagatacatacacacacacccacgggcggagggcgattgcatataaattgtgcgaagggaaaaacgtggtaaatgcgattttgtggcagtaaaggtaaagccggcaatggcagttgcaagggttgtatatatgtgtgtgtgagggggtggaaaggaacaaggggaatgtggtggccgggggaaggacgtccctgctggctacttccgctgttgctgccggcaaatggaaggaattatgtgcacagctctcgaacaggcgtaatttttaatacaatgtcgcactctccacgcgcccattcacattggcagcagttgcagaaagataaacaaggcaaccgaaataaaccaatgcaatccgctccgacaactgtcgcaaaatattactcaaaaatgttgagcgattacccctgtgtgcttaattaaattttgtgctcctctgcctcttatgatgatggttttttgggttcttgaaactttatacttgtcccaacatttctcttttagtatagataatacttatgataaatgattaactattgtaacgtttatttaaaaagcgaaacctcatgattacctctcatttaggttcatctatacattaatcataaggcaagataaccaatttgtaaatcttctaaataaatcttctaccaatgactgctaaaatgtacatagagttcaattaaacaattttgcaaacacttaagctgattttccatcaggttgcatataaaaacggaaacggcttgccaaaaaagagagccagagaaaaggcaaataaaggaatgaggaagtgaaggatccccatcaagaagggacaataaccgttaaggcaaaggcaaggcaacggttttgtgtgctccactttttgtaggtcaaactttaaaggcactcctccaatacaagcaggccaacccatacatgcgaagaaacggcataaacaagccggcacacagacatcaactctctcgaaataaaaaaaacacaaagcgccggaggaggtggaggtagagtcggaagagggccaaacaggaacaacaaagacacaaacgaaaagagcggttaatgcaatgccttttgcctttccccaaaaaataacaaacatgaaggggaagtaccaccaaaaaaaaaagaggcggaaaagaggcctttaagctctttaatatatgcccaaaagtgttgttgcccgccttgcacctgttgacctcaaaggagaatcaaacggaacgtcaaggatgtatggggagcataacgggatgcatctagcacacttgcactcgaagaaagagaggggtagagtgagtgagccaaggcatgtcatcatagtcgagccctcctccccccccttccacttctacacctccacctcctctcttttgactgtgcgcggtttcacttgattttcatttttattttgttttggtttctgcttcctccacagcttgccggctaaccccacctccaccaccgtcccttcttcttctgcttctcctaccccaaaacagagagagggagggagaatcagctgtgacaacaacaagtttctctgttattgcctttgattacggtgcctacttggccattgttgttgttgctactgctgctgctgccgtttcggttgtaccgatgtatgtttgatacgtaagtatgtatgcgagtatatgtatttattgcatgcacgcgtaagtcacactctgccggcaatttgatttctttgtttatgcacacaagcccgccgagcgaggcaaacaatcaaacaaacacatgacattggatagcagcgcttctagactctttttcagccttttttttttatttcgcactagctacctacacatagagacacaccaacactgagccataaacaaaagctctcgaaggtcgcatcacatcgcatcgcatcgcaccgcatcgcacacgtctaaccctagcggatcgctttgatttgtgtgctcacacatagatttgtttatatttctctgtctaatcgtcgacataaaagttcgttgactcccattccgagacatcgcatctacatccgcaccacaccacaccaaaccaaaccattcatgaagtacaaaaacaatcgatcctactgcagtgacatcaaatatgccagaagcaggcagaccgatgactacatagacacggaatcgggccacaaatatgagtttgttgggctgcggcgggttagccccctaactaccacactaccccactaataaaacaattaaccggtttccgtttaattcaaaacgtgaaaaaatcatatcacgtgcttctccattggggccaacaaaccaagcaaaccaaaccaaacaccaacttcaagcgcattatcgcttgacacaactgataggcaaattcttgatatcagggattacaaagagtaaaacacaaaacgaactgtgaaaaaaatctacaggtactacaagttcataaccaaccaaaaacattatatttctgtttatccattaaaacgtataaggtgtgggttgtgggtcggtgtgtccattagttaaattgtataggattgtatgttttcacacgagcgactttttacggtatctttatgttccgtataacacttttttacattcgcttttaatactatggagttatatcgactgataaaaatggcttgactcattactatattactgtttgatatatgttttttgttgtctataattatagtcatgtcaagaaaacagtaagaaataactacttcattaactgtgtaacaaacccctttccatcttttgcaagttttgagtagtagtatccacttctttcttttaacgtttaacactaacaatgcaatgataagctttaaaattattccaatcagacacgaggccaacaggccgtcgataatgttgacatgaaggggacaggaaaccctaaaaaccctaaagaatgtgaatgaatacctcaacatttttgtgtacgaaactctttcttgttattccgctgcttcttcttctttgtcttcttattttaccgttgcggtgcggccttttgttgttattgttttgcggcggcaagtgccggttctctgctgtccgtctccctcactctcacccggcttcgcccagtaacaacaactaaagcacaacaacacccggcacttaaacagcgaattttcaaggggatgggggtatctacaggaggaggaggagcagggaactaagtgggaggggcgggcgaaaaaggcgcggaatctgagtacaatgtttttacgttatgtgtgtcagtgtgtctgccgcttctgccccttttttatattctttccttcgagtgggacttggcaaatcctcagtgaactgaatgaagtgcgaccaagacgaaaccctaaaaagtaacagtaaatattgcagcctccctcccacgcacacacacatacacacacactcccaaacgaatacatgtgcacaaaacgtgacgagcccctctccatggaatgagtgggcagtgggtgtgtggagtgcggtggggtaggagattgggggagggagatagctagcacaaagccaccagcgacaaccgcaccaacaacagcatgaaacacatgccgtggaggcctgcacatggaaatactccagtaagtaagtgtgtgtgggtttggggtcgatggaatcaaaatcagtgtcaatgtcaagacagctctaaaataaaaaaaaaatacataaggaaacccctggcgataagattcttggtattcagtctttaagaggttgcctttaggcacaatgacaccatttctggtgcaacaactagatcatttaatattcttttcggaaaatggttattttgttacagaatacacaacatttattgtgtccttttcattaagtttctatcctggaaggcgtttaagctaccatccagtttttcgttactttaaagccgaaggttgcccccgcaatattgagaataaatatgaaataagatactataacttgaaaagacaaccgcattttctattttcggaagctgtgaattaaaacgaatcataaaaacactgcttttggtaaatacttcaaggcattcctaaacaacgtattacaccggaacaaagtatttacaactatttcaagttcggagactatttaagccgaatactcttgacttttagatgtatcttccacaatatcttgtatctacagaactttcaaacatttttatggacttgcaatgatttctcgtgaacgcaactaaatatacctttcaatttacaacttttctatcccaaaaaagcatgttatccttgttatccccaaatatcccctttttgatcacttaccggtggtggtgtcctgtactgctgtgacggtcccagttgcggactgtagggccttggtggcggtgcccagccgccctgttgccctccgtacggcgatggctggtgctgcggtggcggcggtccatgtcctggtggagggggtccaccggcctgctgttgctgagccgccgctgccgctgccgccgaagcggccgcctgctggggatcgtaggtgttggcgtagcgatgctgcggcggaggcggcggattcgaggactgaagcagagagtttaacgttggcgtgggtccctgcggaggctgaccgggtatgtagcgctgctggggcggacgattaggtgagccaccgggccccggttgctgcgggggttgctgttgaggatgtggctgttgttgttgtggaggctttccacctggcagcggctggccatagcgatatggatccatgttgggatcggcgtggtagcgaccatacgccggatgtggatgaggcggcggcaagtgagtgtactcctccttgacaccgggcgcatgctcaggtgctcctccgggcggtggtggtgcaggtccgccgtggtgctgctgttgctgcatatggggtggtggcggatgctgctgttgctgctggtgcagatgatgatagtgcatgactgcagctgggtccggtcctggtggtcctccaggaccagatcctgggggcggtggtgcgccgtatggatgtggggcaacattttgttgttgctgctggatgctgggatcgctaccgttgttgctgttgttgttgggtgtgggcgggcccgaggttggcggtgtagcggcaccaggagccgctccagccgatgggggcgtggcagcaggggcgggagcgccaccttgctgctgctgctgtgtttgcggcgactttattttctcattcatggctgctcatcggcttctggctgcgctgctcccgatctcccagattttccggatcggattttcccagatgtgtggcggctactgatggaacaccggtaaccaccaacaacaacaacgctgacgctgatgatgacgacgactgcagcggcgagtttgaggttatgttagctgcaagttatcaaaaacgggggattagcatttggcaaagggggtctggcttattaaagggggcagtcctatatcactgggcctaaatcgagcgggttaaacataaataatttgtactcgttcgtgggctgttgtgtattgaaaagtccgctactaacacacgcacacacatgctcactcgaacaggcagcaccaataccacaacaatttattttccgccgcgtacggtgggcaaatcgtagtgcgttgacaaccctgccgcaaccgctctcgcagtttgagcgcatccactctcgttggcgctctcgctctctcttttcacatttggcggctatacacgcacacgccgtatccctttccgtctcacttgcacttgctcgccatccaggctgaaggcatatggcgctctcgctcgctcgctcactctctcccttgctcgctttattagtttctgtgtgaaacgaatgaaacgggcagcacagtaatgattttttcgtaattattttctatgccgatttttcgcgtttacacagcactggaatggaatggacgagggggcatcatctcacaattgtttaacttattttcttttcgtgagtgggagagagaggggggctaacgcttaagatttataaataattgccgcgcctgcttggccgcgtttgttgcgcgttcacttttggccgctgccgttgtcttgagaggctctctttttttgttcggctgcttgcgttttcctgcggtttttcgccaagtgtttatgaagatgatgatgatgcaaggattcgacatccaatcatttgcatatgtatacacacacgcactcactcgcacacacactcacacagcctccaaagtgcatcgtcgagaggagagaaactgaatttttcactcgccctcgggcgaaagtccggcggcagatttgttgttgggccaagaagactcaatatatattttgcggggcgctttggtttttggggcttttcttaaccagaaatctacatacacgcacaccacttacacatagaagaatattcacgcattgacgaccgtccacagactggctatatatactaaaaacgaactcgcgtgagaagacagggacagggcagcaaactcggtatacgaacggaacgaaatgaaacgattcaagtagtagtgtatgcaagtcttgtctgtctgcgcctggcgttcttttctcttctttttttcgatggtttttcgccaggctgggcgctgccaaaacgctgatacggcggccacaatcacacgcggctaatcgccagttgggccctgcacaggctgcacatacttttcactattaatgcgctgtatttcacttatttttcgaacaaattcgcagcatgacgaagaagcgagcctgtacaagattagagcgggtagcacgcacgatagtatcgatacgtacgagtatttggcactgcgatacattatcggtgctcgtttcgatagcccccgatagctctagcacgaaattttatcgctttatccatattttatactatttttatttattggacttcaatgaatatttattttacgttctggttcgctttttaaatatatatggtaatcaatagctggcgaattagcgatatttgagtgtgacgcaaaaatgagttggcatcgatatcgatttctcgctactctgggacgccatctttattgcggtattttaaacggaaacttaactcaaattaaacggcgtgctaaaattttccatttttttcgaataaaagcacgtaaaagtttgtgaagatgtaaaagttataaaaactagaaagccttattcgtggccagcgctttcgttttagaaatacgtcaatttaaagtttttaaggtaaattgcaaaattgcaataattgcaataatataataataataaaattttggtaagttataagagagtaaatacaattttgaaagtttatacccccgttaacaaaccacttgaatttagagtggcagaactatgcaactacagcgagtttaaacatcgatatattcgtgatttttggtttgcttattatcgattccatacaaaactaccggcataagcaattttaaaatagacgtaaacaacatcaacgtaattaatccacaaaaacaaattcttttattaattttaattgatgcaatacattttaatttttgtgaaactctaaatatcaatagtcgccctatgcattgatcattgtcacaaacattgttaaaatttattaaatttattttggtagaacactaggttttcgatttactggcttccggatttttactcataggttttaaaaatattttttgccaaggatatcaactaaaaaaatatttgtttatttttttataatattaatgaaattctatattg

SEQ ID NO: 16688 - DNA, 10645 bp, DROSOPHILA
tacaggctcgcttcttcgtcatgctgcgaatttgttcgaaaaataagtgaaatacagcgcattaatagtgaaaagtatgtgcagcctgtgcagggcccaactggcgattagccgcgtgtgattgtggccgccgtatcagcgttttggcagcgcccagcctggcgaaaaaccatcgaaaaaaagaagagaaaagaacgccaggcgcagacagacaagacttgcatacactactacttgaatcgtttcatttcgttccgttcgtataccgagtttgctgccctgtccctgtcttctcacgcgagttcgtttttagtatatatagccagtctgtggacggtcgtcaatgcgtgaatattcttctatgtctaacataacctcaaactcgccgctgcagtcgtcgtcatcatcagcgtcagcgttgttgttgttggtggttaccggtgttccatcagtagccgccacacatctgggaaaatccgatccggaaaatctgggagatcgggagcagcgcagccagaagccgatgagcagccatgaatgagaaaataaagtcgccgcaaacacagcagcagcagcaaggtggcgctcccgcccctgctgccacgcccccatcggctggagcggctcctggtgccgctacaccgccaacctcgggcccgcccacacccaacaacaacagcaacaacggtagcgatcccagcatccagcagcaacaacaaaatgttgccccacatccatacggcgcaccaccgcccccaggatctggtcctggaggaccaccaggaccggacccagctgcagtcatgcactatcatcatctgcaccagcagcaacagcagcatccgccaccaccccatatgcagcaacagcagcaccacggcggacctgcaccaccaccgcccggaggagcacctgagcatgcgcccggtgtcaaggaggagtacactcacttgccgccgcctcatccacatccggcgtatggtcgctaccacgccgatcccaacatggatccatatcgctatggccagccgctgccaggtggaaagcctccacaacaacaacagccacatcctcaacagcaacccccgcagcaaccggggcccggtggctcacctaatcgtccgccccagcagcgctacatacccggtcagcctccgcagggacccacgccaacgttaaactctctgcttcagtcctcgaatccgccgcctccgccgcagcatcgctacgccaacacctacgatccccagcaggcggccgcttcggcggcagcggcagcggcggctcagcaacagcaggccggtggaccccctccaccaggacatggaccgccgccaccgcagcaccagccatcgccgtacggagggcaacagggcggctgggcaccgccaccaaggccctacagtccgcaactgggaccgtcacagcagtacaggacaccaccaccgacaaacacttccaggggtcagtcaccctatccgccagctcacggtcaaaattcaggttcctatcctagttcaccgcagcagcaacagcaacaacagcagcagcagcaacagcaggcgggtcagcagcccggcggtcctgtgccgggcggaccacctccaggtaccggacagcagccgccgcaacagaacacaccgccaacatctcaatattcgccgtacccgcaacgctatccaacaccgccgggtctgccggctggcggatctaaccatcgaactgcctactcgacgcaccagtatcccgaaccgaatcgaccttggccaggtgggtcctcgcccagtcccggttccggacatcccttgccgcccgcctcaccgcaccatgtgccgccactgcagcagcagccgccaccaccgccacacgtcagcgccggcggacctcctcccagcagcagtccgggccatgcgcccagtccatcgccacaaccatcgcaggcgtcgccctcaccgcaccaggagctaattggacagaacagcaacgacagctccagcggcggggcgcacagtggcatgggctccggtccgccaggcacacccaatccccaacaggtgatgagacccacaccctcgccaacaggctcctccggttcgcgttccatgtccccggcagtcgctcaaaaccatccaatctcgcgtccggcgagcaaccaatcaagcagcggtgggcccatgcaacagccgccggttggggcaggaggtccaccgccgatgccaccgcatccgggaatgccaggaggtccgccccaacagcagcaatctcagcagcaacaagcatcgaattcggcctcgtcggcgagcaattcgccgcagcaaacgccaccgccggctccgccgcccaaccagggtatgaacaacatggccacgcctccaccaccaccgcaaggcgcggctggaggaggttatccgatgccaccgcacatgcacggcggttacaagatgggcggaccgggccagagtcccggtgctcagggatatccaccgcagcagccacagcaatatccaccagggaactatccgccacgcccgcagtatccgcctggcgcctacgccaccggaccacctccgccacccacaagtcaagcaggagctggtggtgccaacagcatgccctctggtgcccaagctggtggctatccgggccgtggtatgcccaaccacactggccaatatccaccgtaccagtgggtaccgccatcgccgcaacagaccgtgcccggcggagctcccggtggtgcgatggtaggcaatcacgtccaaggcaagggcacaccgccacctccagttgtgggcggaccaccaccaccgcagggcagtggatcaccgcgtccacttaactatctgaagcagcatttacagcacaagggcggctatggtggaagtccgactccgccgcaggggcctcaggggtacggcaacgggccgaccggaatgcatcctggcatgccaatggggccaccccaccacatgggacccccgcacggacccaccaacatgggtccacccactagcacgccgccgcaatcccaaatgctccaaggcggccagccgcagggacagggtgccagtggcggaccggaaagcggtggaccggagcatatatcgcaggacaatgggataagctcgtcgggaccaacgggtgctgcgggaatgcatgcggtcacatcggtggtcaccaccgggccggatggaacgtccatggacgaagtcagtcagcagagcacgctttcgaatgcatcagcagcatccggcgaagatccacaatgcaccacaccaaagtcgcggaagaatgatccctatagccaaagtcacttagccccgccgagcacgtcaccccacccagttgtgatgcatccaggtggtggccccggtgaagagtacgatatgagttcgccacccaactggccacgtccggctggtagccctcaggtgttcaaccacgttccggtgccgcaggagccgttccgcagcactattaccacgaccaagaagtcggactcgttgtgcaaactgtacgaaatggacgacaacccggaccggcgaggctggctggacaagctgcgggctttcatggaagagcggcgcactccgatcacagcctgccccaccatctcaaaacagccactcgatttatataggttatatatttatgtaaaagaacgtggcggattcgtcgaggtgaccaagagcaagacctggaaggatattgccggactcctaggcatcggggcgagtagtagtgcggcatacacgctgcgaaagcactacaccaagaacctattgaccttcgagtgccacttcgatcgcggtgacatcgatcctctgccgatcattcaacaggtggaggcgggcagcaagaagaagacggccaaggctgcttcggttccttcgccaggttcgtcgaactcacaggactcgttcccggctccgccaggttccgcaccaaacgctgcgatcgatggctatcccggctacccgggcggcagtccatatccggtagcaagtggaccacagccggattatgcgacagcgggtcaaatgcagcgtccgccctcccaaaacaacccgcagactcctcaccccggcgccgccgccgctgttgccgccggcgataatataagcgtaagcaatcccttcgaggatcccattgctgccggtggcggcccgggttcgggaaccggtcctggcccaggtcaaggtccaggtccaggtgctgcatccggtggtgctggagctgttggtgctgtaggcggtggcccacaaccacatccaccgcccccacactcaccgcacaccgcagcccaacaggcggccggccaacaccaacagcagcatccgcagcatcagcatcctggcctgccggggccaccaccgccgcagcagcaacaggggcagcaggggcagcagccaccaccatcagtgggcggtgggccaccaccagcaccacagcaacatgggcctggtcaggtgccgccgtcgcctcagcagcatgtgcgcccagccgccggagcaccttatccgccgggtggctccggctacccaacgcctgtgtctagaacgccaggctcaccctacccatcacagcctggagcttacgggcagtacggctcgagcgatcagtacaacgccactgggccacccggccagccattcggacagggtccaggacaatatccgccgcagaaccgaaacatgtaccctccctacgggccggagggggaagctcctccaactggtgccaatcagtacggcccctacggcagccgaccctacagccagcctccaccgggaggtcctcagccgccaacgcagacggttgcgggtggaccgccggccggcggagctccaggagcaccccccagcagcgcctatcccacgggcaggccctctcaacaggactactatcaaccaccaccagatcaaagtccacaaccacgaaggcatcccgattttatcaaagactcacagccctatccaggctacaatgctaggcctcaaatttatggtgcttggcaaagcggtacccagcagtaccggccacaatacccatcatcgcctgctccgcaaaactggggaggtgctccgccacgtggtgctgcacctccgcctggcgcaccacatggaccgcccatccagcagccggcaggagtggctcaatgggatcagcaccgctatccgcctcaacaaggtcctccgccgccaccacagcagcaacagcagcctcaacagcaacagcagcaaccgccgtatcagcaggtggctggacctcctgggcagcagccgcctcaggcgccgccacagtgggcacagatgaaccccgggcaaactgcgcaatcaggaatagcacctccgggctcaccacttcgcccgccctcggggccaggccagcagaataggatgcccggcatgccagcacagcagcagcagtcgcaacaacaaggtggagttccgcagccaccgccgcaacaggcatcccacggcggcgttccatcgccaggattgccacaagtgggacccggtggaatggttaagccaccttacgctatgccaccgccaccatcacagggtgttggtcaacaagtgggccaggggccacccggcggcatgatgtcccaaaagccaccgccgatgccgggacaggcaatgcagcaacagcctttgcagcagcagcctccctcgcaccaacacccacacccccatcagcatccacagcaccagcatccgcaccagatgccgcccaaccagactgcccccggtggatacggtcctccaggaatgcccggaggtggagcgcagctggtaaagaaggagctgatctttccacatgacagcgtggaatccaccacgcctgtactttaccgaagaaagcggcttatgaaggcggacgtgtgcccggtggatccatggcgtatattcatggccatgcgatctggtctgctgaccgagtgcacgtgggcactagatgtgcttaacgtgctattattcgatgactcaacagtccagttctttggcatttcaaacctgcccggcctgttgactctgctgcttgaacactttcagaagaatctcgccgaaatgttcgacgaacgggaaaacgaggagcagtccgctctgctggcggaagatgcggatgacgacgcggacagcggcactgtgatgtgcgaaaagctgcgtaccagcggacggcaacctcgatgtgtgcgcagcatcagcagctacaaccgcaggcggcattatgagaatatggatcgcagtggcaaggatggagctggcaacggcagcgactcagaagacgccgacgagggaattgatttgggtcaagtgcgagtacagcctaatcctgaggagcgctcactgctgctctcctttacgcccaactacacgatggtcacgcgaaagggtgtgccagtgcgcatacagcccgccgaaaacgatatatttgtggatgagcgccagaaggcgtgggacatagacaccaaccgcctgtatgagcaactagaacccgtaggtagcgatgcgtggacgtacgggttcacagagccagatcccttagacggcattattgacgtcttcaagtcggagattgttaacattccatttgcacgctacatccgctctgacaagaaggggagaaagcgaacggagttggcttcctcatccaggaagccagaaataaagacggaggagaatagtaccgaggaacagacgtttaacaagaaacggcgattggttagcggaggcagcagcagcagcggagcccacgccgaaggcaagaagtccaagctgacgagtgaggaatttgcccaaccaaacgccgaagtcaaaaaggagccaggtacggcggacagcgattgtcgccccgttgatatggatatcgaagcaccccaacaacgtctgaccaatggtgtggcaccctgctcctcgactcccgccatcttcgatccccggacgactgccaaagatgaagcgcgggtgcttcagcgaaggcgtgactccagctttgaggatgagtgctacacacgagatgaggcgtcgctccacctggtcagcgagagccaagactcgttagcgcggcgctgcatcgctctctccaatatcttccgcaacctgacatttgtgcccggcaacgagacggtgctggccaagtctaccagatttctggcggtacttggtcgactgctgctcctgaaccacgagcacttgcggcgcacaccgaagacgcgaaactacgatcgcgaggaggatacggacttcagtgactcgtgcagttcgctgcagggcgaacgtgaatggtggtgggactatctgattaccattcgggagaatatgcttgttgccatggccaacattgctggacacttggagctgtcgcgctacgatgagctaattgcccgccccttgatcgacggcctgctgcactgggccgtatgcccgagtgctcatggacaggatccgttcccgtcatgcggacccaatagtgttctctcgccacaacgactggcactcgaggcactttgcaagctgtgcgtgacggacgccaatgttgacctcgtcattgccactccaccattctcgcgtctggaaaagctgtgcgccgtgctcacccgacatctgtgccgcaacgaagatcaggtgctgcgagagttctctgtgaacctgctgcactaccttgcagctgctgacagcgccatggctcggaccgtggcgcttcagtctccgtgcatctcatacctggtggccttcatcgagcaggccgaacagacggcgctaggcgtggcgaaccagcacggaatcaactacctgcgcgagaatcctgactcgatgggcaccagcctggacatgctgcggagagcagccggcaccctgctccatctggccaagcatccggataaccggtcgctgttcatgcaacaagaacagcggctgcttggtctggtcatgtcgcacatcctggaccaacaggtggctctgattatttcgcgtgttctttaccaagtgtcgcgaggaacagggcctattcactccgtggagttccgtctgctgcagcagcggcaacaacaacagctgcgacctggtcctgcagggaagcaagcagccagtgcaggaggaagtgcgacagtaaaagcggagactgcatcgacggaaacgagttccactgaagcgaagcccgcaccagcagccactacggcagtggtcaacgatgagaacagcaacagtagccagcagttgccgccggcagcgacgttcaacgacgtcagcaacagcagcaccaacagcaacagctgcggtacggccagcagcaaccagacgaacaacagcaccaccaacagcagccacagtagcagtgcaatcagcagccaatcggcgatcacggtagccgctccatcagcagccgcaacaggagcaggatcagcgacagcagcagcgattgccagcgatcagcagcaggtgagcaaggtggctgcagctgcggccgctgctgcggctttaagcaatgccagtgcagcggcagcagcagctgcggcggcggcagctgcttccgttggtccgcccacatcgtcgagcgtgtccgccggagcagcggtcgctcaaccagcggcacctccaccaaccaatgcaggaacaacgacagccgttgcgtagtatacgacaatgatgccagcgtcctactactggccacgaaccccgcgaggggcagtcgactaagctggcgttcggtggttgaacagcgggcccaggagcaactccgaagtgcaagaccagaagatgatacctgcatccatgtggggtgggcatgtaaatttacttaagtatggcgccaagagagagagagagagtcacgatgtgcgagaactcgtgtccgaactctaaggatacgtaaacgggaactcagcaggtgcagcgcctgcaatgtatctgcgatggaatggctcgccaatccatcactgtaacagtcaatacaataacaactgtatattttttcactcaaatctaaaaatagtaaatatgataactaaacctaaaccctaagcattaagaaattgaagcagcatagttatgatcattcgaaaaggaaactgttcggagcagaaccactgatactaaccgatcgagttataggatcggggattattattgagtcgaacgtgaagataggaaacggaggataacaaagttaagagcgaaattcaagcacacagcatacttattgtactaaatttaataaaaatgaagcgacgagcgaggaggaataactaacacatacatatgcatacgcacgctacggtttatcgtatattaaatatatatataaataaatgcataaactaacattaaattacatgagaatgaattgtgtatgtaaaagggatgaatgcatacatacgtacatctagacattgatatataaatacatagaggatagtttttaaattctaccacttactaatacctacatattaccacaatgtgcagcataggaactcataaactgatcgaactgaacgaacaccaaagttcacgcggaaatatttaaaagcaacacgtatataaggcagtttattggattcaatgtggtctaaatgttgcagaaggacgaatccttagagatgactaaaaaccattgtacatacttaactattatgtaaatttcactgtatttttgtttttacgcaatgttacaaggcacatgtaagtggcagcactgcattttgtattatgtttatgtgtatgatgttgtatgatgtattgatgggctgcgaaaattccaacttcttagttttaatcgcataactcggaggcgaatggaaatgaaattaagcgagagaaacaagcaaacaagcaaaaatgaaaaaccctcagatgaaggcaagcaaacaatttaaattgaaatcaaattaggtgatataatatataaaaatacataacatatacatacataattaatataaacgaaacatgaaaaatcgaaaaaatgaaaccctaatgctgtaatcttatgttaactgtattatttgctggaagtgctgctgcttcgttttattttatatcgaacttacttaaggcgtaaatgacaagataaataattaggtttttatcttaatcttaatttaaaatgcaaaacaaataaaaccaagaaaacaaagcaaaacaaaacgaaaccataaaatgctataaaacacaaagcgaagcaaatcgaactaaagctgtagagaagcacgcaaaaaggactaataaccacacatccacacccacacccaaaatgcttggcgttaggaaaccaataaacaattaatgcaaaaccatacatgggtgggtgcaccaatttgtatactaaactttctcacacataattaacgtgctacataagagatcgaaaatgaaatgtctccagattctggcatgagcaagtctagaggtccttccggtttccggtggcgatcctctggatccagaggaactgcaagatattgggagataataggaaactgctgctgttgatacgtgtattcgtgtagttgtttgcaaacaaatattataactcagcatctcgatatataacgtgtagttattagtctataatttgctaggatgtaaatgtatgtccctcaaacttaatttaattatttaattaatatacatac

SEQ ID NO: 16689 - protein, 2703 aa, DROSOPHILA
MNEKIKSPQTQQQQQGGAPAPAATPPSAGAAPGAATPPTSGPPTPNNNSNNGSDPSIQQQQQNVAPHPYGAPPPPGSGPGGPPGPDPAAVMHYHHLHQQQQQHPPPPHMQQQQHHGGPAPPPPGGAPEHAPGVKEEYTHLPPPHPHPAYGRYHADPNMDPYRYGQPLPGGKPPQQQQPHPQQQPPQQPGPGGSPNRPPQQRYIPGQPPQGPTPTLNSLLQSSNPPPPPQHRYANTYDPQQAAASAAAAAAAQQQQAGGPPPPGHGPPPPQHQPSPYGGQQGGWAPPPRPYSPQLGPSQQYRTPPPTNTSRGQSPYPPAHGQNSGSYPSSPQQQQQQQQQQQQQAGQQPGGPVPGGPPPGTGQQPPQQNTPPTSQYSPYPQRYPTPPGLPAGGSNHRTAYSTHQYPEPNRPWPGGSSPSPGSGHPLPPASPHHVPPLQQQPPPPPHVSAGGPPPSSSPGHAPSPSPQPSQASPSPHQELIGQNSNDSSSGGAHSGMGSGPPGTPNPQQVMRPTPSPTGSSGSRSMSPAVAQNHPISRPASNQSSSGGPMQQPPVGAGGPPPMPPHPGMPGGPPQQQQSQQQQASNSASSASNSPQQTPPPAPPPNQGMNNMATPPPPPQGAAGGGYPMPPHMHGGYKMGGPGQSPGAQGYPPQQPQQYPPGNYPPRPQYPPGAYATGPPPPPTSQAGAGGANSMPSGAQAGGYPGRGMPNHTGQYPPYQWVPPSPQQTVPGGAPGGAMVGNHVQGKGTPPPPVVGGPPPPQGSGSPRPLNYLKQHLQHKGGYGGSPTPPQGPQGYGNGPTGMHPGMPMGPPHHMGPPHGPTNMGPPTSTPPQSQMLQGGQPQGQGASGGPESGGPEHISQDNGISSSGPTGAAGMHAVTSVVTTGPDGTSMDEVSQQSTLSNASAASGEDPQCTTPKSRKNDPYSQSHLAPPSTSPHPVVMHPGGGPGEEYDMSSPPNWPRPAGSPQVFNHVPVPQEPFRSTITTTKKSDSLCKLYEMDDNPDRRGWLDKLRAFMEERRTPITACPTISKQPLDLYRLYIYVKERGGFVEVTKSKTWKDIAGLLGIGASSSAAYTLRKHYTKNLLTFECHFDRGDIDPLPIIQQVEAGSKKKTAKAASVPSPGSSNSQDSFPAPPGSAPNAAIDGYPGYPGGSPYPVASGPQPDYATAGQMQRPPSQNNPQTPHPGAAAAVAAGDNISVSNPFEDPIAAGGGPGSGTGPGPGQGPGPGAASGGAGAVGAVGGGPQPHPPPPHSPHTAAQQAAGQHQQQHPQHQHPGLPGPPPPQQQQGQQGQQPPPSVGGGPPPAPQQHGPGQVPPSPQQHVRPAAGAPYPPGGSGYPTPVSRTPGSPYPSQPGAYGQYGSSDQYNATGPPGQPFGQGPGQYPPQNRNMYPPYGPEGEAPPTGANQYGPYGSRPYSQPPPGGPQPPTQTVAGGPPAGGAPGAPPSSAYPTGRPSQQDYYQPPPDQSPQPRRHPDFIKDSQPYPGYNARPQIYGAWQSGTQQYRPQYPSSPAPQNWGGAPPRGAAPPPGAPHGPPIQQPAGVAQWDQHRYPPQQGPPPPPQQQQQPQQQQQQPPYQQVAGPPGQQPPQAPPQWAQMNPGQTAQSGIAPPGSPLRPPSGPGQQNRMPGMPAQQQQSQQQGGVPQPPPQQASHGGVPSPGLPQVGPGGMVKPPYAMPPPPSQGVGQQVGQGPPGGMMSQKPPPMPGQAMQQQPLQQQPPSHQHPHPHQHPQHQHPHQMPPNQTAPGGYGPPGMPGGGAQLVKKELIFPHDSVESTTPVLYRRKRLMKADVCPVDPWRIFMAMRSGLLTECTWALDVLNVLLFDDSTVQFFGISNLPGLLTLLLEHFQKNLAEMFDERENEEQSALLAEDADDDADSGTVMCEKLRTSGRQPRCVRSISSYNRRRHYENMDRSGKDGAGNGSDSEDADEGIDLGQVRVQPNPEERSLLLSFTPNYTMVTRKGVPVRIQPAENDIFVDERQKAWDIDTNRLYEQLEPVGSDAWTYGFTEPDPLDGIIDVFKSEIVNIPFARYIRSDKKGRKRTELASSSRKPEIKTEENSTEEQTFNKKRRLVSGGSSSSGAHAEGKKSKLTSEEFAQPNAEVKKEPGTADSDCRPVDMDIEAPQQRLTNGVAPCSSTPAIFDPRTTAKDEARVLQRRRDSSFEDECYTRDEASLHLVSESQDSLARRCIALSNIFRNLTFVPGNETVLAKSTRFLAVLGRLLLLNHEHLRRTPKTRNYDREEDTDFSDSCSSLQGEREWWWDYLITIRENMLVAMANIAGHLELSRYDELIARPLIDGLLHWAVCPSAHGQDPFPSCGPNSVLSPQRLALEALCKLCVTDANVDLVIATPPFSRLEKLCAVLTRHLCRNEDQVLREFSVNLLHYLAAADSAMARTVALQSPCISYLVAFIEQAEQTALGVANQHGINYLRENPDSMGTSLDMLRRAAGTLLHLAKHPDNRSLFMQQEQRLLGLVMSHILDQQVALIISRVLYQVSRGTGPIHSVEFRLLQQRQQQQLRPGPAGKQAASAGGSATVKAETASTETSSTEAKPAPAATTAVVNDENSNSSQQLPPAATFNDVSNSSTNSNSCGTASSNQTNNSTTNSSHSSSAISSQSAITVAAPSAAATGAGSATAAAIASDQQQVSKVAAAAAAAAALSNASAAAAAAAAAAAASVGPPTSSSVSAGAAVAQPAAPPPTNAGTTTAVA

SEQ ID NO: 16690 - DNA, 6947 bp, DROSOPHILA
cagttagggagcaaatcaatcgaaattccgaaattcaagtcgctacaacgattggtttcagggccacaccaaacacgcgagtgcttcaccagtagcctaaacattcatctaatctaaattattaatcaaaattttaattttatcattctgttattttcgtagctactataagtttctttgttttaaaaccattcaattagttgcataatataaaataaaacaagagagaatgctatagcgagttccccgactatcagatacccgttactcagctagactgaatacgaacgcgaaatttaatcatttttctgggacatcgatagatattggggaataaactgagaataaatttaaaaaaatttttcaaagtgtgggcgttgcagtcttgtgcggtttatgggcgttagagtgggagtggcaacatgggctcacaagtctagatcgactcggctattgatcctgatcaagcttccttctgcctgttacatactattcaatgaatctagtatacccttttaatctaggagtaacgggtaaaaatatattatcttaacgcttccttctacctgttacatacttttcaacgagtctagtataccctttcagtctacgagtaacgggtataaaaagtcgaagctcttccatttctttcgcatatatgtagtttcggattggggcctgataagaccccgataagagggcagtatggagaagagcgaacggattaaaaatagaacgcgagagcgcgccgcaatcggaagagaatcaaagactagaatcaaaacacagcactgttgatgtggttaaatcattcgttgagtggcactgctcccagcgagacgctccagagcgtctataaatacgccacagagctaacgaggcggaaagatcgcgcgccgcgagttataaaacagcgattagaaggagaagtgcgtccaccacgtggctggaggtcaattgattgtacggatatacatacatacattttatcacacacattatgaccagccagaaggagggaaatggatacaggcggagcgattccaagactactggacatgcggacgcggaggcggcgacgcagacggctggtggggatgaggacaactctctggatgcgattctagtccgaatcgggcagttcgggcgctatcagatcatcaactatgtgctgctatgcgttcccatgctcttcaacgccttcttctccatctcctatgttttcacggcgagcaccgttgtgcacaggtaggcaaaaagttcatcaaacaaaatggctggtcaagatctcagacttcccattggtcccaggtgcactgttccgcagtgcgatagtcccagcagcgtctatgaggaggactggctgggcttcaccatccccaagaagaactccgcctgggatgactgtcatcgatacgccgccaacatatcagacgctatctcgggatacaccgatccatctggacaatactgcctcaaagagtacttcactattacgtcggagacctgtggacgcgacttcaagttcagggacgaggaaaagaccatatcaacggaggtgggtagacaaagataagggcgtaggtgagttgatagactctattgatggaagttccgtgggaaatttttaattcgatagcaagttggagtgagttatcttcaggaggatgttattaaagcagtgtcaatcattaaaacgattattgccaataacttgctaggtaaaaaactcgatcgtgtacattgcaggtacacatgttaaaattttcattaactatattactttatacccaataaaacacgtattataaatgtacgtgatagcatttgcggtttaagaactaaaagtattaaaaatgcatcgattcaaatatttgtaatgatttgtttcaagtatcacttttcttatatttaattcaaatattatgtacacaactaatcgcgtatcctggctggtccgtatttgatataaatacatatatattttttgcttttacatgaatttaatatatagaatcaatcaaatgtggaaatcttttaactagtaaagtaacaatattaacatatcatctcctaagtttggaatatactgtgaggacgagtggaagctttccatggtgggcactataaacaatgtgggccaattcgtgggcatacccctaggaggatactttgcggatcggtaagtccctgtccctgtttggtaagagtattagcagtctaacagcatcttcatctaccccagatacggacgacgtaccatgctagctgtagccggatccgtgagtgctctaatgggcgtgatccgttcgctgtcgagcaactactccatgttcctggtgttcgagttcctggacatggccgtgggtagcaccctcttccccaccgcctttctgttggcaatcgagctggttggcccgaagaggcgagtggctgcggccacaatcatcactatcttttacgcgctgggcgaggccttcctcggattcctggcttcccaagtgcagcactggcgctggctgctccgggtgctgtacgctcccgctgtgctgcagattctttttttgtggatcttgccggagagcgtccgttggctgctgagtcagggtgccgaggagaaggcgtccaatgtgctgcgacgggcagcgcggatcaaccagcgcccgctgccggaggagcagttgaacgatctcttgaccagcaatcgacagaagctcagccaggccaacgagagccagtatccaataatgcgagccgtagtattcttctcgctgcggatagcaaactgttgcctttgctggttcacgcacacgctgatcgccctgggtcttagcctgaactcggttaacctgggtggaaacaagtacaccaacttcatgctgaacggttttatccagatccctggtctgctgctccccctagtcatcatggaccgcgttggcagaaggcattccctctgcgcctcaatgctgctctgtgccatttgcatgggcgcctctgccgcagtgccagcaggtgaaggaacatgatctttcagctaatagttctctagaatgtgactgatttccccttagataactacgcgggctctctggccctgttcctaattggaaagctggccatcacctgcagtttccagatcttatatttcttcacctctgagatctttcccacaaacgtgcgaaacaccctgttgtcgctctgttccatggtgggacggataggatccatgctggccccacaaacccctctactggttagaacggaattacctatgcgggctcgaccagctaattctctgcccttatctcttccaggccaagtattacatttacgccccgcagatcctgttcgctaccttcgccctgatcagtggcttcctgaccctggcctttcccgagacggcggacaaggtgcttccaacgaccattgaggaggcacgcgatttgaatcaggccaagcggcggagtgagaggtcgccgtaatatccgtgatattttttagcagcatttagcacactttttaaagtcttagaagccacgttttagttttgttagtttgtttgtttgttttattatgtgcgtactatttattccaaaacaatatctgtagtctcctccttccacaagttgtacttatctatgtatgtaggtttaaatttattgcgcatgcataagtatatctgtcgatcaatgccattatttattaacgagtaagtaataaaatttaattcaactcggatcggaagcgaatagatttcaaacgggtaaaaagtaaggaaaataactttttttaaatcacatgtaagcgatacgtagacatctacatccagtgtggcgccctcttacgggaagtggtggtactatttctacttgtcgattagtatcgagtacacaactgttgatgtcggggatggcaactcaaacatatgcgattgcccaaaagtacgtcattttgaaatagcgttttagcaatttaaaattttaggtttatatatgattgccgttttttgtattctttaaatgatgttatttatcaaggaaataatttcgtaatgttggttagacctaaagatgtctcggtaactaaaaatgtcagaaaatgtatttattttgttcaaatcagacggtatattgggacggtattacttattatacccgttatgtatgtaaggaaggtagaaggaatcgtttccgactatataaattatatatattcttgatcagagatcaaaggacgagtccattcagccatgttcgtctgtccgtatgaacgttaagatttaaggacctataacaggtggttgagattaagcatacagattctggagacattttttttcccatgttgccacgcccactctaacgtccacaaaccgccaaaaacggccaccactaccaccacaaatttgcatatttttattagttttgtaaatttctatcgatttgatatctgaagaattaccattgttcacacatgaacacgaatatatttaaagacttacaattttgggctccgttcaaaggcgttctaaggcgacatgggtgcagtgctcaaaaacatgtaatctaagtgcacactacatgagtcagtcacttgagatcgttccccgcctcctaaaaggtcccttagtgggagaccgccgctcaagataggcagatgtgccggagcgtaggaccccgatgaggcggggactatttacttaggcctctgcgtaggccatttactctaagatgcgattctcatgtcacctatttaaaccgaagatatttccaaataaaatcagtttcttacaaaaactcaacgagtaaagtcttctcatttgggattttacaccataatttgaataaaacgatcaaagatcgcacttatctattgtataataatgcttttgaaacacatagaaatatttgaaatcgcaatgcaaatagttggatgatattaccaattaccaatttttaccaatacctattaccaattattaacgaataatcagggatacccctgcttacaaatttgacatttcatagcaatgaaaatatctggcaacaaaaatcagcccattaggacttcatattaattcagtttagccatgaataatgacaccagtgtaatctgttcatgacgaactgcgtaggagcagttgaacgatctcttgaccagcaatcgacagaagctcagccaggccaacgagagccagtatccaataatgcgagccgtagtattcttctcgctgcggatagcaaactgttgcctttgctggttcacgcacacgctgatcgccctgggtcttagcctgaactcggttaacctgggtggaaacaagtacaccaacttcatgctgaacggttttatccagatccctggtctgctgctccccctagtcatcatggaccgcgttggcagaaggcattccctctgcgcctcaatgctgctctgtgccatttgcatgggcgcctctgccgcagtgccagcaggtgaaggaacatgatctttcagctaatagttctctagaatgtgactgatttccccttagataactacgcgggctctctggccctgttcctaattggaaagctggccatcacctgcagtttccagatcttatatttcttcacctctgagatctttcccacaaacgtgcgaaacaccctgttgtcgctctgttccatggtgggacggataggatccatgctggccccacaaacccctctactggttagaacggaattacctatgcgggctcgaccagctaattctctgcccttatctcttccaggccaagtattacatttacgccccgcagatcctgttcgctaccttcgccctgatcagtggcttcctgaccctggcctttcccgagacggcggacaaggtgcttccaacgaccattgaggaggcacgcgatttgaatcaggccaagcggcggagtgagaggtcgccgtaatatccgtgatattttttagcagcatttagcacactttttaaagtcttagaagccacgttttagttttgttagtttgtttgtttgttttattatgtgcgtactatttattccaaaacaatatctgtagtctcctccttccacaagttgtacttatctatgtatgtaggtttaaatttattgcgcatgcataagtatatctgtcgatcaatgccattatttattaacgagtaagtaataaaatttaattcaactcggatcggaagcgaatagatttcaaacgggtaaaaagtaaggaaaataactttttttaaatcacatgtaagcgatacgtagacatctacatccagtgtggcgccctcttacgggaagtggtggtactatttctacttgtcgattagtatcgagtacacaactgttgatgtcggggatggcaactcaaacatatgcgattgcccaaaagtacgtcattttgaaatagcgttttagcaatttaaaattttaggtttatatatgattgccgttttttgtattctttaaatgatgttatttatcaaggaaataatttcgtaatgttggttagacctaaagatgtctcggtaactaaaaatgtcagaaaatgtatttattttgttcaaatcagacggtatattgggacggtattacttattatacccgttatgtatgtaaggaaggtagaaggaatcgtttccgactatataaattatatatattcttgatcagagatcaaaggacgagtccattcagccatgttcgtctgtccgtatgaacgttaagatttaaggacctataacaggtggttgagattaagcatacagattctggagacattttttttcccatgttgccacgcccactctaacgtccacaaaccgccaaaaacggccaccactaccaccacaaatttgcatatttttattagttttgtaaatttctatcgatttgatatctgaagaattaccattgttcacacatgaacacg

SEQ ID NO: 16691 - DNA, 2289 bp, DROSOPHILA
atgaccagccagaaggagggaaatggatacaggcggagcgattccaagactactggacatgcggacgcggaggcggcgacgcagacggctggtggggatgaggacaactctctggatgcgattctagtccgaatcgggcagttcgggcgctatcagatcatcaactatgtgctgctatgcgttcccatgctcttcaacgccttcttctccatctcctatgttttcacggcgagcaccgttgtgcacaggtgcactgttccgcagtgcgatagtcccagcagcgtctatgaggaggactggctgggcttcaccatccccaagaagaactccgcctgggatgactgtcatcgatacgccgccaacatatcagacgctatctcgggatacaccgatccatctggacaatactgcctcaaagagtacttcactattacgtcggagacctgtggacgcgacttcaagttcagggacgaggaaaagaccatatcaacggagtttggaatatactgtgaggacgagtggaagctttccatggtgggcactataaacaatgtgggccaattcgtgggcatacccctaggaggatactttgcggatcgatacggacgacgtaccatgctagctgtagccggatccgtgagtgctctaatgggcgtgatccgttcgctgtcgagcaactactccatgttcctggtgttcgagttcctggacatggccgtgggtagcaccctcttccccaccgcctttctgttggcaatcgagctggttggcccgaagaggcgagtggctgcggccacaatcatcactatcttttacgcgctgggcgaggccttcctcggattcctggcttcccaagtgcagcactggcgctggctgctccgggtgctgtacgctcccgctgtgctgcagattctttttttgtggatcttgccggagagcgtccgttggctgctgagtcagggtgccgaggagaaggcgtccaatgtgctgcgacgggcagcgcggatcaaccagcgcccgctgccggaggagcagttgaacgatctcttgaccagcaatcgacagaagctcagccaggccaacgagagccagtatccaataatgcgagccgtagtattcttctcgctgcggatagcaaactgttgcctttgctggttcacgcacacgctgatcgccctgggtcttagcctgaactcggttaacctgggtggaaacaagtacaccaacttcatgctgaacggttttatccagatccctggtctgctgctccccctagtcatcatggaccgcgttggcagaaggcattccctctgcgcctcaatgctgctctgtgccatttgcatgggcgcctctgccgcagtgccagcagataactacgcgggctctctggccctgttcctaattggaaagctggccatcacctgcagtttccagatcttatatttcttcacctctgagatctttcccacaaacgtgcgaaacaccctgttgtcgctctgttccatggccaagtattacatttacgccccgcagatcctgttcgctaccttcgccctgatcagtggcttcctgaccctggcctttcccgagacggcggacaaggtgcttccaacgaccattgaggaggcacgcgatttgaatcaggccaagcggcggagtgagaggtcgcccaatcgacagaagctcagccaggccaacgagagccagtatccaataatgcgagccgtagtattcttctcgctgcggatagcaaactgttgcctttgctggttcacgcacacgctgatcgccctgggtcttagcctgaactcggttaacctgggtggaaacaagtacaccaacttcatgctgaacggttttatccagatccctggtctgctgctccccctagtcatcatggaccgcgttggcagaaggcattccctctgcgcctcaatgctgctctgtgccatttgcatgggcgcctctgccgcagtgccagcagataactacgcgggctctctggccctgttcctaattggaaagctggccatcacctgcagtttccagatcttatatttcttcacctctgagatctttcccacaaacgtgcgaaacaccctgttgtcgctctgttccatggccaagtattacatttacgccccgcagatcctgttcgctaccttcgccctgatcagtggcttcctgaccctggcctttcccgagacggcggacaaggtgcttccaacgaccattgaggaggcacgcgatttgaatcaggccaagcggcggagtgagaggtcgccgtaa

SEQ ID NO: 16692 - protein, 762 aa, DROSOPHILA
MTSQKEGNGYRRSDSKTTGHADAEAATQTAGGDEDNSLDAILVRIGQFGRYQIINYVLLCVPMLFNAFFSISYVFTASTVVHRCTVPQCDSPSSVYEEDWLGFTIPKKNSAWDDCHRYAANISDAISGYTDPSGQYCLKEYFTITSETCGRDFKFRDEEKTISTEFGIYCEDEWKLSMVGTINNVGQFVGIPLGGYFADRYGRRTMLAVAGSVSALMGVIRSLSSNYSMFLVFEFLDMAVGSTLFPTAFLLAIELVGPKRRVAAATIITIFYALGEAFLGFLASQVQHWRWLLRVLYAPAVLQILFLWILPESVRWLLSQGAEEKASNVLRRAARINQRPLPEEQLNDLLTSNRQKLSQANESQYPIMRAVVFFSLRIANCCLCWFTHTLIALGLSLNSVNLGGNKYTNFMLNGFIQIPGLLLPLVIMDRVGRRHSLCASMLLCAICMGASAAVPADNYAGSLALFLIGKLAITCSFQILYFFTSEIFPTNVRNTLLSLCSMAKYYIYAPQILFATFALISGFLTLAFPETADKVLPTTIEEARDLNQAKRRSERSPNRQKLSQANESQYPIMRAVVFFSLRIANCCLCWFTHTLIALGLSLNSVNLGGNKYTNFMLNGFIQIPGLLLPLVIMDRVGRRHSLCASMLLCAICMGASAAVPADNYAGSLALFLIGKLAITCSFQILYFFTSEIFPTNVRNTLLSLCSMAKYYIYAPQILFATFALISGFLTLAFPETADKVLPTTIEEARDLNQAKRRSERSP

SEQ ID NO: 16693 - DNA, 4208 bp, DROSOPHILA
gtcgcgcaaagcccaggagaaggagcgtcccaccaaatcggaacgcattgatagcaccaacctgctgcacttccgcattcgtgccttggatttgttggagctcttcataaccaagaaaccaactcaatcggtaatcctggacgtgctacattgcgtgttccaggtgtacagccattgcgccgcagacagcaaactacaatccttgcgagaagccagtttgaagttgctcaaaaagatactcgctaggaatatcgaactcaaggaaaatcagagcaccgcacccattctggaagccattgagcagctgatgtcgtctggcgaggagcattcagaagaggaccaagagaacggcaagcagcccgccagccgacaggccaaaagagacatcattatttggcgggacaggtgcttcgcttacctggtcagccaggcatcagcagatggcgagcccaagaaaagtgccgtctggccccttctagtcgaattcctggagctgtgggtagccaagcgacgtagtcgcctctctctggccagtttcgaagccctctttcagtctggccaatggcagggagttgctccgctggccgttgtcctggcctctcacttggacgtacagaaaacacgcagttttcggcgggcacagatactgaagctgctcagcgagcaaggtcgccggctcgaagtcgctttcaaggacaacaactcgtcttccaagaaatttgagaagcagatagccagatatgtaaatcagctagaaacgaaggctagcagttccaaggaactcaatctgctgcttaagatcctcgcccaaggaggcgagaagtggcagaaactgcgtgaacaaattcagctcgtcgccaaggatcttcaacccaacaagaaggtggcgaagcagaagaagcaggcagccgccaaacctatggtcgtggaagatgaagagtccacataacgtaaaagaaggaaacaccccaataagaaaccttacaattagatgtataaatatcttgcataatataggatactattaatttttttgttctttaaaaaattctgacgaaaagtactaaattagtattgaagtcattgaaaaaatagcaaaagtacactaaactttataaaaatgtatttttacctttatagagcaatttgagtggacgtacaactgcgctaacgttaaaaaccaaaatcacagacgaggtggaaagtacacgtgctggcgaaatgtgcttttaacattcggcaccatggactcgtcattactgcctcgctttttagacacttcgttggtgacaatcgtcaggatatcggcgatgtgttcactaaagtaacaaagaacaacttatgcattaattcggggctagcttgctttggcagctttttacctggcggaacggcgatcgatggcatcgcacaggctcccgataaaccagctacctgtttgggtgtggcgcagagcagcatatccatttaccgtggacatggcccgcagcatgtcgatgtgctggtccggcgacacggtggtcacgtctatcctaaactgaaagaggaatacgaaaatgtataggctttcccattcgacgacttcatgcttataaatctccttacgagctcatttggcttctttttatggacaagcttctcctggcaggcttgtatgattagcaacttcggtttgtagtacagggtgtcgtagctgcagagcaagtcctcgatatccgtgatcttcatggcgatgctgttggatgcgtagacggcctcctcgaagccgtggctcaggatgaagaccactagggaatcgcgcacgagcgatctatcgcacgcactgcgaatgcgctctatgatgcccatgtgatccacgttgtcgtacgcctccacattgtatcccatcgaggaaaacacctcgattagtcgttctttatccacatccgtgccatcccgtctacgcagtgggtcgggcgacagaaatttctgtggagaagggcaatgttgtacttctttttgttactcaatattgcagagatgaaaccatattatccctgctaacattccggtgaaacttctgctggttgataatcaaggcgattcctgcgttctcccgggtcaacttaagagcatctatttgtgtggaacagtacgactgctggttatccgattcaatctcttgcttgactgccatcgcagcagtgccagccgcatctggctccggagcgttactaatgatggtgtctttgagcaaatttgcttgcgcctgcagaccgttggacttcaaatggccgaccagcagctgaacatcgctgcctgcggcatttatgtcccctaactttatgctccttctggtcagccagtccagcaaaaagatctccaggtacgcgggatcgtagaagcgaagtggatctcctgcctgctggctctccaccttttcgcgaacatctaggagcaagcggccactctgcaccaacgacaactcctcacacatcctgtagaggctcttcaacagaggatggacatgcagcgtgatcccagcgatatgcggcaagtagtgcattcgcagctcctgccagcagaaacccagtctccggagcaccttgcgggccccaataatgcacagggcctccacgagatgtcttctccaggtttctggccgggacttggcgaactttatgagtagatcactttgcgggaagtctgatcgtgtcatggccaaaagtttctgcagaatgtaggtggcatccgagtggtcgtcgccataaagcagaaagcagaggcccacctagaagaaaacgaaggttctactgtttaattaacactttggtctagcggatgtgtaaaacatttgagtcatattcgaaaagtcctcccagggaggtgccataccttttgggcaaagttcatgtcacgttccacgtagatcagatcgttctgatcgatggtgtctagatgaatcaacaggtttgatccggccatggcgatcgggaatatacaaaaatgtttcactttaggaaatggccgataaattgcactcgctgacatccgatagccgtggcctgaagagcttccaccgatcgatatcgataaatggatatgttttctgcaatagcgaaagatcggggtgctacctattaattatacttaagaaacagatgatgtagttttttgatatagaagtttaacaaccggttcaacaatcggttaatatttaaaaatgtcgcagccagcgagcctttagctttaaaagtaagcttgcgttcacggtttttggggaaataccaaatatactaggtaaaaacatcgattaactaatatcatccaacacgacgatatgttctttgcgaaaaatatcgatgtactggtatttttatgtttccacacctctagttcgtttaagtcgatctgttgaactgttaacaacacaactcctgaatattatgttttggacgaaaagttttattaatttaatgtttttgtatattgtattctgtccatgagcgtaacagagacagacagagagaaagggacagatactgagatacggggccctcaggcagagaaagagggcgaaagcaagctacaagcgggtgcgagcgagagcgcgcgcttgcctcacgcacatatatataaatctgtacatacatatagtatcagaagaaaaaactaaagccgctattcgatttacgaaaactggcgaaaaattcgacgatttgtctcgtacctatctatgtacctcacaaccacttcgtcatcaaatacgtataagtcagatgtatgtcaaacatatatatacatatgcatgtatatacacatctatgtgaggccactgctatatcccatacatgtatgcctctatatatatgtatatatttatccacctactgtaccacttccacattatgtaagcagcgacgcaaacaaaacactaaagcagaaaatccgaaaagcaaaatgcgaaatgcaaaacaacgaaccaacaaaatcccatctataaaccgaaaaccgaacagcaatgttataacaaataccgaaaagttgttaatgttccacaaaaaagcataaagcagtcacgctaagagagtaagatcgaacaaatgaaatgtttgtatggcataagtagttcccagatttttgtatgtacttcaatgcatatgcatgtgtgcgtatgcatgtatgtatgtatgtttctcggggccatgtctccccacgcccacgtacgt

SEQ ID NO: 16694 - DNA, 1915 bp, DROSOPHILA
cgacatttttaaatattaaccgattgttgaaccggttgttaaacttctatatcaaaaaactacatcatctgtttcttaagtataattaataggtagcaccccgatctttcgctattgcagaaaacatatccatttatcgatatcgatcggtggaagctcttcaggccacggctatcggatgtcagcgagtgcaatttatcggccatttcctaaagtgaaacatttttgtatattcccgatcgccatggccggatcaaacctgttgattcatctagacaccatcgatcagaacgatctgatctacgtggaacgtgacatgaactttgcccaaaaggtgggcctctgctttctgctttatggcgacgaccactcggatgccacctacattctgcagaaacttttggccatgacacgatcagacttcccgcaaagtgatctactcataaagttcgccaagtcccggccagaaacctggagaagacatctcgtggaggccctgtgcattattggggcccgcaaggtgctccggagactgggtttctgctggcaggagctgcgaatgcactacttgccgcatatcgctgggatcacgctgcatgtccatcctctgttgaagagcctctacaggatgtgtgaggagttgtcgttggtgcagagtggccgcttgctcctagatgttcgcgaaaaggtggagagccagcaggcaggagatccacttcgcttctacgatcccgcgtacctggagatctttttgctggactggctgaccagaaggagcataaagttaggggacataaatgccgcaggcagcgatgttcagctgctggtcggccatttgaagtccaacggtctgcaggcgcaagcaaatttgctcaaagacaccatcattagtaacgctccggagccagatgcggctggcactgctgcgatggcagtcaagcaagagattgaatcggataaccagcagtcgtactgttccacacaaatagatgctcttaagttgacccgggagaacgcaggaatcgccttgattatcaaccagcagaagtttcaccggaatgttagcagggataatatgaaatttctgtcgcccgacccactgcgtagacgggatggcacggatgtggataaagaacgactaatcgaggtgttttcctcgatgggatacaatgtggaggcgtacgacaacgtggatcacatgggcatcatagagcgcattcgcagtgcgtgcgatagatcgctcgtgcgcgattccctagtggtcttcatcctgagccacggcttcgaggaggccgtctacgcatccaacagcatcgccatgaagatcacggatatcgaggacttgctctgcagctacgacaccctgtactacaaaccgaagttgctaatcatacaagcctgccaggagaagcttgtccataaaaagaagccaaatgagctctttaggatagacgtgaccaccgtgtcgccggaccagcacatcgacatgctgcgggccatgtccacggtaaatggatatgctgctctgcgccacacccaaacaggtagctggtttatcgggagcctgtgcgatgccatcgatcgccgttccgccagtgaacacatcgccgatatcctgacgattgtcaccaacgaagtgtctaaaaagcgaggcagtaatgacgagtccatggtgccgaatgttaaaagcacatttcgccagcacgtgtactttccacctcgtctgtgattttggtttttaacgttagcgcagttgtacgtccactcaaattgctctataaaggtaaaaatacatttttataaagtttagtgtacttttgctattttttcaatgacttcaatactaatttagtacttttcgtcagaattttttaaagaacaaaaaaattaatagtatcctatattatgcaagata

SEQ ID NO: 16695 - protein, 494 aa, DROSOPHILA
MAGSNLLIHLDTIDQNDLIYVERDMNFAQKVGLCFLLYGDDHSDATYILQKLLAMTRSDFPQSDLLIKFAKSRPETWRRHLVEALCIIGARKVLRRLGFCWQELRMHYLPHIAGITLHVHPLLKSLYRMCEELSLVQSGRLLLDVREKVESQQAGDPLRFYDPAYLEIFLLDWLTRRSIKLGDINAAGSDVQLLVGHLKSNGLQAQANLLKDTIISNAPEPDAAGTAAMAVKQEIESDNQQSYCSTQIDALKLTRENAGIALIINQQKFHRNVSRDNMKFLSPDPLRRRDGTDVDKERLIEVFSSMGYNVEAYDNVDHMGIIERIRSACDRSLVRDSLVVFILSHGFEEAVYASNSIAMKITDIEDLLCSYDTLYYKPKLLIIQACQEKLVHKKKPNELFRIDVTTVSPDQHIDMLRAMSTVNGYAALRHTQTGSWFIGSLCDAIDRRSASEHIADILTIVTNEVSKKRGSNDESMVPNVKSTFRQHVYFPPRL

SEQ ID NO: 16696 - DNA, 3269 bp, DROSOPHILA
gacaaatatattaaagttgtaaacaacttgtgttaattgttaacttttgagttgtgtttcaccaaagtcatatttatatatctaaacacagaagaacatatgcggaatgtagttcttcgttttaccaatactaataactaaagcttctttacagttatctccacctaagcagtttagcaaaagcttttgctctcttttttgcgtagacccaaccatttacccctctgcaatatcgttaatgttttgcgcacgtcgcccatttttcgaaattggcacacggcgcaggaatgtccgtagaatttatgcacacggccgcagaaggtttgcgcacggccatcaattttggcggcattctatcccagttagaaatagcacagtaagaaataacactctaggaaagccaagtggactaaggcagacctccggcgatccggcggccgacggttgctatcgctcccatgccggaatatgggcatatacctacgtatgaatgtactcgactagagccataaaaccgtgatcgaagcgaagaaataatggaattatttcaacatcatgtattacagcaacaatttcagggggttgtattagcccatgattgataatctgaattgcaataaattctgcacacgaatcgattgtcgaacctttgccatgagtccataaattaagctgcaaaccgcagagaaacccacgacgcatcaattatggattttatctctcgagataaagatctgcaactgatacccagaatatatcttttgatctgacctctaacactgagatctgcatgcatttatgtttatttacatgactgtatctgggctgcctttcttagtgtggggcgactatcgttggtatcgccgctactgggtgataacgctctttcccattgcccatagataagcgcactttcctatcgccgcgtcgggggattaggtgcgattttctttaaaaaaccactcgcgagcagcgggtttcaagcagtcaacgctctgctctcagcacctcagcaggtctagctcttatcactgtgcctccccgatcgccagtcggattttccacgccttctatctatatctatactacaccagcagcccaagatggatcacggctcggatgacagcaccagcacggccaagtcctgccctatgatcatggtggtgagtacgcagttacacaactcctgtgtccaacaattttgatacaaaatcacttaccactgcgctaaacgctgtaatttaaaagtcactcatccagtttagctgaatgagatttgcacggagagcaaacaaatatctcgtccgacttggaatttgaattctctggctagtcactccctagtataagttcgtataagtatgtttatgtgccagaaaccacaacgaattattcgctctctagcgctttattcgctctcagcaaatacaaataatacaaattgaatatgctcgaacagggtgtctcatgaataaagattcatgggttaaattataccgctgtaagggaattataaaaaagatgtttaattcgaatgttatgtttatgttgatgtttaattggaaagcttaagcttgatattttataaaactaaaagtaatattaaacttttgtattaaggatcatcttagcaaaagtgaccatatagatatacctagatattagatatctaggaatctagatatagatacgaattagaaagttattaagtggtaattagtggtagttaactggtatttaagcctcatcttactgatcttatggattcttatgtagttaatctttcactctcgcatcctttcagttccacgctggacactgcgagcgaattttgtggcgcggatgggtggcgtccactgtgacggagttcgtgctctccgccctggccatcttcctggtgtccttcctgtatgaggcgctcaagttcctgcgacagcaactggcgcgcagggaagcccgtcgagcaagcgagcagctggcggcggagcagcgtaggaagaacgaggctccggcagccggaggatgctgctcggaagctcccctggcggagccgagggagcagacctactggcagcgcttgttcgcctcgtcgcacatcgtccagtccctgctgaacctgctgcagatcgtcatctcgtacctgctgatgctgatcttcatgaccttcaactactggctgtgcctggcagtgatcctgggactgggtctgggctacttcttcttcggctggaacaagaagaatcccgacgagagcgagtgctgtccttagatcaagaatatcgctcttaattgtttatatatcttgcaattgttataaactaagcccttatcagttcttggttcacacatcaaagaaaaagtcccgtccccacgtaattatacaaattgtttaaaaatacaattttattcgatagttacacttggtttaattgttattgatgtaatcgtagcataaattagtcaactagtttacttaatgagcatattgtacaaatagtgtagtcatgagaacaagaacctatacaacgcgtattcatctaaagcgattaaagtactactcaatacttttgactttacaatatgtttttataagcaatacactttatttttgaccaccccgaactcaaaacgcaaacaatccgatatgagacaaaaaagaaggcaaagttaaatctccaggattacatgaaattcgttatgaaatgcgaacattaccaggtctgagtcctgacagcccacaactcacatttgaaggcctaactaatcacgatactcacctatcacacaatagtacatattttagtttagttaagatcttgaaaaatctttttaacaaatattttagctgtgatacatctgggcaggtaatataactaagcaaaccttatgattatgtgaatcatctcgcacacatttttttacgacactttatctatttgtacttgcctaaccacacaccagtatttgcaagcttcttagttaaagtttaaattattttgaaatttccgggataattataagttcttttagtgcatttgtttaaaatttgagtgacaagtgagcgccatgatgagaccattccctaactagctcttagactagagtaacctagactgaacaaccgcgatcgaaagtagctagacccgcaaccaatccgctgattatagaccacccaatcataagcccgtggctccagcggccatcattccgccgtgatgatggtggtgatgcattccgccgttctggaagtacatgtagtagttgtacgg

SEQ ID NO: 16697 - DNA, 628 bp, DROSOPHILA
ctcagcacctcagcaggtctagctcttatcactgtgcctccccgatcgccagtcggattttccacgccttctatctatatctatactacaccagcagcccaagatggatcacggctcggatgacagcaccagcacggccaagtcctgccctatgatcatggtgttccacgctggacactgcgagcgaattttgtggcgcggatgggtggcgtccactgtgacggagttcgtgctctccgccctggccatcttcctggtgtccttcctgtatgaggcgctcaagttcctgcgacagcaactggcgcgcagggaagcccgtcgagcaagcgagcagctggcggcggagcagcgtaggaagaacgaggctccggcagccggaggatgctgctcggaagctcccctggcggagccgagggagcagacctactggcagcgcttgttcgcctcgtcgcacatcgtccagtccctgctgaacctgctgcagatcgtcatctcgtacctgctgatgctgatcttcatgaccttcaactactggctgtgcctggcagtgatcctgggactgggtctgggctacttcttcttcggctggaacaagaagaatcccgacgagagcgagtgctgtccttag

SEQ ID NO: 16698 - protein, 174 aa, DROSOPHILA
MDHGSDDSTSTAKSCPMIMVFHAGHCERILWRGWVASTVTEFVLSALAIFLVSFLYEALKFLRQQLARREARRASEQLAAEQRRKNEAPAAGGCCSEAPLAEPREQTYWQRLFASSHIVQSLLNLLQIVISYLLMLIFMTFNYWLCLAVILGLGLGYFFFGWNKKNPDESECCP

SEQ ID NO: 16699 - DNA, 10649 bp, DROSOPHILA
ccggctatagcacttaacggccactggaacatccgcaacgggagtggatggagccactgcctgcacttgggcactggtcagattgtggtgctttaggcaaccctctgcgttaacgcggccagctgattgccactagaatagatggtattgttagatggacacataactatttcgttaagaactgaccatagttatcaagcaaatccatagtacagctatgctgcacacaaccttcatggcgaaaatctgtttcccaactaacaatgagcgcatcatcacagctctatatatataacccatcgatttgctaattcagctcaaaagtagacaggagattttaattaaataattggatgctactttacattcgccacacaccaacaaataaagtctataattgaaattttaagcgcagttcccgattatgagctacacgtatgtcgtatgcgcaatatctgcattacaattgccaatagtaaattaccaacttggttttcttcatatttattaagatagaaaacatacaatttttggcttttacactccaagcatctctgaagtttaaacaaaaaacatatgtgtagcctatctactgtattggactttattcgtatattttatatggttcattaatataggtataaatacaaattatattcacgctttgcgatttgcagcgaatatcacatcttatacacgatgtaaaaaaaaaaaaaatatttcgtcatgtttttaggttggccgcaggcagtgctcactgtaccgccacaatgtttatcgttttgcattttttttttctttgttttcttgcggtttcccctaattatctttagtataaacttagtctactgtcttttttggtaagtattttcgtgatgggctcgtctatgcgaattcccatttccaatgaataaataaagtaattagaacattaaaattagcaataaaacacgtacatttaaagctgacaacaaaaaaaaaaagtattcttatgttaaactgtagtatgtgcctatgcaatattaagaacaattaaataaaatagcatattaacttatggcagcactttgttgctatgtttatgtttatgtttatgcacgcagttaggccagggcggatgtaacatgatcacccactcgaaggcaaaaagtataagtgcatggtcagcattcacacgccgaccaaatacatattacatacgtacatacatatctcgctctcccgataagcctagatatataagatatacataagaacgccgctccgctgctggcgtacccggcagcgcagctacgcggattagcctaagtccaaatatattaaaaactgtaaaatcagagagactctgtagacgttgagctgacagaaccatttctgcctactctaaaatcaaaagaagaaattgaataaatatatgtcagcccgacggctgccttcaacttaaaacggacttgtgttctgaattggagttcatcattacatggcgaccgggacagtcgtccaacgctggacgaattgaccaaagctggtgaaaacaaaggaacaaaggaacactggactggaagaagactggactaattaaatggaactgcaaaaaccaaggaaaaatctgagtgagtagagttctattgagtatgggcaaacaccgtggcggtttgaaaactaagctgaataaacgtatagcccacgtaaggtggctaatatacggtcagcaaacgccaccggtttggtcgaaagctctaaagctacatgcagagctagaccacttgttgcaatatcagcaagaattaaagacccataagctcgagaaaactcactcagataatattaaaaatatacccacaattaatgaagttccaaaataccaggcatgtccagcaccagcaccagcattaacaaaaccaaagaagtcctgcccccctggctgcgaaggaatctggagtccccactgcctggggacttgtgagcgaccatcgacgtcttcagcggcgaagaaatagacagcagcgagggagtgtcagcgtgccacccccggcgacgcccagctgacacctgatgagcatcatcaacagcagaatataataataaatatatataaatataaagtaaatataaaatatatatagataagaaaaattgtaagaaatattgtaaaacggagcatatactattatgccctgttaacccaatatggcccgtgaagccatagctagaatcaggcaggcaacaatgtaaaatacaattttttttttactcttgcgaacattgaaagattttataaatagataattccaaacataaatgtctatagagacaaatgaaataagtaaaactgaaaataaaagtatatacaaaggaaattttctattctattctccaaaatataaaattagtatacccaaaatgggtctaatagacacctaaaactgtggactctacagccaatgtaataaataaaggtagaagtccaaaatgcagacttgttctggataaccataatactaattgtaattgcattaattatggtatccaatgcattaataaaaatatacaaacctgcataacaagtgtcttaagaaaccgataccgtagcactgctaacggtatagataatatttaagggaagatctttaataaagtcaattatgaatgaaaatatgagaaaaattatatgaaaaaaaaacaataataaataaaaaaaaatataaaacggtaatattgaatttatctacattaaaaaaaaaaatatatacaaatgaataaatttgaagttattgagtataccacagcatggactgggaaaagcttgttgatcagataaaagatcaaaatgaaaatttcagaaaatcctataagtgcttaacgcaaaacagatcaacacaagctgtaacaatcaataggaatgcccaagtcttggtaaatagttataatgaaatcagagagttgatccaacaaaatagaaagaatttggaacgcaaacagtgtgctaaggctttgaacctactggtgacattaagagaaaaattaatatttataaaaaataaattcagtctccagatagaaattccaaccatagtaaacaccccactaagaataaatttgaatgaagacagcactaactctgacgaggaagataggactatagtcaaggaagacattaaagaggaagatcttcacgatctaactataccagcaaaattaatgctgaagaccgacgataaaacaaataacgcagccgactccgaaaataacttaaccatggcagaagaagcagctgccattaggtcttacattagggaagtcgcctgcacagtgccagaatttgatgggcaaaagatccatttacaaagattcattaaggcaatcaaattggtagacctagctaagggaccatttgaagacattgcagttgaggtcattaagtcaaaaatagttggcacaattttgaactcagttgacaatgaaacgacaattccagcaattataaacaaattgcagaaagtagttgtcggtgagacatccagtaatgtcaaagcaaagctagcaacagttcagcagagaggtaaaactgcaacgcaatttaccgctgaagttgatagcctgagaaaacttttagaagcttccctatatcgatgagggtatacctctagaacatgccactggtctaagcaccaaagaggcaattgaaaccatgatacatcgtgctgagcacgaaagtatcaaaacagtactggaagcagggacttgcaccactatggatgcagcgataagcgcatacataagaacgagtacaagagttaccggtgacatcaataaagtgatgtactttagaggtaacagacccaatagaggatacggaaatgccaatagaggtagtaaccgcggtagaggctttaataacaatagtattagaggcaactaccataacggttaccaaaataacggttaccaaaataacggttaccaaaataacggttaccagaataacggttatcaaaaccgctataatggaaataataaccgttataatggctataacagaggccgttataatggaaacagaggccgtaacaacagtcagaacaactacaacagaaacaatgccaatgtacgagtaatccaagaacagggaaactcgcaacagcctttaggtactcagtagaagaagatcgtagagtatacaccatcaattataatctcaacatattttctacattcattcatgccaaaacaggcgtaaaactagtttttctacttgatacaggtgcagatatctctattctcaaagagaactctgacaaattttctaatattcaaataaccaataaaataaacattcaaggcataggccaacagaaaattcagtctcgaggacagacttttattgagatacagacaggtaaatacgttatcccacacgattttcatttagtagataaaaactttcccaataccgtgtgatggaataatcggaatagatttcataaaaaaatataattgccaaatcgatttaaaccaagaagaagattggtttataattagaccaaacaatttgaaatttccaatatatattcccatagcatacagctctggtattaacacaacgttattaccagcaagatcccaagttgtcccgaagattaatagtatcatcaaaagatgataacattttaattccaaaccaggaaattcaaactggtatttatgttgcaaatacaatcgcaacatcaagtaatacatttgtccgaattttaaatacaaccgattccgaccaattagtcaatatggacactctaaaatatgagccacgtttcgaactacaatgtagttcaggcaaatagtgaacacagaaataaaactgtcttatctcaattaaagaaaaatttccccgaattgtttaaatcacaattagaaaatatatgcagcgaatatatagatatatttgcattagaatcagaacctataacagttaataatttgtataaacaacagttgagattaaaagatgatgagccagtatacaccgaaaaattatagaagtcctcatagtcaagtggaagaaatacaagcccaagttcagaaattaataaaagataaaatagttgaaccatcagtttcacagtacaatagccctttgctattagtacccaaaaagtcaagcccgaattctgataaaaagaaatggagattagtaatagactatcgccaaattaataagaaacttttagctgacaaatttccactaccgagaatagatgatattttggaccaacttggtcgagcaaaatatttctcctgccttgatttaatgtcagggtttcatcaaatcagaactggatgaaggctcgagagatataacatctttctcaaccagcaatggctcatatcggtttcacgcgattgccatttggcttaaaaatagcgcctaattcattccaaagaaatgatgactatagcattctccggaatagaaccgtctcaagcattcctttatatggatgacttaatagtcataggttgttccgaaaaacatatgcttaaaaacctcactgaagtttttggtaaatgcagggaatacaacctaaagttacatcctgaaaaatgttcatttttcatgcatgaagtcacatttttgggacacaaatgcacagacaaaggaattttgccggatgacaaaaaatatgatgtcattcagaactacccagttccacatgatgcggacagcgctagaccgttttgtagcattttgcaattactacagacgttttatcaaaaatttcgcccgactattcgcggcacataacaagattatgtaaaaagaatgttccatttcgagtggacagatgaatgtcaaaaagcattcatacatttaaaatctcagctaattaacccaacactcttgcagtacccagacttcagcaaagaattttgcataacaacagatgcaagcaagcaagcgtgtgggcgcagttttaactcaaaaccataatggccaccaactcccagttgcttatgcatccagagcttttacgaaaggtgaaagcaataagagtacaacagaacaagagttagcagcaattcattgggcaataatacatttcagaccatacatttacggaaaacatttcactgtgaaaacagaccatagaccattgacatatttattctcgatggtgaaccccagctctaaattaactagaataaggcttgaactagaggaatataattttacagtagagtatctaaagggcaaggacaatcatgtagcagatgcgttatcaagaataaccatcaaagagctaaaagatataactggaaatatatttaaaagtcactacaagatttcaaagtagacaaaaatcctgcgcaggaaaagaacaattggatttgcaaaagcaaaccaaagaaatagcttcagagccccacggtataccgaagtcataacaaatgacgaggtaccgaaaagtagtgacattgcaattgaatgactcgatatgtttatttaaacatggaaagaaaattattgcaagatatgatgttggtgatctttatactaatggaattcttgatttagatcaatttctccaaaggcttgaattgcaggccggtatatatgatatcagccaaatcaaaatggcaccgtggaaaaaaatctttgaacacgtttcaatagataaatttaaaaatatgggcaataaaatattaaagaatttaaaagtagcgctacttaacccggtgacccaaataaataatgaaaaagaaaaagaagctatattgtctacattacatggatgatccaatacaaggagggcatacaggcattacaaaaaccttggccaaggtcaaaagacattattactggaaaaatatgagtaaatacataaaagagtacgtaagaaaatgtcaaaaatgccaaaaagcaaaaacaccaaagcacacaaagactccaatgacgataactgaaacaccagaacatgctttcgatagagttgttgtggacacaattggtccactacccaagtcagaaaatggtaacgagtacgcagtcactctcatatgtgatttaaccaagtacttagttgccataccaatagcaaataaaagcgcaaaaacagtcgcaaaagctatatttgaatcttttattctaaagtacggtccaatgaagacgttcataacggacatgggaacagagtataagaattcaataattactgacctgtgtaaatatttgaaaataaaaaatataacatcaacagctcatcaccaccagacagttggagtagtagaaagaagtcatagaactttaaacgagtatatacgatcctacatatcgacggacaaaaccgattgggacgtatggcttcaatatttcgtatactgcttcaacacgacccaatctatggtacataattattgtccatatgaattagttttcggtagaacaagtaatttaccaaaacattttaataaactacatagcatagaacccaatatataacatagatgattacgctaaggagagtaaatataggttagaggtagcatatgctcgagcaagaaaacttcttgaagcgcacaaagaaaaaaataaagaaaattatgaccttaaaagtaaaagacatagaattagaagtaggagataaagttttactaagaaatgaggtaggtcataaattagactttaaatatacggggccctataagatagaaagcataggagataataacaatattacggctacttactaataaaaacaaaaaacaaatagttcataaagatagattaaagaaatttcattcatgattgaatttaaacttatattttccttaatcatttatacaaattttccatacactacggtatatttttatctttgcattataaaatcaactattgttgttcaaacaaaaacacaaacaaaataaaaataaaaataaaataatttgcatttaataatcaaaataacttcactagggttaccgttatttttcaaaaaggagggagatgtagtatgtgcctatgcaatattaagaacaattaaataaaatagcatattaacttatggcagcactttgttgctatgtttatgtttatgtttatgcacgcagttaggccagggcggatgtaacatgatcacccactcgaaggccacaaagtataagtgcattgcccactcgaaggcaaaaagtataagtgcatggtcagcattcacacgccgaccaaatacatattacatacgtacatacatatctcgctctcccgataagcctagatatataagatatacataagaacgccgctccgctgctggcgtacccggcagcgcagctacgcggattagcctaagtccaaatatattaaaaactgtaaaatcagagagactctgtagacgttgagctgacagaaccatttctgcctactctaaaatcaaaagaagaaattgaataaatatatgtcagcccgacggctgccttcaacttaaaacggacttgtgttctgaattggagttcatcattacaaaacatatggtgagaggggtgatgtttgatgtttgaggcacttgtatatcgatgctgctcgatcttgtgatgtgcggagaagggggcgtggcagcgaagggcgggtagcctgcatcctaacaaactagacgctcattgtccggatgaaagatgcgatcatagttctcgatcagcaccttggccagcatgttcatgcgtccaatgtccagctgtatctgattggcactcagcagacaaggaccccaaacgatggccaaattggtggacggcatgcgattcgaagcgctggcagcggcaactctgaaaaacatttatataaacattactaacaatcgctatttcaacttatatgtacatatgtatatgcaaagaccacagaaagtgggggataaaccaaattacttgcttcgtgattcataacagcttgcagtgtttctgctcacatgctattcatgtatttaagatcactgcttctagcttttgaatttgggcaaacttgatcgaatcgttgcaactctttttgtttgcccactaacctggtcaagtgcctaatgaggaagcgcagcgtggagcggttcggctccggcatgtcgtcaaaggccaaactcatccgctcgatggcggcgtcgtcgttaaggctcctgcccagtcgctcgtaggcctcctgggtgatgagcggagaggtgagctctcggaagaactgcttgtgcagactggtcagcgtgtggatatcgtccgtcttcagccagcggggatcgtacacgtgcgtcagcttcttgcgcagctcgtccaccagaaccttgttgcccgatgcgcggtacagtccgtcctgctcgatgcactccggctgttcgatgtaggcgcaaacgtcgaccacgaaacgtggaacattcggatgatcggtcatgttgagctccagtgcgctgagcggagcggcaaagagcggatacttctgctcgtccaggtacaaactgttcacctggcctcgacgtgaacgcgacttcttctcgctcttcggcgaacggttgctggaaagtgtggcgatttatcagatatattcttgtatgatattcatagcttcaatttaatacttacatgcgaaacacattgctattgacggcgactgcattgatttcgtcatcacgcacccaaacatggaaggagaaattattaaaatttagtgctcgacttgcaactgaattatgggtctacattgcgacaaacgcctgtcgaggacgagggaattcttcgacattccgctgcggaaggcgatcaggaatcgagccactcccgactgagagacaactgcgaaatgcgtatgaatacgcttgcctaagcaaaatatctcagcctcaaggaatatcaagcattcagtcaatcagtcagttactcaagcattcctcgccttacggagatcatgattcattgacgactcatttgcattatccgaatacagcagcagcccagccaaagctatgcaaagcttaccgcgtccggcaaaaagtgaaacccgctttcattaacgaaaatacccgatagagactctagtattcgtcttcgcaatgaatgggaactcaggtgtccgtagctatatagatacccgtacatagaagtcagacattcgctgtgtgggccgcaacgaccttaaaaggccaggcagcgccgagctcgagccacaaatgcacttgaaaaaatgaagtgagcacttgctagatctcttaaaatatatatacaaatatcgagatctaaccattagctgtgactacaatgtttgatcattgattgccttacaacaaattaaatatagaaaatatcttattaagagcaaaatcaaagctcagtactaagaataacaaaacattccatcgttaagtcgaaatatgctacaatcggagtttaaagatatttttcaaagcgcatttggttgagtgcacggctaatgggttttccattcgcgttggtggcttctacttggaatcggagctccaagagcagctccatcttcgcagacagtggggcgccctctttaaaccggttggcactgaattcccccgaaggaaagtcatcgttggcacaagaagttgtagacactttcggatggtgactaaatgctgccaagcggacataaa

SEQ ID NO: 16700 - DNA, 662 bp, DROSOPHILA
atgcagtcgcccaaccgttcgccgaagagcgagaagaagtcgcgttcacgtcgaggccaggtgaacagtttgtacctggacgagcagaagtatccgctctttgccgctccgctcagcgcactggagctcaacatgaccgatcatccgaatgttccacgtttcgtggtcgacgtttgcgcctacatcgaacagccggagtgcatcgagcaggacggactgtaccgcgcatcgggcaacaaggttctggtggacgagctgcgcaagaagctgacgcacgtgtacgatccccgctggctgaagacggacgatatccacacgctgaccagtctgcacaagcagttcttccgagagctcacctctccgctcatcacccaggaggcctacgagcgactgggcaggagccttaacgacgacgccgccatcgagcggatgagtttggcctttgacgacatgccggagccgaaccgctccacgctgcgcttcctcattaggcacttgaccaggcacttatactttttgccttcgagtgggtgatcatgttacatccgccctggcctaactgcgtgcataaacataaacataaacatagcaacaaagtgctgccataagttaatatgctattttatttaattgttcttaatattgcataggcacatactaca

SEQ ID NO: 16701 - protein, 177 aa, DROSOPHILA
MQSPNRSPKSEKKSRSRRGQVNSLYLDEQKYPLFAAPLSALELNMTDHPNVPRFVVDVCAYIEQPECIEQDGLYRASGNKVLVDELRKKLTHVYDPRWLKTDDIHTLTSLHKQFFRELTSPLITQEAYERLGRSLNDDAAIERMSLAFDDMPEPNRSTLRFLIRHLTRHLYFLPSSG

SEQ ID NO: 16702 - DNA, 3461 bp, DROSOPHILA
ccccctgcccagtgcacggcacccaccggccacaccccctattttgaatcgagtgtttgtaaatgttccgaaaaacaggcgcaattacaatgctgtttgcttttcgctgcaaatgagttggtcaacatgtttggcttttatttcggcttttttagaatgcgtttgaatttcgttaccaactgaatttcgttaccaaattattactcgaccaagacacacactataaagccgggaaacagatattagtgtttgggctcagcctttaaaatttctctcatagcataaatgaactgtggaaaggcagtaaattaatttacgagcatggagagcggtttgaatcacattgtatttcaatttgaacagtataggtattgaagtgcccagtaatattgctataatatattgatttcgtagtagttaactaaaacttttatttataaattatcttatcgttttctgagtacagtcattgttgttaggctaactaaaaccaaacgcctttctcaacaacacgtgagatgtaaaacgaatatctaatcttgccataaatagaagtcttaattgtagttataaaatatgtagttaccaagtattgattaggtatagtccgacaatttcgcattagaacccccttaaagtgccaaaaatatcgccatgaaacgattagattatttaacttgactaagtgcctcttactatcttacaaagactcgatgatctttctaagaaaaatcataaaaatattaagaaaaccttatttacattttatttacgcacgagcacttatatatagtaatgtacaagcatattgtgttttacgctgtaaaaattcttcagtggcaatggcaatccacctgaaatattaccctcgccacggctgagcgaaacacaataataaattgtgcctagacaaatattaagtatcgtcactccattgcctgtggccaatcttgatttcacagcttcggaaaacatacatccggaatgacctggtgtgagctcatagctgagatgttcgcgcccggtagtagaggtgcaatcgttccgcctcccgccatcccgtctcaacggctccatggaccgttgagtagaagtgcttgtgggtggattctccggcgaactggaggcgtggcctgccgcacacatcctggagcggagcttccagatcccaagcaccggttcgcagcgcatccgtgtaggtggaacggaaggtgtagctgcctcggaagttgggattcgcatgccattgagtgcgcagcattcgcactggatgggcagtttcaaatggcaggaacttgcggaaaagccacagcagaccctccaggaccctctcctcggtgagcgtttccatgtgccgggcgtgtgggccaatgatccagccctgcaggatgcgtggctgcctggagactggataaaagccgaacacactctccagccaaaagagttccgaagcccgcagctcctccaggtcctcctttagccaaagacaattgaagccaggccaatcgcctggcagcggaggattctcaaactccagaaagaacttgtctacggtgcccagcttaagaccctcgatcgctctcactttggcagctggcagggcgggaacaaaaagtttcggatgctgctccttcagaactcccaaggaaacagtgcatatgacatgatccgctgtgattacctcgccattccagcaacgcacggtaagctcatcagctcctttccagttaatctcagcaatacgtctgtttagccgcacatgatccttgaggataccaagatcttcggactgatcctctggcgctttcatgagtagtttgaggaatcttttgtatcccttgtccttccaattgaggagcagctcgccttcgcatagccagtactccaagtgaccctttccggatacttcaaacaggtgatccgctgcctccacggatgcttcgaatttgtgaaacacctccaggaactcctccgcaatggtacgatctatgggcggaagcttggccagctccttccagtacttcatattgatgtagtctcccaacgaaccctcgaagtccaggagctctgcctgccggtctggtattgacatatcagctatagttttcagttgatctgctaggtcgtcgggtaggacttctttgttggatcgaacgcatctaaaggtttcatagtgcggttccgtgacctccaggaggttcaggtccttgaccttgtcgtatactacatttcctttctcgccatggcaccactgggcgcccaggtcgacgacgttatcggcaaagggaatcgtgtggacgcgaccgccgattctatcttccgcctcgaggaggagcacatttcggaaaccgagatccagaagcctggtggccgcagctattccagcggatcccgcgcccacgatcacaatgcgagcggtttgcctagttttactaagcagacgcaatgacgcggaactcatggtggtgaaaaagagatatatattgcttatatcaaccgaccgtgctcacgtttcgacgttcggctggcaactgaatcggcatttttcactttccctgcttctcccatatactatttctagtttttgccctcttttcctctatctttgtatatttatgcgacttggcgataagacctaatttactgataagagggccttcattgttgctccggcgaattggtgttatgtcaatgcaattaaaccgagaataaagcaattgccaagcatacgctgcaatatcagcattttgatatcagtttgctaagagagcgaaagagaacaaagcgtgcagcaactttatcaaaaaaagagagctagttttctcttaaattctgctcacaagcaaaaatagcattcgtttctcgatatttcacgcgtataaaattagcatcgaaaaaagttgacagtaaattcaagaactatgacccaagcttataaataaatatgcatatttaattgttatttatgatgatttagctcgaaataaaaatcagtatatctctattttttaatattgtgatatagtgggttttagcataaatatttttgcataaaaatataaatctctattatttgaagtgtatttgcttgcgcatcgtcaattatatagattctgcaaaatttatagttttaatattttatactttacacttcaccttgttgaggtcttttaaggtaaattgtttatttaataacgttccgcgctgaaagattatatatttttttaaattattcactctaacgaacaaaccgataaatttgtgaataaaagttactcggaggccaaatagtcagttgtaatattcttaatattactttggcaatcaaaagctgttgtgctcgacatctttttcaaaaacccattcaaagtctacaaagacagggcaaaacaaaagcctcagcttaggcgcgcaaacaatcgcacgcactcccccgcacagcgatttaaagttaccgcctg

SEQ ID NO: 16703 - DNA, 1407 bp, DROSOPHILA
atgagttccgcgtcattgcgtctgcttagtaaaactaggcaaaccgctcgcattgtgatcgtgggcgcgggatccgctggaatagctgcggccaccaggcttctggatctcggtttccgaaatgtgctcctcctcgaggcggaagatagaatcggcggtcgcgtccacacgattccctttgccgataacgtcgtcgacctgggcgcccagtggtgccatggcgagaaaggaaatgtagtatacgacaaggtcaaggacctgaacctcctggaggtcacggaaccgcactatgaaacctttagatgcgttcgatccaacaaagaagtcctacccgacgacctagcagatcaactgaaaactatagctgatatgtcaataccagaccggcaggcagagctcctggacttcgagggttcgttgggagactacatcaatatgaagtactggaaggagctggccaagcttccgcccatagatcgtaccattgcggaggagttcctggaggtgtttcacaaattcgaagcatccgtggaggcagcggatcacctgtttgaagtatccggaaagggtcacttggagtactggctatgcgaaggcgagctgctcctcaattggaaggacaagggatacaaaagattcctcaaactactcatgaaagcgccagaggatcagtccgaagatcttggtatcctcaaggatcatgtgcggctaaacagacgtattgctgagattaactggaaaggagctgatgagcttaccgtgcgttgctggaatggcgaggtaatcacagcggatcatgtcatatgcactgtttccttgggagttctgaaggagcagcatccgaaactttttgttcccgccctgccagctgccaaatttgagaatcctccgctgccaggcgattggcctggcttcaattgtctttggctaaaggaggacctggaggagctgcgggcttcggaactcttttggctggagagtgtgttcggcttttatccagtctccaggcagccacgcatcctgcagggctggatcattggcccacacgcccggcacatggaaacgctcaccgaggagagggtcctggagggtctgctgtggcttttccgcaagttcctgccatttgaaactgcccatccagtgcgaatgctgcgcactcaatggcatgcgaatcccaacttccgaggcagctacaccttccgttccacctacacggatgcgctgcgaaccggtgcttgggatctggaagctccgctccaggatgtgtgcggcaggccacgcctccagttcgccggagaatccacccacaagcacttctactcaacggtccatggagccgttgagacgggatggcgggaggcggaacgattgcacctctactaccgggcgcgaacatctcagctatga

SEQ ID NO: 16704 - protein, 468 aa, DROSOPHILA
MSSASLRLLSKTRQTARIVIVGAGSAGIAAATRLLDLGFRNVLLLEAEDRIGGRVHTIPFADNVVDLGAQWCHGEKGNVVYDKVKDLNLLEVTEPHYETFRCVRSNKEVLPDDLADQLKTIADMSIPDRQAELLDFEGSLGDYINMKYWKELAKLPPIDRTIAEEFLEVFHKFEASVEAADHLFEVSGKGHLEYWLCEGELLLNWKDKGYKRFLKLLMKAPEDQSEDLGILKDHVRLNRRIAEINWKGADELTVRCWNGEVITADHVICTVSLGVLKEQHPKLFVPALPAAKFENPPLPGDWPGFNCLWLKEDLEELRASELFWLESVFGFYPVSRQPRILQGWIIGPHARHMETLTEERVLEGLLWLFRKFLPFETAHPVRMLRTQWHANPNFRGSYTFRSTYTDALRTGAWDLEAPLQDVCGRPRLQFAGESTHKHFYSTVHGAVETGWREAERLHLYYRARTSQL

SEQ ID NO: 16705 - DNA, 4772 bp, DROSOPHILA
tttttattacactgcaatgagaacttgaaaaacagacgttccaaaattgcaatgcggatgacttaatattaatcatgcattcctatttaataaccccaattttaatttttagccaggggcacgaacttacttgaatatacatgtgtggtgtaccgactgcagtcattgctcaaatgtttaataactttcgtgccacaaggggtaacaaaagtccagttagcacatataagggtgcaagtgcttgtatgtttaccctctttaataaaaaattcatctattacttttgaagcagtacgaagtagtagaatgcaaaagcgtattttaatgaaaaaagttgaaaactttcattgcaaaaggggcggcaagtcggttttgtaccatttgttcttattctagatttaattgcgtctagttttctcattcgttgggttttcagggactttaatgtttaagcacttaccatccaaagagcttttgaatatatgtttgttgcagatttgaattccttgagataaatgcggcacattttctaagaaacatttgtaaaattttatttatattcactttttccgtatatgatttttgctttacactcatataaactaatttctataaagttgtctattccgattacagtataataatatattgcctttcacatatcattaattcagataagtgcatgtcttgtatacatataaatatacctaatattttgtagtaaaagcttcgaatttatttgcacgtcttttcagctcttgtattagcctatttgtggttgattgtgaactttgataggatcctagaatatatatatttatatatattttaatacaatcgatctaaacgcctttgtgtatatagtaaatattatcgtataacgcattaacaaaagcgtacgcatgctatccaatcttaaaggcacatcttttatgtatgatatatagaattttgtttgattttggtctgtttggttgctaacatatgcactattgtatactcatgccgagtctaagtggtcccaatcgttgcgggcccaattcggtaactcagtttcgtactcccatccagggccctagaaaatatatagttattaaatgattacagtttgtattttaattaattaccttgtacttccatgcgtgcagatacattataaggtcctttgactttggatcacggtagtgcactttgcactcatagcaatgctcatctactgtcaccttgcccacattgcatccacctccattcagtggactctccactgcatccagtggagctgggcaaatttccgaggaagacttctgtgccgcaacttgatactccttgactgcatttgtagtttctaaaagtttaacactattttccggctgctgtggctcattgcaaggtggtgtagtttcccgcgaattgacgcatccatcatcatcgctatgatgaacaactgaaagatgtcataggatataagatacactgcatcttaagataacatatgggttaacacaccggaagtgtgctcactgctgagactttcccgatctgcctcatccttggtgctcttgaacatggatatatccgaatcacaatctatgcccagccagttctctgcattgtgtatgtttatgagatctcgtataagctcttcatccgacttgccaccgatatctccggatcgtcctttcagcggaccgaagacttcgtgattgtacagtggatcgtttagaatgggataacctacggaaaatgtgacactttcatttagtaactaactaagtaagtattacaaatcactatattcaagataaactcacctaaatattgcaagtgcactcttatctgatgcattcggccagtgagtggtttgcagagcaccacactggtggtgccattttgggatagcttctggaaggtagtcgtgcaatccttgcccttggccgatactttgcacacgccaatcttgtagctaactacttcaatgggctccttgcactccacgatgccactgggaaatttaaaaaaattcttatcttaaggttatctttaatgttagtatctttactcactctggaaaaacgccctccaccctgcagatgtactccttctccacctgcctgttgcgaatctgctgctccatttggcgcgccttcttcggactgcgtccaaaaagtaggagtcccgaggtcaaccgatctagtcggtgaattgtgcgtagattcttgagattgaactccttggccagaatgaagactacggtgttgtgcctataacgtccacacggatgcacctgtaagtcacaaggagtcacaaggaaggattagatatatctaaacaatagctaaaccataaaatcggcgtatatatagatgtgcaggaagtaggtttggctgacggtgataacattcaaatacagccaaaagtcgaagtaattaactatttctgtattaaatgtgtaacatggcggtcgtttaagccacttacaggtatcgatgctggcttatttacaactacaatgtcctcatccatatgcacaattttaattggttgacaagtcacaggaacttcgtgtctgtaaagatagccatgaaactggggttagttcgatatatcatctccatcggctatatcactagagatcggtaagattattaagatatgctaaatggatgggcaacttttacgagactcattctcattggctcactgaagtctggtttaatgggctgtatcttgaaaggcttttcaattatatggctatggtcgtaaaaatttatattactttttattcatttctattgctatgtatagttgaaaagacttgtttcatttgacttagttcagttaagttataaattgtaagtatgttttactaatgaagtacaattatttataatgttagaaaatcaaaaaatcttaacaaggtttttaagtcattgggtttgtattaactatggattatttatttgaattgatgattttggaacagttgacaatgtatttataatttatagcgttactttgctggttttggtgaaaaacaaatttagaatagacggattatgaagagaaattacacagaacacattatgtgagttttaaaatatataagtaaaatatgaatattatacctgtgaactatattggcgagaagatcgttatgtttcagccgatagtcaatgggtaccttctcaaagttgactgtcaatgtgccagtttggatacaacgttcatattcctcagcgggatgtgcccgaaattctcgcgagaatatatccaatatcttttcgcccacccagcgaccttttgtaaatgttgtgaatgtaaagtagtacggatacaccttgcgtagacctatttataaatgcattctcaacgataattcttttgtgatgtgcagaatgacataccgttttccatatagtaggatgtttcctggtatctttcatccgtgaatcccggcctcttagccttcaatgcttttgtctccagtttagcctaaaatattattacatcacttaatgtacttcacatatcattgagtattacttactttctttagctcttttatctgatcattatcgtctgttttccgcttttctggaaccttgattttaagattctcagagtccctgggagaagtagtctgtaataaataattaagaatttcaagatatgtaactaacacattctgattaagatgctcatatatcagctatagataatccgcaatatcaaccccaatattacccaaatctattttcaccttctccttcatttcaatgggaattactttgtttattttccctccattaatctttggtagacccattccatttgggtcaaagtgagatgctcttggcgggcaagtcggcaggtctaatgttacattatgctttatattacgtaagttcgtacagatacctaaatattgttctaggaacacatatatatatttataaacagtttgggatatgtacttggcttcgacgcttatatgtctggtgccttcatagagctactattggctgacgtttgtcttttatgcgcggtattcgaaggtaagcggagcatattggacaatttgaaaaggatgtaattgaaatttggaagtttaacggacctcgtactgtactgtaaagttgaaaaatccataaagcctcacaagaattcaaacaaagctaagtaacagcattgaaatattattgaaaatcgtacataatctttttatatgaaatttttttagtagtagccaaacttagtaatctaaaaagcacaagaaaataaatctttgatcagcttctgcccccttttattgcccccacaagagggtatattagtttcaagtgcccggtatctgctagtcgcattactccattatggcattccgctgctcgttgctttcgttggcattgcgcccaacgggtgatggaaacatgttgcatgcccaaaaagtcgcgcgggagagccacggaccacaaccacgaccacgggggataccatgggcacagataccattagacggccgtccggcagtgcgggttgagatactcggcgaaatccccgcagttacaatgggtctaaaacgcgtggatacacatatgcatgaccgtgtacaccgtgcatatttgagaaaagcagtctcagcccagaacaatgcacagaagatacactcgaagtatatatgaatacgttttaaatttagatcattatgaacagccgaacatatactagcgctgttgtactaacccaaaataaacctaaaacgatggtaaaag

SEQ ID NO: 16706 - DNA, 1521 bp, DROSOPHILA
atgaaggagaagactacttctcccagggactctgagaatcttaaaatcaaggttccagaaaagcggaaaacagacgataatgatcagataaaagagctaaagaaagctaaactggagacaaaagcattgaaggctaagaggccgggattcacggatgaaagataccaggaaacatcctactatatggaaaacggtctacgcaaggtgtatccgtactactttacattcacaacatttacaaaaggtcgctgggtgggcgaaaagatattggatatattctcgcgagaatttcgggcacatcccgctgaggaatatgaacgttgtatccaaactggcacattgacagtcaactttgagaaggtacccattgactatcggctgaaacataacgatcttctcgccaatatagttcacagacacgaagttcctgtgacttgtcaaccaattaaaattgtgcatatggatgaggacattgtagttgtaaataagccagcatcgatacctgtgcatccgtgtggacgttataggcacaacaccgtagtcttcattctggccaaggagttcaatctcaagaatctacgcacaattcaccgactagatcggttgacctcgggactcctactttttggacgcagtccgaagaaggcgcgccaaatggagcagcagattcgcaacaggcaggtggagaaggagtacatctgcagggtggagggcgtttttccagatggcatcgtggagtgcaaggagcccattgaagtagttagctacaagattggcgtgtgcaaagtatcggccaagggcaaggattgcacgactaccttccagaagctatcccaaaatggcaccaccagtgtggtgctctgcaaaccactcactggccgaatgcatcagataagagtgcacttgcaatatttaggttatcccattctaaacgatccactgtacaatcacgaagtcttcggtccgctgaaaggacgatccggagatatcggtggcaagtcggatgaagagcttatacgagatctcataaacatacacaatgcagagaactggctgggcatagattgtgattcggatatatccatgttcaagagcaccaaggatgaggcagatcgggaaagtctcagcattgttcatcatagcgatgatgatggatgcgtcaattcgcgggaaactacaccaccttgcaatgagccacagcagccggaaaatagtgttaaacttttagaaactacaaatgcagtcaaggagtatcaagttgcggcacagaagtcttcctcggaaatttgcccagctccactggatgcagtggagagtccactgaatggaggtggatgcaatgtgggcaaggtgacagtagatgagcattgctatgagtgcaaagtgcactaccgtgatccaaagtcaaaggaccttataatgtatctgcacgcatggaagtacaagggccctggatgggagtacgaaactgagttaccgaattgggcccgcaacgattgggaccacttagactcggcatga

SEQ ID NO: 16707 - protein, 506 aa, DROSOPHILA
MKEKTTSPRDSENLKIKVPEKRKTDDNDQIKELKKAKLETKALKAKRPGFTDERYQETSYYMENGLRKVYPYYFTFTTFTKGRWVGEKILDIFSREFRAHPAEEYERCIQTGTLTVNFEKVPIDYRLKHNDLLANIVHRHEVPVTCQPIKIVHMDEDIVVVNKPASIPVHPCGRYRHNTVVFILAKEFNLKNLRTIHRLDRLTSGLLLFGRSPKKARQMEQQIRNRQVEKEYICRVEGVFPDGIVECKEPIEVVSYKIGVCKVSAKGKDCTTTFQKLSQNGTTSVVLCKPLTGRMHQIRVHLQYLGYPILNDPLYNHEVFGPLKGRSGDIGGKSDEELIRDLINIHNAENWLGIDCDSDISMFKSTKDEADRESLSIVHHSDDDGCVNSRETTPPCNEPQQPENSVKLLETTNAVKEYQVAAQKSSSEICPAPLDAVESPLNGGGCNVGKVTVDEHCYECKVHYRDPKSKDLIMYLHAWKYKGPGWEYETELPNWARNDWDHLDSA

SEQ ID NO: 16708 - DNA, 3836 bp, DROSOPHILA
gtgctcgacatttcgcttgcgtcccgtaaagaaattgtccaccacgatgacctcgtgcccctggaccatcagatcgtcgaccaagtgggagcccacgaagccagctcctccggtaattagtatgcgtttgcgattcttatagttcaggtatttaaccttcggatacttgcgcggtgtgctggtctggaggctacgaacttgttcctccaatctggccaaattctcccttgtgcgctggagttcggccttttgttctcgaataagagagctctgctcctcgtacgccatctgaaggctcctttgtagcggactttccgtgggcggccatttggcctgaacctcctcgacgccgggaacggaaacggcgacctttccgcttgggcagaagctggccattcggtaaaggtagaccaggagcaggaggagcagcgagatggctgcaacgatcttcagacgctttttggtggcagtcatcgtcggttatgggttgtgtactgcagggttccagtgcttatcagcaactgatatcgccacattgcattctcgttcggctttagaaactatataaacaatacaattgcgttatcaggaggtgccagagtggccagatggctcaaacggaatttctaaatggattaataatctaacgccagggaaaagctcccgcctaattttaaaatttacatcaaaagtatcgacaggcgaacattttgattttggattataaattataatgaattgataatgaattagacatttttgttggtgatcttccccagggacgaatatttttcgttttaacgataaaaggtcggaaattgccaaaaaatgagtttgaaaactaaatttgtttgagggctttcttaggctggtcagcagggactactttccgaataaagtgtttgcccaaacggctattgaaggctatttaaactgccaacgatgagcatcgatcgccagtcgggcaaagttcttagtgccaagtgttgtagtgctcagcatgaggcttccttgggtgattttctgtacagttctgcttttaatttttacgaacaactcaaatgcagatattcccgggtgcaactactacgacacggttgatatctcatacattgaaaggcaaaacgattcgtatttatatgatgacatcgaaattcctgctagcttaactggatactacgagttcaggcagtttggggacggttcgattacgccgattgaaaagcatttaagggcctgtgtttgcagcgtgcggccctgtattcgaatctgctgcccagccaagaactttttggccaacggaaaatgcgatgatggtctcaaagaggagctcgcccggttcaaaccctatatatacttcacatacatggacctacaggcacgagtaccactcaccgatatggctattatcagagatgagttctttgattgtgatgaaatgatttacatcagcgactttaactatttcttagaagaggttagcattcaaatcttcaataaatgtggacttatagtttggttccaggatggaaaattttgggttaccgttgacctcttcatggaaaaacaggactactgcttgtaccggcacaactttgattcggattttccaaagtccatgtggataatacgacaccgctgcacaagccacatatctcctggatccttagagagtaattcaattattatttataacaaaagtcatcaatatcgttttcatagctatatagaaagaaacgaaaataactccttattggtgtgcaaactgctgactgcattctgtgtgccctttgcaagttttttaattacaataagctggttttttatttcttatattttctttttcagttctaattataacaatgatatgctttgtcctaacaatcgcagtatatctatacattaagaagctgcgaaatgttactggcaagtgcattgtatgctgtatagtttcgaggtttatccagtgcttgatcatgatactagatcatttaaatctattgaatggcatttgctctccagctggttagttcgaattggagatatctctggaagctttaaatgttatatcgttgacttcttgcaggttacagctcgcactttttccggatggcttccaacctctggctctccgtcatcagctaccatacgtggaaagtcttgacgtcgctcaatcgagtcgaccctaactatcggttcctgcggtacaacgccttcgtctggagcacagccgcaatcatgacgggaagtatttatatagttaatcagatttgggaaaacgatcccagtaaatggaactggttgcctctggtcggttttattcggtgctcggtcaaaggtaaactttcaatgcgattgcttttaaatcgttaccatggttacgtattgcttttccatatcagattggcacccatccgtctggatctatataagtggaccgtcgctggccctgagcactttcaatgtcgccatgttcgccctgacagccatttacattaggaaagtgaaggggggtataaataagttcacaaatgaggaggagggaaggattaactgcataaactttgacagccagacgtaagatatgataaaaccttggaccttggtaaactagttatccttgccgtattatccacatagttacctacagttcctgcggctctccatcgtgatgggccttacttggatattcaatgtcattccgtattctgcacggctccacattttctgggaatgggtcgggataatatccgagtattttcacagcgcgtttggaattgttttgttcgttctgctcgtcctgaagcgcagcacatggactctaatgatggattcttaagcttgtttctatataattctaataattgtttacaattaaagctttaaacaattaaagcccctcattttattaatatcctttgctgaacgaaggaattgaattgaattttattgaactcaataaataaatatagttttagaaaacgatgtactttaaactgccaagaggtcaccgcgacaagcttttcacttcgccaccctctggtaacactgattctccagccactttcgattctttaaaaaacatcgataggtatcgccaaaaaaatcagctgctctgcttgtagttttgcgatttcattgcaattttaatttgctttactgttcaaaaagaaatacagtgcaaaatatgccgaacgaaaacgcagaggacctctcgggtcaagagctaaagcagaaggccaaggaggtggccgacgcatcggaggcaatgctcgaaaaggttgttgccggcttaaatatccaggacacggcatcgacgaatgcagcaggaaacgaggatgcggagcagcctgatggtgccaagaatgaggcttcagtgtctgcgaatgcaagtaagttttcaatatgcctgtgaaaagtcatttagaggctcctcctgcggctgaaaaaatgaggttaggttttgtcgggaactacagtccaacctctctaacttgaactgctgtgctattcatttcaattcaattttcaattttcattttctgtgcaattactccaaagattagccctaacggaaaaataaacaactcataaatcataaatacatatttgattttgatgaaatatgaatatacttacatagatacaattgagttttttattacgaataaaatatgtgtaatataagatttctaccttgttgattccattgattgatgcttcattgaaaccccaaaattgggcaaatttgttgtcatgggaaactagtccactgtcgtgatgccttaagctttttttggggcagattagtcattccagtttaaactaatcgaaaa

SEQ ID NO: 16709 - DNA, 1536 bp, DROSOPHILA
atgaggcttccttgggtgattttctgtacagttctgcttttaatttttacgaacaactcaaatgcagatattcccgggtgcaactactacgacacggttgatatctcatacattgaaaggcaaaacgattcgtatttatatgatgacatcgaaattcctgctagcttaactggatactacgagttcaggcagtttggggacggttcgattacgccgattgaaaagcatttaagggcctgtgtttgcagcgtgcggccctgtattcgaatctgctgcccagccaagaactttttggccaacggaaaatgcgatgatggtctcaaagaggagctcgcccggttcaaaccctatatatacttcacatacatggacctacaggcacgagtaccactcaccgatatggctattatcagagatgagttctttgattgtgatgaaatgatttacatcagcgactttaactatttcttagaagaggttagcattcaaatcttcaataaatgtggacttatagtttggttccaggatggaaaattttgggttaccgttgacctcttcatggaaaaacaggactactgcttgtaccggcacaactttgattcggattttccaaagtccatgtggataatacgacaccgctgcacaagccacatatctcctggatccttagagattctaattataacaatgatatgctttgtcctaacaatcgcagtatatctatacattaagaagctgcgaaatgttactggcaagtgcattgtatgctgtatagtttcgaggtttatccagtgcttgatcatgatactagatcatttaaatctattgaatggcatttgctctccagctggttacagctcgcactttttccggatggcttccaacctctggctctccgtcatcagctaccatacgtggaaagtcttgacgtcgctcaatcgagtcgaccctaactatcggttcctgcggtacaacgccttcgtctggagcacagccgcaatcatgacgggaagtatttatatagttaatcagatttgggaaaacgatcccagtaaatggaactggttgcctctggtcggttttattcggtgctcggtcaaagattggcacccatccgtctggatctatataagtggaccgtcgctggccctgagcactttcaatgtcgccatgttcgccctgacagccatttacattaggaaagtgaaggggggtataaataagttcacaaatgaggaggagggaaggattaactgcataaactttgacagccagacgtaagatatgataaaaccttggaccttggtaaactagttatccttgccgtattatccacatagttacctacagttcctgcggctctccatcgtgatgggccttacttggatattcaatgtcattccgtattctgcacggctccacattttctgggaatgggtcgggataatatccgagtattttcacagcgcgtttggaattgttttgttcgttctgctcgtcctgaagcgcagcacatggactctaatgatggattct

SEQ ID NO: 16710 - protein, 426 aa, DROSOPHILA
MRLPWVIFCTVLLLIFTNNSNADIPGCNYYDTVDISYIERQNDSYLYDDIEIPASLTGYYEFRQFGDGSITPIEKHLRACVCSVRPCIRICCPAKNFLANGKCDDGLKEELARFKPYIYFTYMDLQARVPLTDMAIIRDEFFDCDEMIYISDFNYFLEEVSIQIFNKCGLIVWFQDGKFWVTVDLFMEKQDYCLYRHNFDSDFPKSMWIIRHRCTSHISPGSLEILIITMICFVLTIAVYLYIKKLRNVTGKCIVCCIVSRFIQCLIMILDHLNLLNGICSPAGYSSHFFRMASNLWLSVISYHTWKVLTSLNRVDPNYRFLRYNAFVWSTAAIMTGSIYIVNQIWENDPSKWNWLPLVGFIRCSVKDWHPSVWIYISGPSLALSTFNVAMFALTAIYIRKVKGGINKFTNEEEGRINCINFDSQT

SEQ ID NO: 16711 - DNA, 9306 bp, DROSOPHILA
gagatcgttccccgcctcctaaaaggtcccttagtgggagaccgccgctcaagataggcagatgtgccggagcgtaggaccccgatgaggcggggactatttacttaggcctctgcgtaggccatttactctaagatgcgattctcatgtcacctatttaaaccgaagatatttccaaataaaatcagtttcttacaaaaactcaacgagtaaagtcttctcatttgggattttacaccataatttgaataaaacgatcaaagatcgcacttatctattgtataataatgcttttgaaacacatagaaatatttgaaatcgcaatgcaaatagttggatgatattaccaattaccaatttttaccaatacctattaccaattattaacgaataatcagggatacccctgcttacaaatttgacatttcatagcaatgaaaatatctggcaacaaaaatcagcccattaggacttcatattaattcagtttagccatgaataatgacaccagtgtaatctgttcatgacgaactgcgtaaatgttccgatcatttaactgatcaaacatactttacaaacaattcaatgtttgtagtcaactcgagtagcccacctttgcctcggttgtagcccgcagatatcgcagatactggagtagaaactttgaagtgccatgtcggacaacaaataaacaacccaaacaacactgtgtttaaccatagcaggggtgaagaacacatgcaccgagttctttgtcggaattagaagtacaaataaagccgaacccacaatgagttataataaatgggaacaatagtgaccctaaaattttatgaatggttagcgttgctgtgattccatttgatggcatttgtaattgcaattatagtcagtgggtctgtggcttcggaaggtttcttatcgggactcgatgacaacttgtgcgccttacatcgatgatatcacaaccttatctctgatctgacgatcgcccgatcggatggccaggtccggagaaccaaatgccgagtgccaatcagttttggattgcccatgggaccacacagacatgagcggaggagactacgatagcggtgactacttcatgcgcagtcggtgggtccgtccccaatcgggatatgatgtcacctataaccagtgcttccgactgcttccaggaagcagcgggacaagccgtcattatgggactccttccaggacccgccgtctaagaagacgagcggatccgatgccgactggaagaagctccagttctgccttaagctcttcaagatctgcacctacctccttgtcttcgcggtcgttcttgcgacgagcgtgttcgccaacttgatttatctctacatggccggaaacacaggtggcaccgggccacgcgtgcaagtgtgcagcaagtatcgtgagtaaagttcatttatttgtttgagtagcacttccactgcgcttcttccgcttagcagtactccggcacggccaagtggaggcggtggccagcgagctggaccaaatcgcctgggtctgggccctgatcttcgcctttgccgcccccgagctgctcaccttcctgcgcgccctgcgcatctgtatgttcaagcgcgagcagcgacccagcggactagaagtgggactggtgggtattttttccgtgggggtacagatagggtggcttgattcgaggttaatatgtttactcaaacgttcggagctccttaagccaagaaaatcacttttcagtaatcactttgctggatgtaaactttgtcaattgaatactttgttttgttaaagttacataacttgaataatatttgatagttaaaatcatagtattcggcttaataatataataagttcaaagcagttgaaattaccatgatacagacaataattcgtttgataaaagaaatagcttaggcgacttaaatcgtcacgtacatacaaagttcagtatatcagcgcctaacaattaagctgaaaatgtcactagatttaaaaaccacaagtgactgcagcccctctaatggcaccacccacccactcgagctttcgagccaccctaaccccgacgcagattgattgataagcccccgccaatcaggtcacgctctttgaactcctgcacgtcgttggtctggccctgctcaccttcaccgtgctgccggccctggatgtgacgcgtggagcgattctgggctgctgcgtctgcttcgtgcctgccctgcttagtaagtttcccccccgaccagcccagagcccaaatgttatcggtgcctaggcaccgactgagaacaattaaattgattgccctggctgctcgatgtttcagacctgctgacgggaacgcgggtgcgctggaggtcggcggacagcctggtcctcgggctctccatcctggcccttgtggcgcagggcagcgtctttctggtctggccctcgctgagcgacagtatggaggtccagctgctggccattccgctgctccttatttcgtttcgctggtgggagaacttcgccaacactcacgaggccatcggtatgtgcttgactatgactatttccagacaatacgtacatatgtacatatatagatatctacaattcaaaggcgcattctaagttatcactcaatgactcttaaacacttaggttattattaattataatggtcatagattacattttcttcaaacataaagttccgattcaaagttagaccgaatattcgcaaatccacgggggactacgtctgggatcataatcggtgggggctataatataagtcaaaatatatgcctctatattaattagtattaaatgtgtaaacaaactatatggaatatcattagccgtagtagttatatgttatgtttttgactgtcagtaattgcatcggatactacattgcatgctgtattgttctttagaaattaagcaacacaaaatgcattaggctcggcgcaattgttcagagaattctaagtgtgaaagtaccgattcctcatttattctccttccggcagcctatatcattcgcaccatccgctgtacccgatcccgataccacacctacctgtacctggcgcctctgaaggtgttggttttcgcggggatgggcttcatcctgcatggccacgaattcgttgagtactttggtaggttccgggatgcctggcggccgcatctcatcacgctggtggtaagtgtagtccatttattaaggccgcaggttaccacttattctaatacagatatataatatttaaggctgaagggttttaagcttcccactttctgtgaactttcagcaatctaatggcgaccccgatgcgctgcttttagcacaggccaacgtatcaatcacagcccctccacgcaggacgctgttcaccatgcagtctagtccgaattcggttttctacgcactggcggcccaggtgggtgctgcgtacctgtgccacattttcggtaagttcgcctgcaaaatcaagatccagaagttcagctacgcgctgcccctcagcctggcaggacctgccaccgtctgcctggtcacctttctggcccagctgcgggcctcggacccgtgctccctgcacggtttcatgccggactacctctcgctcctggcgctgggcgggagtgtggaggagctgggccagagatgcctcgactacgccctctggctgtggcccctgtggtggctggcccaggtgtggacctgcctgcacatttggcagccccacaatgacaggaacgccccaaccgagaagctcttcgtgtgtccatggtactgcggcctgctggtggaccagtgctcgatgatgaacaggcggatcgtggactggagcgaggagtatttggccatcaaggtgagtgggagtcgcttcctgcagaattgagtgcttcaaatcaggtgcgaggaaagttgagggcatgttaatgaattattgaaatcaggcgcctgcttagcatcaatcatctcgctaagttcgcagcttcctgcagctcttgtgccaatccgtgcacccacatccatttttgactattccggcggagggggcccggactgccggcactactgatgagcgcttcaaatgtcaggcaatgtaattaagttaaatgacggggaaactgcaaagttcaggaaatgtttgtgtttcgtccttttcggggaggggcacggctaggatgccagtactgggatgggttttcggtgggtgtaaacttaattaaaagtgcttcagctccactcgcatgttttcggggcctacccagtataaagacattaaagtaattaaaatcagggcatacgagttgattttaagggcataatttaggggccatgcgaattatgtgcattcgtaatagccttgctacattaggcaggcggaaccgacctttaagtccttaaaatccgtgacatattaataaaaactttcattctagttaggattaatctgctgtattgcataccaaacacattgcttaacatgaaatgaattttgaggtttatcttgtgtgcagttgtgttctgttgccaaattaatgccggagcccttgccaagaattttcgtgctctcgaggctccgcaaataccgcattggatttctgaaatacccacttggtatgcactgcaatcattcggagcttaaactaaacccacctgcatctgtttctcccgacagagcgacctaaccgcgccgagggatcctgtggtggctctggcagccgacatcaatgccagccgggacatccaggaggaggataaggtgccgcagctgattgtgtgcgccaccatgtggcacgagaccgaggacgagatgatggagttcctcaagtcaattgtccgcttggatgaggatcaatgcgcccgccgcatggccaggacgcacctcaacggcgggaaggcggacgacgagtactatgaattggaaagtatgtaaatgggccaaactttgagggtgaagatgctgatgcagaagcaggtggtgtcttctccagtcctcactggctacatttgcattgcgcatttaaatgtgtcaaagtgggaatttatgaagctcggcacgctgcttgcagctctatttatagcgcttggcgacttcatttccgcgcttgccaaaatggctttaagccaagcgtctgcagctgtctgcgacaactttacgatctccgcaacaccgcccctacacggagaataaataatgggcttaaacgcaaatattcaattcgttaatagatcgttcttaacagattatatcttgaaattggaattcatattggaaagttggaaagccgagttgatatagccatgtccgtctgtccgtcttacgaaatatagtctctctgcgccaaagctagttgcttctagtcattggtaatatttgatagtttttactaacggttgctaaagtaattgagaatttttaggaatacaaaccaaatattttcctttttcgctatactcagacgtgttttatagaaatgcattacagaaattcacttctcgttgccgaatctgattatctttcttgtttaatttaaaccattatttggaattagctgtactagactagagagtaatgggaatctgatcattacccatatgaaaagttaatttaaaaaaattggaatttcacgtccggaacaagcttcttttttgcagccaaatgtttctgcacctaaaactagcttgaggtaacagtaaggattagatgtttcaacctttttattttgtttatagctaacatcttcttcgacgatgcattcgtttcggatccgcgtcagtgccagaacaagcgtaacccacccatcaacgagtatgtgaagaccctaacccgaaccatcgacaaggcagcctttgaggtctacggagtgaacatccgcataaagccccctcttaagatcgagactccctacggaggccgcttggtgtggaccctgccaggacgcactaaaatggtggcccatctgaagaacaaggacaagatccggcacaagaagcgctggtcgcaggtcatgtacatgtactatcttctgggatatcggatcatggagacgaaggagctgtcaccccgtcgaaaggcggttattgcagagaacacctttatcttggccctggacggagacatagacttccagccgcgagctgtgaggctgctgatcgatcgaatgaaggccgtggacgagctgggagctgcctgcggtcgaattcacccggtgggcaggggtccgatggtgtggtaccagagatttgagtacgccattggacactggctgcaaaaggcgacggagcatgtcattggttgcgtcctctgcagtccgggatgcttcagtctgttccgggccagcgccctgatggagaacagcgtgatgaagcggtacacgatgatcagttcggaggcgatgaagatggtgcagtacgaccagggcgaggaccgctggctgtgtacgctgctcttgaaggccggctcccgggtggagtactgcgccgcctcggatgcgtatacccacgcgccagagagctttaacgagttctacaaccaacgacgtcgttgggtgccctccactatagccaacatcttcgatatcctagcggatgcggacaccgtggtgaagaagaacaactccatatcaacgatgtacgtgtggtaccagggaatgctgatgatcggaaccgtgttgggaccgggcaccatattcctcatgatggtgggcgccttggtggccgtgttttcaattgacatctggaccgctttcctatggaatttttttcccatcctcttattcattctggcctgtgtctaccttaaacagaagtttcaactgctgatagcattcgtcattagctccgtttactgcctagtcatgatggcagtcctcatcggcatcattgtccagatgctggaggacggacccctggctcctgcatcgctgttcttcctgctcgtagctgtgcaaatcacaattgcaggtgaggcattaacccatttaaaatatgaaattaggtcgcaagttaaagctttaataatatgttaacagataccatatcctatataatttataaaatatgtaacgtttaaaaattggtagtacaattcgatgttcgtaattttccaggctttatgcatccacaggagttctgggcattgctgtgcggagtcatctactacataaccatcccttcgatgtacatgcttctcatgatcttttctgtgttcaacatgaacgatgtttcgtggggcactcgagaggctccagtgctcaaggacgacggcaaggacgcagtcgatgaagcgaacaactacctgccaggctggctaaatgatccgctattgatcgactcggagctgggcgaagtgtcgttgatggagcagagattctggaaggatctgataaagcagtatctgaagccattggaactgagtagggagcagaagcaggcgatggccgacggacttaaggagctgagaaacatgatcgccttcgcctttgtgatggtcaatgcgatctttgtgctcattgtgttcctgctgcagctgaagaaggagtttctgcacctcgagtggcctattgatcctacagactttgtatccttcgacagggacaacctaatggttggcatctacaggcagtacaaagaactggatcccattggcctgtgctttgtgattttctttggactgatcctgatcatccagttcctggcgatgttcttccaccgcttcgctaccctgtgccagctgctggccactactcaggtggactggtttcgaacaggaggtcagtttactgacgaggatgccgccaccgagctgaagggcagtgctgtcagtatagcccggaagttgcagcgacccaagaggctcttcgacgacgacgaggacggggacccccactacgacgaggtgttgatggattctttagaaggggagcacagggagagcatggtgcgacggcagacgatctttcggcttcacgagacgcgggacaagcagcacagcgactacagcaatctggtgtttaactttgaacgccgtttctttggagacgacgagctgaaccttaagaatctggcactcaaccgaaagtcagtgaagcttctgcaggagcgtcgctctgcggccaaggtcaatgcagcagccacgcccgagggcacgccaactccgaaggctggaaagcgaccgcctgtggtgccgatggccaagaaggtgagctttacggcctcaaaccggaacaatatggctttgtacgacaacggcgggtacgagcacaccgagttctagaaaggatcaagctgatgaccaaagtattaaccagagaatcttgtagagtacttactattgcacatatctaggtgttttccactctggactcgttaaacaattttcaagaatagagtgccaagatagcatttcttatccgtacatacccacagtaatcaataataccctaattaatatgtattatacagttaaaagccatcaaaacaccccttacatttgcatatccttatgaccttatataatcgaatccccaagtttcttggtggcataaaaaatataattaattgcatttaactgaagtggcagaggcagccaagtctacttcccttctaactgaagacatctcattagcataattaccagatgcaggcgatggcaatgtcggggggtggggaagagcaggacaaaggaggggcttcttcattcatcaatgtcggggcaacgctcagagttaagtgctcgtggtggcgatgcgctttttgcttggaaagttcttgctcctcttcgttacaaaatgcaaatcaaagtgtgattagcttggatttgatgaagtttctgcagcaatgcaccttagccgcgcccattcgatactggtgtgtgtgcgcgggggtgtggcaaggtgtcagcgtaagtgttttgtaagtgaatttttcactgcctgcgcaaagaaggcacaagggggcaagcgggccagggcgtaagaagagtcctttcgccaaggactgacaggacttactttggcaatgcgcatacattaggtatagaaggtaagacgggagttccacccgcgcagtaccagcagccaggtctgccactggcttgccaagtgctgaaacccaagattacgggcgaagaacacgactaagtaatgaactcggttggtcaaacggaaggtagccatcgattcgatggcgcaccgatattcatgaaggggggcacaactttgttggctttatagcagttgccgaatactgtgtttctgcactagatttaaattggg

SEQ ID NO: 16712 - DNA, 4212 bp, DROSOPHILA
atggccaggtccggagaaccaaatgccgagtgccaatcagttttggattgcccatgggaccacacagacatgagcggaggagactacgatagcggtgactacttcatgcgcagtcggaagcagcgggacaagccgtcattatgggactccttccaggacccgccgtctaagaagacgagcggatccgatgccgactggaagaagctccagttctgccttaagctcttcaagatctgcacctacctccttgtcttcgcggtcgttcttgcgacgagcgtgttcgccaacttgatttatctctacatggccggaaacacaggtggcaccgggccacgcgtgcaagtgtgcagcaagtatccagtactccggcacggccaagtggaggcggtggccagcgagctggaccaaatcgcctgggtctgggccctgatcttcgcctttgccgcccccgagctgctcaccttcctgcgcgccctgcgcatctgtatgttcaagcgcgagcagcgacccagcggactagaagtgggactggtcacgctctttgaactcctgcacgtcgttggtctggccctgctcaccttcaccgtgctgccggccctggatgtgacgcgtggagcgattctgggctgctgcgtctgcttcgtgcctgccctgcttaacctgctgacgggaacgcgggtgcgctggaggtcggcggacagcctggtcctcgggctctccatcctggcccttgtggcgcagggcagcgtctttctggtctggccctcgctgagcgacagtatggaggtccagctgctggccattccgctgctccttatttcgtttcgctggtgggagaacttcgccaacactcacgaggccatcgcctatatcattcgcaccatccgctgtacccgatcccgataccacacctacctgtacctggcgcctctgaaggtgttggttttcgcggggatgggcttcatcctgcatggccacgaattcgttgagtactttggtaggttccgggatgcctggcggccgcatctcatcacgctggtggccaacgtatcaatcacagcccctccacgcaggacgctgttcaccatgcagtctagtccgaattcggttttctacgcactggcggcccaggtgggtgctgcgtacctgtgccacattttcggtaagttcgcctgcaaaatcaagatccagaagttcagctacgcgctgcccctcagcctggcaggacctgccaccgtctgcctggtcacctttctggcccagctgcgggcctcggacccgtgctccctgcacggtttcatgccggactacctctcgctcctggcgctgggcgggagtgtggaggagctgggccagagatgcctcgactacgccctctggctgtggcccctgtggtggctggcccaggtgtggacctgcctgcacatttggcagccccacaatgacaggaacgccccaaccgagaagctcttcgtgtgtccatggtactgcggcctgctggtggaccagtgctcgatgatgaacaggcggatcgtggactggagcgaggagtatttggccatcaagagcgacctaaccgcgccgagggatcctgtggtggctctggcagccgacatcaatgccagccgggacatccaggaggaggataaggtgccgcagctgattgtgtgcgccaccatgtggcacgagaccgaggacgagatgatggagttcctcaagtcaattgtccgcttggatgaggatcaatgcgcccgccgcatggccaggacgcacctcaacggcgggaaggcggacgacgagtactatgaattggaaactaacatcttcttcgacgatgcattcgtttcggatccgcgtcagtgccagaacaagcgtaacccacccatcaacgagtatgtgaagaccctaacccgaaccatcgacaaggcagcctttgaggtctacggagtgaacatccgcataaagccccctcttaagatcgagactccctacggaggccgcttggtgtggaccctgccaggacgcactaaaatggtggcccatctgaagaacaaggacaagatccggcacaagaagcgctggtcgcaggtcatgtacatgtactatcttctgggatatcggatcatggagacgaaggagctgtcaccccgtcgaaaggcggttattgcagagaacacctttatcttggccctggacggagacatagacttccagccgcgagctgtgaggctgctgatcgatcgaatgaaggccgtggacgagctgggagctgcctgcggtcgaattcacccggtgggcaggggtccgatggtgtggtaccagagatttgagtacgccattggacactggctgcaaaaggcgacggagcatgtcattggttgcgtcctctgcagtccgggatgcttcagtctgttccgggccagcgccctgatggagaacagcgtgatgaagcggtacacgatgatcagttcggaggcgatgaagatggtgcagtacgaccagggcgaggaccgctggctgtgtacgctgctcttgaaggccggctcccgggtggagtactgcgccgcctcggatgcgtatacccacgcgccagagagctttaacgagttctacaaccaacgacgtcgttgggtgccctccactatagccaacatcttcgatatcctagcggatgcggacaccgtggtgaagaagaacaactccatatcaacgatgtacgtgtggtaccagggaatgctgatgatcggaaccgtgttgggaccgggcaccatattcctcatgatggtgggcgccttggtggccgtgttttcaattgacatctggaccgctttcctatggaatttttttcccatcctcttattcattctggcctgtgtctaccttaaacagaagtttcaactgctgatagcattcgtcattagctccgtttactgcctagtcatgatggcagtcctcatcggcatcattgtccagatgctggaggacggacccctggctcctgcatcgctgttcttcctgctcgtagctgtgcaaatcacaattgcaggctttatgcatccacaggagttctgggcattgctgtgcggagtcatctactacataaccatcccttcgatgtacatgcttctcatgatcttttctgtgttcaacatgaacgatgtttcgtggggcactcgagaggctccagtgctcaaggacgacggcaaggacgcagtcgatgaagcgaacaactacctgccaggctggctaaatgatccgctattgatcgactcggagctgggcgaagtgtcgttgatggagcagagattctggaaggatctgataaagcagtatctgaagccattggaactgagtagggagcagaagcaggcgatggccgacggacttaaggagctgagaaacatgatcgccttcgcctttgtgatggtcaatgcgatctttgtgctcattgtgttcctgctgcagctgaagaaggagtttctgcacctcgagtggcctattgatcctacagactttgtatccttcgacagggacaacctaatggttggcatctacaggcagtacaaagaactggatcccattggcctgtgctttgtgattttctttggactgatcctgatcatccagttcctggcgatgttcttccaccgcttcgctaccctgtgccagctgctggccactactcaggtggactggtttcgaacaggaggtcagtttactgacgaggatgccgccaccgagctgaagggcagtgctgtcagtatagcccggaagttgcagcgacccaagaggctcttcgacgacgacgaggacggggacccccactacgacgaggtgttgatggattctttagaaggggagcacagggagagcatggtgcgacggcagacgatctttcggcttcacgagacgcgggacaagcagcacagcgactacagcaatctggtgtttaactttgaacgccgtttctttggagacgacgagctgaaccttaagaatctggcactcaaccgaaagtcagtgaagcttctgcaggagcgtcgctctgcggccaaggtcaatgcagcagccacgcccgagggcacgccaactccgaaggctggaaagcgaccgcctgtggtgccgatggccaagaaggtgagctttacggcctcaaaccggaacaatatggctttgtacgacaacggcgggtacgagcacaccgagttctag

SEQ ID NO: 16713 - protein, 1403 aa, DROSOPHILA
MARSGEPNAECQSVLDCPWDHTDMSGGDYDSGDYFMRSRKQRDKPSLWDSFQDPPSKKTSGSDADWKKLQFCLKLFKICTYLLVFAVVLATSVFANLIYLYMAGNTGGTGPRVQVCSKYPVLRHGQVEAVASELDQIAWVWALIFAFAAPELLTFLRALRICMFKREQRPSGLEVGLVTLFELLHVVGLALLTFTVLPALDVTRGAILGCCVCFVPALLNLLTGTRVRWRSADSLVLGLSILALVAQGSVFLVWPSLSDSMEVQLLAIPLLLISFRWWENFANTHEAIAYIIRTIRCTRSRYHTYLYLAPLKVLVFAGMGFILHGHEFVEYFGRFRDAWRPHLITLVANVSITAPPRRTLFTMQSSPNSVFYALAAQVGAAYLCHIFGKFACKIKIQKFSYALPLSLAGPATVCLVTFLAQLRASDPCSLHGFMPDYLSLLALGGSVEELGQRCLDYALWLWPLWWLAQVWTCLHIWQPHNDRNAPTEKLFVCPWYCGLLVDQCSMMNRRIVDWSEEYLAIKSDLTAPRDPVVALAADINASRDIQEEDKVPQLIVCATMWHETEDEMMEFLKSIVRLDEDQCARRMARTHLNGGKADDEYYELETNIFFDDAFVSDPRQCQNKRNPPINEYVKTLTRTIDKAAFEVYGVNIRIKPPLKIETPYGGRLVWTLPGRTKMVAHLKNKDKIRHKKRWSQVMYMYYLLGYRIMETKELSPRRKAVIAENTFILALDGDIDFQPRAVRLLIDRMKAVDELGAACGRIHPVGRGPMVWYQRFEYAIGHWLQKATEHVIGCVLCSPGCFSLFRASALMENSVMKRYTMISSEAMKMVQYDQGEDRWLCTLLLKAGSRVEYCAASDAYTHAPESFNEFYNQRRRWVPSTIANIFDILADADTVVKKNNSISTMYVWYQGMLMIGTVLGPGTIFLMMVGALVAVFSIDIWTAFLWNFFPILLFILACVYLKQKFQLLIAFVISSVYCLVMMAVLIGIIVQMLEDGPLAPASLFFLLVAVQITIAGFMHPQEFWALLCGVIYYITIPSMYMLLMIFSVFNMNDVSWGTREAPVLKDDGKDAVDEANNYLPGWLNDPLLIDSELGEVSLMEQRFWKDLIKQYLKPLELSREQKQAMADGLKELRNMIAFAFVMVNAIFVLIVFLLQLKKEFLHLEWPIDPTDFVSFDRDNLMVGIYRQYKELDPIGLCFVIFFGLILIIQFLAMFFHRFATLCQLLATTQVDWFRTGGQFTDEDAATELKGSAVSIARKLQRPKRLFDDDEDGDPHYDEVLMDSLEGEHRESMVRRQTIFRLHETRDKQHSDYSNLVFNFERRFFGDDELNLKNLALNRKSVKLLQERRSAAKVNAAATPEGTPTPKAGKRPPVVPMAKKVSFTASNRNNMALYDNGGYEHTEF

SEQ ID NO: 16714 - DNA, 3029 bp, DROSOPHILA
taacgttgcttgtctcgtttcatgacttaaccactgaaccgcaatcacacttaaccgacatgtgacagaccatttaacgccagcgagaggtaaatcttgaatttataataaccactgagcgtgactaacctttgagtgactcgcagatttgtcaccatactggatagtttggatgcacgtgtggagaagctgcgcaaggatgcactcaacctgcaggagaagaaagactaccttctgatgtccatggatctgatcaagagcaacgaaatgatgcagaacatgagcgaaggtaagtgacagtgattcttaaaactaatttgaaccctcattgttcatagctttactaaaatgtgtattatttcgaagtcggaagtaatggtttctgatgacaaactaagtaaagggttattcatagttgactgtgagctaatgttgtaccaccttcttttgcagctgaacgagaggagatcattttgtacctacaacgggtgagctctcgcttggccaccgtggagctgcgtgtgcgcactgttcgggacaactctcaggaggattcccttagccagataaatgtattgattgacagcatgatcaagatgggtgatcccgtgatcggacgccaacgatgccagttttacttaaacgcctgctgcagcagctcaatggatccatccggacacatggacaccgtgcccgaggccgatgttgggccggtcgacaagaagttcgagagcgttttgcttggctgcactctggacgatcagaagaacatcaagaagcggctccaggccttaatggcttatctgaataagcaaactgttagccattaattaaattgttttttggtctattaactattcatagcattattatcaaaccaaacgaaatacatcaccaagctagatgaaacgaataataaagaaagcagcatatacaccaggccagcagtgtttgaatcaagtaaaatataattttaatatttatattaacaaactaaatgttataagctaggaaagcacatgtccttcgcattcaagacccgatcacttaggacccataatgcatcattggaggtgaagaaaatctgctgaatgttcttcgatgtgatatatatgatttcgttgccctcggctgtgatgttggctagtttggcacatcgtacgacagctccgaatttggggataacatagtacaatgttccgaaattgtcgatgatcatgctgcgactgctgcccagaagactgcccaaatgtgtgagtttaatgctattgttaattggtttgcttgctaattcgcttttgccttcaatttccagtctgtccaccgtactgtatagatcaccatcctggtcggagagtatgagttccccttgaattccgaagatgaaatccactggcttgatgggaaacgattgattcatattctcgtacttattgctctccaaggataggcggtgccacgtctgctccaggatgtcgtaggctagaatttctggtacctttccaaggatgaagtaaatatggcgctcgtgctcgcatcccggactcttgggtcccatttggacagtcagaaagtgggtgtcattagcacctatatggtgtccacaatcgattctcaatagctccgcgttgttacgcatcagatcgaagacaaacaaacggggtgagcacgtgctgccgggaaatccgatgtccatgacccacagtcgactcagtgcatccacctgggaccagtgtgcctgttgtaccagagagcaatcatcatgatcccccatggaatgaacatcgatgtggggaaagacgacagtgggcatgggaaaataggaaaccggccattgcgcctcgatcaaagtgggcgcatcgttgctttctacatttacgctgagaaacactcgcgaaaagtgcatcgatagatgacggactttgtagctggattcgtttaaaccagattcggataacagccaggcgtccgtggccagaattagaccaacaatgagaaatcccaagccgaggacaccatgtgtgaccatctttaaacgcgaattcagactgagcttagggctagagaactctgcttacgttgtaagtgcccgttcaagaagtccaccaaagtgtctacatcagcagttgggatcgggtgtcgccgaatatatcggcgacctgcattaatggggaccagcattggagtgtttctctattcacttgtggtcccaaaaaaaaaaagcttaccaatttcaatcggagaatatcgaaatcatgacacagtttcctcttaaaattacccaaaattggattgttatatttttcaaaataaatcaaagttaaaaccaacaaaatggttgttttgtaccaccataataacctataataaataaatcataataaggctatttttgtcgaactttagcgatattgataaggttcctgtgaactgaacctaccttaagtgcttagttttaacataaccttaatgttaacgagtatttcttcgcgtaaaagtacaaaaaaaccctatcatatctttacagccattataaagattgcttatagatgactgatttcacttgggaattgccaaaaagctaaagtgaacccccgaggaatcaattaatgttgtttagctttcagtttttagtacattcgtatttttttaagtattaaaattatttaatcacacgaataaacattaagaaatattttattctggaaactttcttcgttatagagcatttatcgttgtaaaaaaaataatttcattagtttacattacattttcgtttatatgtttagattttttctaattaaatgatattgtataatttattgcaaaaattataatactcacttcaaataatctgaaacaaatccacccactccgaaaaatgtggtaagctttattttctaacacctctcttctgattttattgattataactggaatctttatcggtttctctctttttccatcagtaggttgagagcttttcatacttttcacgccgaaatgggaaaaatggcactgcgcgtaga

SEQ ID NO: 16715 - DNA, 1029 bp, DROSOPHILA
atggtcacacatggtgtcctcggcttgggatttctcattgttggtctaattctggccacggacgcctggctgttatccgaatctggtttaaacgaatccagctacaaagtccgtcatctatcgatgcacttttcgcgagtgtttctcagcgtaaatgtagaaagcaacgatgcgcccactttgatcgaggcgcaatggccggtttcctattttcccatgcccactgtcgtctttccccacatcgatgttcattccatgggggatcatgatgattgctctctggtacaacaggcacactggtcccaggtggatgcactgagtcgactgtgggtcatggacatcggatttcccggcagcacgtgctcaccccgtttgtttgtcttcgatctgatgcgtaacaacgcggagctattgagaatcgattgtggacaccatataggtgctaatgacacccactttctgactgtccaaatgggacccaagagtccgggatgcgagcacgagcgccatatttacttcatccttggaaaggtaccagaaattctagcctacgacatcctggagcagacgtggcaccgcctatccttggagagcaataagtacgagaatatgaatcaatcgtttcccatcaagccagtggatttcatcttcggaattcaaggggaactcatactctccgaccaggatggtgatctatacagtacggtggacagactggaaattgaaggcaaaagcgaattagcaagcaaaccaattaacaatagcattaaactcacacatttgggcagtcttctgggcagcagtcgcagcatgatcatcgacaatttcggaacattgtactatgttatccccaaattcggagctgtcgtacgatgtgccaaactagccaacatcacagccgagggcaacgaaatcatatatatcacatcgaagaacattcagcagattttcttcacctccaatgatgcattatgggtcctaagtgatcgggtcttgaatgcgaaggacatgtgctttcctagcttataa

SEQ ID NO: 16716 - protein, 342 aa, DROSOPHILA
MVTHGVLGLGFLIVGLILATDAWLLSESGLNESSYKVRHLSMHFSRVFLSVNVESNDAPTLIEAQWPVSYFPMPTVVFPHIDVHSMGDHDDCSLVQQAHWSQVDALSRLWVMDIGFPGSTCSPRLFVFDLMRNNAELLRIDCGHHIGANDTHFLTVQMGPKSPGCEHERHIYFILGKVPEILAYDILEQTWHRLSLESNKYENMNQSFPIKPVDFIFGIQGELILSDQDGDLYSTVDRLEIEGKSELASKPINNSIKLTHLGSLLGSSRSMIIDNFGTLYYVIPKFGAVVRCAKLANITAEGNEIIYITSKNIQQIFFTSNDALWVLSDRVLNAKDMCFPSL

SEQ ID NO: 16717 - DNA, 3490 bp, DROSOPHILA
cctgatgagccttgagatttatgtacgatgcaagattcccaatgcgttgcgactccctggttacgatgttgcttctttcgaacatcctgctgtcgaccgccgcgcatcctgcccagcggaatgatccgcgtttcaagcccggctcccttccctgcaagacgagcatgaaagccagccaggtggcctcgaaggcggccaaggatgcgaaggacgccaaggatgcgcagccatgtgccgcggagatggcgggctacagggcacgggaaatgctggcggacagggcgttgcaggcggccaaggctgcggaggcggctctcaacgggaagaagcagctcctcgatgaatacaccaaaagtctggcagaaacgaacagggttatcgaggaaatccaacgagccattgctgccagctcgtgctcggcgacgtcggcaaaggggatccgtgacaagctctgcacatccgtgaacattatgaagagtatgctaaaggaaatgggcggaaatctcgataacatccggaggatggccgacagtgcccagaaagaggccctggaaaagcgcagccttctgaaagcggccaggatgcgggtggaagagctccatagctgcatgtgcgaggctcagaaggatctggagcgaaataagcagagcgctaagaaggccaacgacgccgccaaggaagcacagcaacggatcgaagctttgcaaaaactggtgagcaggattaagatgctgaagcgaaaggatcttcagtcgctcgagaacttcctgcgcaggagaagaagtagcactccggaaaaaacaagttgagtttcttgtttgttatggcaataatcatatttatattttataaaatacaataaataagaacatatattcactttaaattttttccgcccgatatcagtgttgccacttgtcgcaaaataagtgaaaacatatcgatatcaaattaaatcgacgccgattcaataatcgattgttgctaagcaattgataggccacccctagtaagcggaccgcatttttttctgtgaaagtcagaaaaattagccgaaaaagactgtaaatatttattaatatcagccgaaaccgcacgcgaacaaatcgtgaacatggcgcgcaagaatgcccaggcggaggacctctccaacgtggagttcgagacgagcgaggatgtggaggtgatacccacattcaacgccatgaatctaaaggaggagctgctacgcggcatctacgcgtacggtgagtggtgtgtatacctatggccggtctagaactaatccagttttctgcactcccaaggcttcgagaaaccctcggccattcagcaaaggagcattacgcctatcgtcaagggacgggatgtgattgcccaggcacaatcaggcacgggcaaaaccgccaccttctccatctccatcctgcagagcctggacaccacgctgcgggagacgcaggttctgtgcctgtcgcccactcgcgagttggctgtgcaaatccagaaagtcattcttgccctcggcgacatgatgaatgtccagtgccatgtgtgcatcggtggcaccaacctgggcgaggatatccgcaaattggactacggtcaacacattgtgagcggcactccaggacgagtcttcgacatgatcaagcgacgagtgctgcgaacaaggtatgtttcattgtgcccgatcaaacaatattataattataagtacattttatagagccatcaagatgctagtgctggacgaagctgacgagatgcttaataagggtttcaaggaacagatatacgatgtgtatcgctacttgccaccagccacccaggtggtgctcatctcagctaccttgccccacgagatactcgagatgacctccaaatttatgacagatccgattcgcatcttggtcaagcggtaagcaatatgatgctcccccatatacgcagtatgattcataaattccattccctcacagtgacgaattgacactggaaggcatcaagcagttcttcgtcgccgtggagcgcgaggaatggaaattcgataccctgtgcgatctgtacgatactctgaccattacccaggccgtcatcttctgcaacacgaaacgcaaggtggactggctgacggagaagatgcgcgaggctaactttacagtcagctcgatgcacggcgatatgccgcaaaaggagcgtgacgagatcatgaaggagttccgagccggccagtcgcgagtgctcatcaccaccgatgtgtgggctcggggtatcgatgtacagcaggtgtcgctggtcatcaactacgatttgcccaacaaccgtgagctgtacatccatcgcatcggtcgttctggtcgtttcggacgcaaaggtgttgcaattaactttgtcaaatcggacgatatccgcatcctgcgcgacattgagcagtactactccacacaaatcgacgagatgcccatgaacgtggctgacttgatctaaactaatattctatcattacttttatgtaacgcacttttcctagccgtaacaacaaacgaatgaagtaaatacatttgaagagtatttgaatttcaatagacaaccaaaatctgtataataataataaataacacgtaagaatttaatacagaaaccagtttgcttttcaaatgggttaggagggctcaggggatgggtgatttacgtaagttcttacgtcaaggcgggcacttacaattaagaattaattgatgtttaagtgaggtgtgcacttagtaatattctttaagacttaacctattgcaaatgagctaaaaatggtcataagcctatttacaagattttatctaatcagatacctagagactttggttttggcgaatcaaaaagcgcgctataaacataatttaacactacaatctacgctcgtctggctcatctcagcttaaaacttctggcttttgcggcagcgctggaacgtacgagctggccgtcgatgttgttagtgaggattgtcgctgtttcttgctttcgtctgatttcagaagggtgcccagaacaatgccgaggaagagaatgagtcctacttggtggttcgatatgaactttttggcgcagtcgctggggttgtcaatgttgagggaatagatctgaaatgccaaatggatgaataagtgactttctgtaaggtaatataacaaggactacctgctgcaccagatgggcacccactactccaacagccgcgtagtacggcaccgtttgatcgcaagcccagccggcggcagaaagacccgtcagcattgctgccgtgaatcccgacagccagaccttggtgttctccccaaatcgaagtgccgtggacttcacaccgatctgcaggtcatccagcttgtcctggtgggcgtatatcgtgtcgtagacaatggtccaacagacgccggagaggtagagtggcaagcaggcggcaaggttgacactgccctgggtggcacaccag

SEQ ID NO: 16718 - DNA, 1314 bp, DROSOPHILA
ccacccctagtaagcggaccgcatttttttctgtgaaagtcagaaaaattagccgaaaaagactgtaaatatttattaatatcagccgaaaccgcacgcgaacaaatcgtgaacatggcgcgcaagaatgcccaggcggaggacctctccaacgtggagttcgagacgagcgaggatgtggaggtgatacccacattcaacgccatgaatctaaaggaggagctgctacgcggcatctacgcgtacggcttcgagaaaccctcggccattcagcaaaggagcattacgcctatcgtcaagggacgggatgtgattgcccaggcacaatcaggcacgggcaaaaccgccaccttctccatctccatcctgcagagcctggacaccacgctgcgggagacgcaggttctgtgcctgtcgcccactcgcgagttggctgtgcaaatccagaaagtcattcttgccctcggcgacatgatgaatgtccagtgccatgtgtgcatcggtggcaccaacctgggcgaggatatccgcaaattggactacggtcaacacattgtgagcggcactccaggacgagtcttcgacatgatcaagcgacgagtgctgcgaacaagagccatcaagatgctagtgctggacgaagctgacgagatgcttaataagggtttcaaggaacagatatacgatgtgtatcgctacttgccaccagccacccaggtggtgctcatctcagctaccttgccccacgagatactcgagatgacctccaaatttatgacagatccgattcgcatcttggtcaagcgtgacgaattgacactggaaggcatcaagcagttcttcgtcgccgtggagcgcgaggaatggaaattcgataccctgtgcgatctgtacgatactctgaccattacccaggccgtcatcttctgcaacacgaaacgcaaggtggactggctgacggagaagatgcgcgaggctaactttacagtcagctcgatgcacggcgatatgccgcaaaaggagcgtgacgagatcatgaaggagttccgagccggccagtcgcgagtgctcatcaccaccgatgtgtgggctcggggtatcgatgtacagcaggtgtcgctggtcatcaactacgatttgcccaacaaccgtgagctgtacatccatcgcatcggtcgttctggtcgtttcggacgcaaaggtgttgcaattaactttgtcaaatcggacgatatccgcatcctgcgcgacattgagcagtactactccacacaaatcgacgagatgcccatgaacgtggctgacttgatctaa

SEQ ID NO: 16719 - protein, 399 aa, DROSOPHILA
MARKNAQAEDLSNVEFETSEDVEVIPTFNAMNLKEELLRGIYAYGFEKPSAIQQRSITPIVKGRDVIAQAQSGTGKTATFSISILQSLDTTLRETQVLCLSPTRELAVQIQKVILALGDMMNVQCHVCIGGTNLGEDIRKLDYGQHIVSGTPGRVFDMIKRRVLRTRAIKMLVLDEADEMLNKGFKEQIYDVYRYLPPATQVVLISATLPHEILEMTSKFMTDPIRILVKRDELTLEGIKQFFVAVEREEWKFDTLCDLYDTLTITQAVIFCNTKRKVDWLTEKMREANFTVSSMHGDMPQKERDEIMKEFRAGQSRVLITTDVWARGIDVQQVSLVINYDLPNNRELYIHRIGRSGRFGRKGVAINFVKSDDIRILRDIEQYYSTQIDEMPMNVADLI

SEQ ID NO: 16720 - DNA, 6034 bp, DROSOPHILA
ttataatctgcaagatgaaattgcaactttttaattgaaaataattggataatggaaattgaaccgcatctgtgcgaagcttttcttgttgagtgacgtcaaatgaaaatccctttgagtgtcaaatagctcgacttttattctgtggcaatcatgagggattttggccaatttgcgcagtgcctttcatttatttgtatttattttaaagaaatatgattacaagcctggtaacttgagcagaattaataacctatctatacacatttgataaaaaatgaaaatgttataagttcattaatgacgcatttcgacccttcttctgtaattaagattttaaatgatttttgagggagcgcccagttttgtttgagctgtgtacaatgtttgccaaaggagcgttttgaaaagcactacattttttgtagatatatgataagaagacaaactgctcgtttgagtaatataatatttaagcaaaatttaaaaaaaaaatagcctgatattttggtttaatataaccaatgaaacaaacaaattgaaatcgaatcgatgaccgcttcctatgaatcaaaagatgattattgaggtttagatggctcatttaaatatcaggttcgttgggttgtaagtcatttacgcatttccgtatggggcagacaacattctagccgtgcacttgactttggcaacccgcgccacccgctgaccttcaatgaggaggcctcacagcaaacccatgggagggcaaagggaacgtgttaagctgccactgccacaaatgccctacgaatgtgccgaacacttgggtttgttggggggggggaaagcactcacagtcatgacatcatcggggtcagggcacgcaattggattgggccaggggattgggcttggaagtggggataatgggaatgggaatggaaatggggagcacattagctacgaaaatctgatttttcattggctcactctccgtttctgattctgtttttcgtagatatgcggcctactactggaaagtgtcgcgtgaaggtcgtcgggtgtacatggactactactacatggagaatggcaagcagatctatggagtgcccatcggcggaattggaggtggtacgattggcaggggctatgccggcgagttctgccgtttccagatgcgtcccggcatctacgagtacaatgtggtgctggccaatcagtttatcgttaccatcaaggatcccaaaggatgcaccatctttcagagcctcctctcgaagtgcaggtgagcatatgactttcgaccgatctgtctcgcattctatcccttttccatcgcatttaagattgttttaagttttacgattattttctctgcatttgttttccacttcaattttccgtttgttatgcgtgattcgtgttgcttgcatgttttgaatttatattcagctctataaaatatatgtatatatcctttgacggctgccagctgaaacttcttccatttgctgcatttacatatgtatatctggttggattttccaattgttttctatgaaaatagaacattttgatgtagtttaacctagaattgcatatatagaatgacatacgatttgaagagaagagacctttgttttctttggctgtatactaaataagtaataataaatataacacaattattgacaaagacatttttaacacttttgataaaaattcaaatactttctcattgaaattacatttaaaatggtaatcacacttgatatacaaatgaatgtagtgccctcttccttaaattattagttatttttatcgctttagtttgtttactgaatttacaacattcttctatcgattcacccattcgtgcactttgatttgttgtaaaacattctccaaaccccagaaagaactttaacagactctactgcttacaaccaaaggaatcccactactgacctggtctttttccgtaacacccactttgtagtgtgtaaatatgtcttcagcaaaatcctctaaccaaaatgtgtgagctttctataaacccagatcacttcaaccgctaaatccttaaaaataggtgttggttcctttgtaactaaccaaaatataaaaaaaccaatctgtgagatacaaaaccagtttcgaatggagataacaacatcaaaattaaatatttttctctaattcttgatgcacacataaaacgaattataaaacacgccactcctatcgacaacaatcaccacatggatatgttgaacaaacaaaccaacgattctgggttattttgggttatctggcgcgacaacaatgattttgtaacgatatggtatatatatggtatatatggtatggtatgatggacgttttaccttggttttctttcttatgcactttggtttcgatttggttttgctttattgctttgccactaccgcgcaatcacacacacccacaccatgtccatccagcaccagggacaagaccagcgatccggatggcgatccggatggggaaagaactaaatgtcaactgcccaattgcagcagtcgcgccaagcagccgctgagtgcctggcactcgaacatcgaggacacgcgctgcagctacacgggtctctatcctcgctcctggacggagtacgatctgtcccactatggagtccgtctgacctgtcgccaggtatcgccggtaataccgcatgagtaccgcgagtccagcctaccgtgcgccgtcttcgtgtggagcgtggagaatgtttgcgaccaggagcgcaaggtgtccatcacgttcactttcaagaacggcacagggaacaagaaacaggatgcggagggcggagccgagtcgcagctaatcagcgagggcaacgccaagggagtctccatcaggcagaagatctctgagatgccctgcagttataatctggcatgtagggtccttcccgagatcagcatcacgcggtgcccccagttcgatccggccggcaacggtgagcagttgtgggcacagctcaaggagcatggccagcttagcgagcatcccacctcagaggcactaaaaagtaagttcatccctattaacgcttattattaatgtcaataatgaattgtttcaatatccaatctagccaaagatataggcgtggctgtctgtggccaggtggccctgaagccaatggcatcccacgatctggagtttgtgctggcctgggatatgccaaagattcagttccccaggaagatgcagacccatacacgctactacaccaagtacttcgatgacagcggtgattccggtcccaggatctgcgagtatgcactcaggcagtattccacctgggagcgattgattgatgcgtggcaaagacccattctcaatgatgagtaggtttagcatgtgcgctgcttccacagagccaattttcatcatctactttctagaacccttcccgactggtacaagtgtgccatcttcaatcaactttacttcatctcggatggcggaaccatttggttgaaatgtgattcttcgctgggcaaggaactggcttatgatgatccccgactggcttatggccgtttcggttacctggaaggccacgaataccgcatgtacaacacctacgatgtccatttctatgcatcgccggctctggcccacctgtggcccaatcttcaggtcagtctgcagtatgacttcaaggatgccattgccgcagaactaaacgatactcgtaaaatgctttacgatggcaaggtgatgccgcgcaaggtcaagaactgtgtgccccacgatctcggggatcccgatgagggtgagttgaagcaaaggctctagaatataatcttaagtaataatatatgcattttccagaacccttcaccttgatcaactgctacaacatacacgatgtgaatgactggaaggatctcaatacgaagtttgtgctgcaggtgtatcgggactactatgtcctcaatgaactggcccaggcccagtcggataatgcaagcaagttcagctccatcgagtttatcgataaggagagcctttatgagctgtacagccaggacaacaagcgcaagaattcagctgatgaaaagcaacgtaagttaacaacaattcttattagtttcctatgaactggaacaacaaactttggctcttgtagaaaaccgtaaatctgcatcgatgtacatcaacgaaaccaatggaaaggtgtatctaatggatgccattggctacttgaaggccatgtacgcatcgtgcaaggccattatggagcgaaccattgagtacgataaggacaacgacggtctgatcgagaacacaaagatgccggaccagacctatgactcctgggtgatggacggaccgagtgcctactgctccggtctctggctggctgctctgcaagccatgtccgccatggctaccattctggaccagccgaacgattgcctgcgctatcaggatattttggagaagggcaagcgatcgctggaggagaagctctggaatggcagttactatcgctttgatctttcgcacagtcatcgggatacgatcatggccgatcagttatgtggtcattggtatctaaagtcctgcggcttcgattacgagatctatccgaaggagaatgtgcgtactgcccttaagaggatctatgacaacaatgtgatgggctttcatgagggcaatatcggagcggccaatggcttcatagccaatgccagcgaacccaccaagccgggtcacgtggacaacagcaacatccaggcggaggaggtgtggccaggagtggtttacgctctggctgctaccatgatacaggagggcatgttcgaggaagccttccagaccgccggcggaatgtacaagaccctgtcccagcgcatcggcatgaatttcgagaccccggaagcgttgtacggtgagaagcgctatcgctccattggctatatgcgtccgttgagcatttggtccatgcaggtggcattggagcgacggcgagcccaacgcgactaagtcgagagtacaatctaatccgaagtctacacaaccaaagatatttctaagccagcacaaagattttcttagcgtttagttcgattcttcttttgaggctgaatgtgtaacgagcttatcgagatggtgcgagtcgaggaagatgttgtctctgaagtggttttcaaatttatagctttatctgtacttttaagctgtggaatctgttggcgcttactccatgtcttctctagctttaaagccagtcacaaatcaaactgctactctctgttgaagtacaactacgcaatggtattcaaatggagcacaagtcgtatttagatgttagctaagagaaatatttaaatcaattataaatgttttaattaattattaatgtcataagcatatatgtatttcaatgtgtaagcagttgctgtctgcaataaatgtgaccgagttgtcagaaataatttatttagagttgagttattcgactatcagatactcattactcagctagtgggggtgtcaaaacgttggaaattgggatgttgccaaaatagtggaaatagtcaagtcaaatgataaaattagttgtgcaattgtaaatatttatttgtttcgattcgctgacattatttcatcgatagcatttaagatccattcacggaaatatgggacactagtgtagattgaactatacgtgcaatcctttgtacccccggatacaacacccacaagttgttggtcaaacaccaacggtccaccagagtctcctttacaagccgcccttccaaaagatccggcgcatattcttgacggttcagttaatccacaatagtacggccattgaatgtaaaggtttactccttgaagatcgatgggatgtgagtaataagaagaacttccccagccagagacgaaggcaatcgatccaggcgggggatttgtcttggccaatggaatgggctgaacttggtttgtgaactcaagtggcttacttagccgcacgatggcg

SEQ ID NO: 16721 - DNA, 2587 bp, DROSOPHILA
atatgcggcctactactggaaagtgtcgcgtgaaggtcgtcgggtgtacatggactactactacatggagaatggcaagcagatctatggagtgcccatcggcggaattggaggtggtacgattggcaggggctatgccggcgagttctgccgtttccagatgcgtcccggcatctacgagtacaatgtggtgctggccaatcagtttatcgttaccatcaaggatcccaaaggatgcaccatctttcagagcctcctctcgaagtgcagcaccagggacaagaccagcgatccggatggcgatccggatggggaaagaactaaatgtcaactgcccaattgcagcagtcgcgccaagcagccgctgagtgcctggcactcgaacatcgaggacacgcgctgcagctacacgggtctctatcctcgctcctggacggagtacgatctgtcccactatggagtccgtctgacctgtcgccaggtatcgccggtaataccgcatgagtaccgcgagtccagcctaccgtgcgccgtcttcgtgtggagcgtggagaatgtttgcgaccaggagcgcaaggtgtccatcacgttcactttcaagaacggcacagggaacaagaaacaggatgcggagggcggagccgagtcgcagctaatcagcgagggcaacgccaagggagtctccatcaggcagaagatctctgagatgccctgcagttataatctggcatgtagggtccttcccgagatcagcatcacgcggtgcccccagttcgatccggccggcaacggtgagcagttgtgggcacagctcaaggagcatggccagcttagcgagcatcccacctcagaggcactaaaaaccaaagatataggcgtggctgtctgtggccaggtggccctgaagccaatggcatcccacgatctggagtttgtgctggcctgggatatgccaaagattcagttccccaggaagatgcagacccatacacgctactacaccaagtacttcgatgacagcggtgattccggtcccaggatctgcgagtatgcactcaggcagtattccacctgggagcgattgattgatgcgtggcaaagacccattctcaatgatgaaacccttcccgactggtacaagtgtgccatcttcaatcaactttacttcatctcggatggcggaaccatttggttgaaatgtgattcttcgctgggcaaggaactggcttatgatgatccccgactggcttatggccgtttcggttacctggaaggccacgaataccgcatgtacaacacctacgatgtccatttctatgcatcgccggctctggcccacctgtggcccaatcttcaggtcagtctgcagtatgacttcaaggatgccattgccgcagaactaaacgatactcgtaaaatgctttacgatggcaaggtgatgccgcgcaaggtcaagaactgtgtgccccacgatctcggggatcccgatgaggaacccttcaccttgatcaactgctacaacatacacgatgtgaatgactggaaggatctcaatacgaagtttgtgctgcaggtgtatcgggactactatgtcctcaatgaactggcccaggcccagtcggataatgcaagcaagttcagctccatcgagtttatcgataaggagagcctttatgagctgtacagccaggacaacaagcgcaagaattcagctgatgaaaagcaacaaaaccgtaaatctgcatcgatgtacatcaacgaaaccaatggaaaggtgtatctaatggatgccattggctacttgaaggccatgtacgcatcgtgcaaggccattatggagcgaaccattgagtacgataaggacaacgacggtctgatcgagaacacaaagatgccggaccagacctatgactcctgggtgatggacggaccgagtgcctactgctccggtctctggctggctgctctgcaagccatgtccgccatggctaccattctggaccagccgaacgattgcctgcgctatcaggatattttggagaagggcaagcgatcgctggaggagaagctctggaatggcagttactatcgctttgatctttcgcacagtcatcgggatacgatcatggccgatcagttatgtggtcattggtatctaaagtcctgcggcttcgattacgagatctatccgaaggagaatgtgcgtactgcccttaagaggatctatgacaacaatgtgatgggctttcatgagggcaatatcggagcggccaatggcttcatagccaatgccagcgaacccaccaagccgggtcacgtggacaacagcaacatccaggcggaggaggtgtggccaggagtggtttacgctctggctgctaccatgatacaggagggcatgttcgaggaagccttccagaccgccggcggaatgtacaagaccctgtcccagcgcatcggcatgaatttcgagaccccggaagcgttgtacggtgagaagcgctatcgctccattggctatatgcgtccgttgagcatttggtccatgcaggtggcattggagcgacggcgagcccaacgcgactaa

SEQ ID NO: 16722 - protein, 845 aa, DROSOPHILA
MDYYYMENGKQIYGVPIGGIGGGTIGRGYAGEFCRFQMRPGIYEYNVVLANQFIVTIKDPKGCTIFQSLLSKCSTRDKTSDPDGDPDGERTKCQLPNCSSRAKQPLSAWHSNIEDTRCSYTGLYPRSWTEYDLSHYGVRLTCRQVSPVIPHEYRESSLPCAVFVWSVENVCDQERKVSITFTFKNGTGNKKQDAEGGAESQLISEGNAKGVSIRQKISEMPCSYNLACRVLPEISITRCPQFDPAGNGEQLWAQLKEHGQLSEHPTSEALKTKDIGVAVCGQVALKPMASHDLEFVLAWDMPKIQFPRKMQTHTRYYTKYFDDSGDSGPRICEYALRQYSTWERLIDAWQRPILNDETLPDWYKCAIFNQLYFISDGGTIWLKCDSSLGKELAYDDPRLAYGRFGYLEGHEYRMYNTYDVHFYASPALAHLWPNLQVSLQYDFKDAIAAELNDTRKMLYDGKVMPRKVKNCVPHDLGDPDEEPFTLINCYNIHDVNDWKDLNTKFVLQVYRDYYVLNELAQAQSDNASKFSSIEFIDKESLYELYSQDNKRKNSADEKQQNRKSASMYINETNGKVYLMDAIGYLKAMYASCKAIMERTIEYDKDNDGLIENTKMPDQTYDSWVMDGPSAYCSGLWLAALQAMSAMATILDQPNDCLRYQDILEKGKRSLEEKLWNGSYYRFDLSHSHRDTIMADQLCGHWYLKSCGFDYEIYPKENVRTALKRIYDNNVMGFHEGNIGAANGFIANASEPTKPGHVDNSNIQAEEVWPGVVYALAATMIQEGMFEEAFQTAGGMYKTLSQRIGMNFETPEALYGEKRYRSIGYMRPLSIWSMQVALERRRAQRD

SEQ ID NO: 16723 - DNA, 12768 bp, DROSOPHILA
caattcgattgaaaaacttgttccagtttttgtggggttgaagaaagcggggacataatttagcacttatctgaccccaggcagccctatccaaaacaatcaagagcacccggcccctccagaagttgccatttgcctgttgccatttggtattgtgctttatggcttttctatgcattgaaatggcaatcgtggacaatgcacaggactcgggacacaggacacggggcaaaggacacgaagggaaacaactatgcacaaagctggaacaaaactttttaatgtcacttaattaagaacaaaaattctgcgcccgggtgtcagtcgggcatttagtctagactggtttctgctgttcagcggaatccattccggacattctgagctagaagagcctgcatttcacaggtaatctgacagtcgtttcccttattactggtgctgacgctattgaaaataattaaataaaggctgcaggatggttgcacaatgtgcactgattatgcgcctgttgaaattctgcgactgtcaaggggcttttcatcgatgtaaacaagttgagatattcaacagttaattaatattttaaatggccagttttttataagtatttttcagtgctagagtggcagtgatatttgatgggcaatttactgtgaagaacacgaagtttcgtttctcttgacgtggaggaccaaagatgattggctgcatcaaggggttttcgtgtggcaccttgcatcgtcactaccaaaacgcactgctccattgacctgacaaacagccagtcaccagataagcccactttccgccgcctgctgcacttgataagacccgtactctccccggttcaatgtttgtcccagtccaagctaccggagagtgatagctgcttgactgataacactttgagagagtccaccgtacaccaaattttaatcgcaatcgcaatgaacacttacaattacacatgctcgccccacattatctcgaccagcgaccaaggcggtcagtccgttggttcgccgcagtagaaatcgtcgggcttaacggttcggttccgtgcgcgttccgtgatttgtaatagctccttaaaaacacatcccctctaactcgattcccaaaaatgctgcaaaacagtttcaaactggcccagagccttcgaaacggcttctacagaaacgcctggcgagcgttcagctcccacggaccccggcagccagtgagtgatgtttatataagcacagtgcgatgacagtgattttacgacctaatgctacgtctggtggcgatggaaaagttcttgaatgcaaagtccgtctcggttttgtgctagtcggaatggacctttggatgatgatcaatccttatcagttctttgtgtttaggtggggagaatcatttgtgcagtggcgaaactggttggaaaattgttcagagtgggagtctgtgtccttagccacaaaggaaaattgtccattatcaaaattgatgattataaaatagaaagaattattaacctgatgaaaacgaacattcagaaaaatgtatatttgaagtgccctctaaggtccaccctattaagcagacttacatatgcacacacagagaaacatattttattagctattaaaaattgacagtatattgaccgataagcgtcgattaatgtacatttcagcgaagaaatttatgacagcccgagtcatgacgactgaacgtgaagccattgtctgggagattcaggctccccagatacaccgaacacatgcctttagtaataatgagcaacaagcggcccttctcagtctagtgctttgttttgattgcataagcttttcaacagcttctgctgattgggggacaccctatgcctgcctgctgaaaattttccctgccacttatgtcttatcagagccacatcgaagaggcaaaacactgttgtgcgatttaactttaagttctttatggccgaccgacaacagcttgaaagggttttggagtaaccctaaaccaggtcataaactggggcaaatggaccgtcaaaagcggggagtcaggctaattgaatgaccatcgggcgaaggactcccactcatcggagctgtaaatcatttacagtttcggtctgatttccactgacatgaaaaccaggcgattgtcgagtggtggggagtgggaaaagtgcccgacaagctgataaaatgttgtcacagcttgacagctggtggaccgccaggactattgggtcagcaaatgcaaaaacgtgttcaaataaattctaaaagtgtaaatattgtattttcacacaacaggagggggaaaagggaaatgaaaggcagggcttcgcaataaacttaaaacccctttaaatatgcaacaacactggtgacgcttgccctcaggcaaggactgcgagtgtgtcctgcccccgggctcccccttcccgtcaccgccgcatttgcatatgtccaacatcaggcccagcctttgacactcaaaacgatttgcctaggtcagggtcgtggagcaccctttacccgccaccccaggccacccaggcatcccttccaagccacaccattcccatgcggcgccacctccccgttgactcacttcattttgacacgtgttggcagttatggcgcctttggtcctggtctcgactctctttcaagctgtgcgtgtgtgaggcacatcataaaaagtctatcgaaacaagcaaactatatgcatccgacaataagataccctgcgcacgattcatgtgagcaatgtaaagctaagaagaacacttcgtcttatgcccaagaaataatgcatatatttcaaaaaggtttccaattgcattatagtttatgcagctgggtgatgtttctgttatttgaaaatataggaaacaaaatgtttttatagtctaggcttctggtggtcatacccatatacacaacatttagtgggcataagaatcgctttgaagcagtttctcaaaatccagttagaaataacgtgcacattaagttaaataaatgagtatactttctcaatgcatttgtcaatgtaccaactccaagacctccagacctttattacccattagttagctgtataagtggaacttccaactttcagggctgtgatggccaataaactacaattactatttacattgcaaggcatttaatgctaatatcataactaaatgaggaagagggctaataccgtttaccttaactcagtactgggttacctcaacttctacaaagtttatattttgtgttaaacttactccgcgcattttatttcccaaaatccacaaattcgttgggtaatggttaataaatatacatagttcattgtacttgtcattggtcagttataataacaaaactattttcgggactcacacttcccgttaaactctagcttaaacttgagtataagttctcttgcctctaatactcccatctactgctgtacgagtaccaggtataagtcaaacaaaaaatgtcgtgtaaacatgaagcactgggaaacacgcgtgtagcccatcagaaatggcagccagcgaaggggcgacatcgtgtcaggggatccactaacatcattcccgaacatctgtcgagggctgccagaaatcgtcaaagttgggccggactgtagataagtgtgaagcccgcgaggagccagaactcatgtatgtggcagcaccagcattaattgctcagtaattacacggactgtcatcgcatttgacaggcctcagacacgggacggaaggggcagaagatgtggcagtcgattccggtcactatctgcacttcgattagaaaaaaatcgaaatgggagccgaggtccgaggcgactcctgaccttcgactaattgcattcgatatcacgcatacgccatgagagccgggaaaacaaaattggttccaccggcggttttcagccagacgcagtcgtaaaaattattggtcgctttgcttttggatttctttgcgatagtgctaaaaacttgttttgtgataaggcacgggcgaacaattaaaccaagttaacaaacagagcattcttgattgtcgacgggtgcttttattgagctgcacttgatacttgccatcagaattgtctgacgaacataacgaaatcaaaatatttacgcctcaatttgacttgatttttctgaaataatcgacacgacaaacgcgacgagttctacgtacaaaaagccccgattggatgttattgcgcgtgaaaggcaatcgaagcccccgcccaaacaaaccgatggtactggggccaaaaagaaaaaaaaagctaataaaaatacttttgattgatggacaagcgaggtgggatgatgaactgcatctgttggggtaggaaaaacaaatttgctgtttactctcttgttttctgagcagttatctcctcaacgcgctaatcttatcctccttcggtactctattgaaaggatattttgatattgtttataaagtcgtctttttcttaattgcttttgaaaaatacattgatgaattgaatgaagtaaaaaaatcatccgcaaatatttgttaataatttttcaattgaaaagttccctgaaagagtatataacctttagggcttaaattaaacaaatattatcgagatttctctattaagatttctcgtcgataattttataataaataatcgtttttcttatgcctcagttcaggactctggagaaaactttttaaagtttattttccacaaatcaatatgggttttcatttcggtatttaatcttcagaatactgaatacccagaaggcaggtaaaaatttttgaatttaaggttaaagccgttatcatcagaggacgtcgtgtttaagatcggattatgtggtaatgatccaatgttgcaattgtgcaattcaattatgcactgcgtgtcgggctaactgacttttggaaaacacgccgctggcttaaaaaccaattaacacacaacgattattaggaattcgaaaagagccacgccagggccagggaaagggaattcgggattgcagttttaagtttagctgattacgcactgattaggtgcattcgacggggaatatttaattaattggattgcaatttatgcctcgatttgttgtttttatggcttactcttctgctgtcgcaatttatgacctcccttagctctatggctttgccgattgaggcgataagacaccgaaatggccccgaataagttgctttatgtttcgacctgtttcagctggtttcgccggagcggcgcttggaaaaggcgcatccaaccttcacggaaaggagtcagttgaagtacgcccggaggctggtggtcaagttgggcagtgcagtcattactcgagaggacaaccatggactagccctcggccgtctggcctctattgtggagcaggtaggcattaaatattttttctatctatattttcagcaggaaaagtaacaactggcacaaagtcatattctaagatattattacatgcgtatcttcttcaattcttcacccaaaacctcgataggttgccgagtgccatttggaaggacgtgaagtgatgatggtcaccagcggagcggtggcctttggaaagcagaagctcgcccaggagctgctcatgtcgctgtccatgcgcgagacactaaacccaaaagatagcaaagaggtatctgctggaattagccaagtttgagcataaactcaaatgttttgctatcccaaattagtttgacggcgctacgctggaaccgcgagcagcggctgcggtgggtcagtcgggtctgatgtccctctacgacgcgatgtttgcccagtacggcgtcaagatagcccaggtaagcccaggagaacatccatcagctaattagaacacacagatttaagcgagatgatgactgttcgggtgtaggtgctcgtgaccaagccggacttttacaacgaggaaacacgcaacaatctcttctgcacgctctccgaattaattagcctgaatattgtgccaatcataaatactaacgacgccgtctccccgccaatgttcatacgtgacgacgagccagccggcggagcccggagggtgagtttaattctggagtgcggggatgccgtcgtgtgaccaggtcttttgttctagggtattcccattaaggacaacgacagcttgtctgccatgctggccgccgaggtgcaggcggatctgctaatcctcatgtcggacgtcgatggcatctacaataagccgccgtgggaggacggggccaagctgatgcacacatacaccagcgacgacagcaacagcatcgagtttggcaaaaagtcaaaggtaatccagcctcgtcctctgtgttcataacccatttatctgaacacccacaggtgggtactggcggcatggactccaaggtgaaggcagccacctgggccctggaccggggcgtcagcgtggtcatctgcaacggaatgcaggagaaggccatcaaaaccataattggcggccggaaggtgggcaccttcttcacggaggccaccgagagcgccaatgcagtgccagtcgaggtgatggccgagaacggtgagtggaccgcagggcaaatggcttataggatgacaggataatgacggagaatgatgtggccagacaatgaaaagaggtttagtaagggctttcagctctcaagtagggcgcataattagcggttttggaaacgagcttccaagcacatcgatggccaatcaaccggagcggggtcctaagccggggtccagctagtacagatagtaacatttagtgacgcccaacttgcaagatggtaacggagaatgacaaggcaactggtcgttagaaggccagcaggaggatgcggcaaggggtggcaaaagtagaaagtgggtcagctagaactgggtctgctgaagaatcctaggtggtggtgcggttctgttgctatttcgagtgggcgaaaataatttaattgttattaaggctaactgcagcagctgggcgaaagtgcctgttaattaggcggatgcaacttgttgtcccagacttaccctctgtattccccttttttcagcgcgaaccgggagtcgccagatgcaggccctcacgcccgctcagagggccagtgctgtcaacaccctggccgatctgttggtgagccgcgagaagtttatcctggacgccaatgccaaggacctggccgaggcgcagaagagcggactggccaagccgttgctgtcgcggctctcgctcaacccggccaagctaaagaacctctccgttggcctgaagcaaatcgccgaggacagtcacaaggtaggagaacttaattattggccactttccagagtagtggccaagggacctgccctggaccagggcctggacatggacctgagttcgagcaaattgcatttgttgcagtgtcgaaaagtcagcgccaaattgagttagctccgggctgggatttgtctgcctgcatgatggcaaaatggcaaactggcaaaatggccatttcatgagctgcaacaaaggcggacttggagagccatatgcagtttccaaaccttaacagcattatgaaatcttcgagcaattttacacttcaacaaaaattgacaccccagtcagaagggatgctcgacttgctggtgacctaaccaatccacccgggaagtagccactgaagcagccttaaatgcccggaagttttcgggatggggctggagctaagcaagtggaagataaaggacactttcttgtatgcgcactcgtttggtgtcttgccagtgacattagcccgcatcctggtcctgtttctggtcctggccctggccctcaccctgcccttgtcccattttagagcagactaagttgatcgaatatcgcttgggaggtatgggggttggaggtccgggggcttgagtttggtcctcccaagccaaccgttttattggatgtgattgtgcggaaacgcagaaagttttccttcatgtttttctctagaaaaaaactttttcgttgggttcaggggcgggtcgtggagctgggacatgagtttattgtaaaaatggcaagcgaaattgtgacacaaaatggcggcagcgtgaaaaatcataaaaaggcgagcgcgcacacactcataaagaagcgggctgggaatactgaaaaaccataacgcactcaataaatgtcgctcgggtggcgaaaagtgttgtttgttttttgtccctctttttgtcctttttatcctgcgacaaacaaatgccacgaacatggtttggcctctggcccacagaagccttcgtaagttggataggtgagtgtcctggcagtgcttcggttttcaattacccgggctacttacgcatcgcacgaaaagttttaatacacaattaatgctgaataattcaatagtgttaggccggggcactttggagatacactgagcttgcttaacgaaattgcttttcactcttttttccatttgcagtgcggacttctcataaagctatgtattcccaacatatttcagttccccataacctcatccaacttttccttggatacttgtacataagctcggctccactacttgctctgacttatccaattgtcctttgcaaatataatttaaagtttgacgtcctgcaatgccggagtcaataataatggccatataaccaaatttacccagcgcccgactcgagtttaatggctaagcaagagcaggaggaccactccatccccattcacatccattccatccatactatgtaaacaaggccagccaactgctgtcagcagacgtccagcccagaccaacccgcaatctctttatgttatctgcagccaattttctagagattcttcacgacgcaggaggaggaggaggaggaagggccctctcaaggggcaggtcagcagaagtgcgggggcgttggacagcaggccattaaaaataaataaagattacgacgcgctgagcgacttgatttatgtaacgcctcaaaatggacgccggggaatcgagatgcggtggaaggagaagccttccgattctccttgcgaatgaaactgtcgcataaatatcgagttatttttatgtcccggtcccacatggcgtatgcattatgcgatttatgctgacttgtgaattgactttccctgcccatgctccaccccaataataatatacaatatatccctcattccgtatctcatccggactttcttttcttgcagaatgttggtcgtgtcctgagacgcacccgccttgcggatcagctggagctcaagcaggtcactgtgcccataggcgtcctactggtcatcttcgaatcccgcccagactcgctgcctcaagtggccgccttggcaatggcctcggccaacggactgctcctcaaggggggcaaggaggcggcacacagcaacaaggcccttatggagctggtcaaggaggcgctggccaccgtgggagcggagcacgccgtgtcactggtgagttcgattgggacacatgatgatgaacgtgacttatatttcaattaattttgcttctccattaaaggtttccacgcgcgaggagatcagcgatctgctgtccatggagaaccacatcgacctgatcattccgcgcggctcctccgacctggtgcgcagcatccagcagcagtcgctgcacatccccgtgctgggccacgccgaaggcgtctgccacgtctatatcgacagggatgcggatctggagaaggccctgcgcattgcacgcgacgccaagtgcgattatccggctggtaggctaccacccactcaattaacccataaagccggttgcagctgtccttcgtttcagcttgcaacgccatggagaccctgctgatccacgaggacctgatgagtggcgcaatcttcggcgatgtctgcaacatgctgaaacgtgagggcgtcaaaatctatgccggaccccggctgaaccagcagctgacatttggcccgccggcggccaagagcctgaagcacgagtacggcgccctcgagtgctgcatcgaggttgtgcccagcctggacgaggccattaatcacatccatacgtacggcagcagccacacggatgtcattgttacggaaaatggtaacgaaatgttcgaaaattgaaaattaatttcgattgccggcaatcgaagctgaaaagtggtctccaccattgggagcccccttgttgtacccattccactccgattagattggggctttgtggggtaatgagaattgcatacggctgtcgaaatggtcatcataatggctattgctgcagttggcttgaaattggtgactgcgcgttagtaggtagaatgtccgattttacgtgtgacataggctgggcttccaacaactaaaattgcatctaaaaatgtgtatgtaaaaaatgagacacctcttatgtgttagtagaggaaatagcgtgctaactgcttatgaaattccttagcacgtagttctggtacccaagaatacttgcggtaatgtatccgcttataagaacatcttttaaattttcactctttctcatcacaacattatgtaatagtttgaaggtccgtaatgcacagaagtgtcaaattaatatttaattttgttttcaagaattccagtgctattattttaaatggtagtatttacttgagcgtacattttcgtccgggggaaggcatgaccacttcatactgccaccagtaattcaatttggccctcaatgccatgcaaccaggtacttcttcagcggttcagccattccgacttgaaaccaaaaccaaagccgaatcctaattcaagtcgggcaagtttagcgtgcaaacttttgcatgcatgcattctcagccattttccccattccccgcagctcaccacaacaaatttaaatcatttgggaaattaattttattcaacacttttccccgccgcactgccactctgccacacttccatacttccaagtgccgtagtgccacaatttgtgcagtttctaaatttccacacacactctcccccgctttccatttccattcgcagatgcggcggccaggcagttcctgggcagcgtggacagcgcctgtgtgttccacaacgccagctcccggtttgcggacggtttccggtttggccttggtgccgaggtgggcatctccactgcccggatccacgcccgcgggcctgtgggagtggaggggctgctgaccaccaagtggatcctcgaggggcaggaccatgccgccgccgacttcgccgagggaggtggccgcacgtggctgcacgaaaccctgccgctggactaaataaccttaaactgaactattcttagatgtagcataccgaatcgcgttccaaagtagagtgcactttcgtcatcttttagaggagtgcattttgagcgaagggtaattacgtggggataagtggatccggatccgaatcccaatgtggatgagggcgaggacaaggatgtgcagctccgatgacagctgccgtcgtggccacatgggatatattaatttgagtgaaaaatatttgcagagacaacttgtgtaattaataaagtaagggagagaaagtgggcgaaggttgttcaaactgtcagcccttgtcttgggccctcaaagtttgcagcgaaagttccgcgctgcagatgggggatacaagaaaataaaattaactggaagaaagctggagaaattgcgctttaagtttcaatctctcgaaaatatgatgtactttataaacgggtattcctattacaaatcataaattagccatggaacgtgcaatccagctaagcatagttctgccccgcggctactcggaggcgcctccagcttggaatgcaaccgcgtggcaagtattttaatttttctgtgcactggagcaagtttcttaggccagctcaacacccctcgctccctctctccgcccagaaacttttcgcattgcgtgctggccggaggaggcgtggaggtgccgcaggtggagctgtggacgggcagggctttgccatttggttctgccaccaaaggtggctccttcgtcctgtcaacgcgctaactttttcgccgaattttcctcttgaaacttcaagctaaattgatgttggggtcagacagcaagggtgcaagggaaaattgagcagtaccaaaagcgcagaatggaggtaaatctgtctatatttacttgaagaaatctatgtgtaatctattaatatacaaccgaaaaataaccaaaatatgatttccaaaagggcactcttatttgttgatcgaaacaagaccttctaagaactaattaagacttacttagcactgattacaaatactatctgcccacttaattgatccgatcccatgccacatttagctgtgaactgaaaaagttgcaatatatcgaagtattcagagctcctccacccctggatgcggttatctactgagtcggaggaaccacaagtccctgctggcgggcattatttttacctctttcaactactcgacgcgcgtacgaccaatgatacgtggttggtgtccgtacctgatccgcaaggtggtcacgtaatgctccgcagttggcgagcacttggcaaagttaacgggccaaagttggagctcagaagtttgctcctttggggaatgcactcgctgcagtaaaagcagagtgcatgcacctcctcggatggggca

SEQ ID NO: 16724 - DNA, 2849 bp, DROSOPHILA
ccaaggcggtcagtccgttggttcgccgcagtagaaatcgtcgggcttaacggttcggttccgtgcgcgttccgtgatttgtaatagctccttaaaaacacatcccctctaactcgattcccaaaaatgctgcaaaacagtttcaaactggcccagagccttcgaaacggcttctacagaaacgcctggcgagcgttcagctcccacggaccccggcagccactggtttcgccggagcggcgcttggaaaaggcgcatccaaccttcacggaaaggagtcagttgaagtacgcccggaggctggtggtcaagttgggcagtgcagtcattactcgagaggacaaccatggactagccctcggccgtctggcctctattgtggagcaggttgccgagtgccatttggaaggacgtgaagtgatgatggtcaccagcggagcggtggcctttggaaagcagaagctcgcccaggagctgctcatgtcgctgtccatgcgcgagacactaaacccaaaagatagcaaagagtttgacggcgctacgctggaaccgcgagcagcggctgcggtgggtcagtcgggtctgatgtccctctacgacgcgatgtttgcccagtacggcgtcaagatagcccaggtgctcgtgaccaagccggacttttacaacgaggaaacacgcaacaatctcttctgcacgctctccgaattaattagcctgaatattgtgccaatcataaatactaacgacgccgtctccccgccaatgttcatacgtgacgacgagccagccggcggagcccggaggggtattcccattaaggacaacgacagcttgtctgccatgctggccgccgaggtgcaggcggatctgctaatcctcatgtcggacgtcgatggcatctacaataagccgccgtgggaggacggggccaagctgatgcacacatacaccagcgacgacagcaacagcatcgagtttggcaaaaagtcaaaggtgggtactggcggcatggactccaaggtgaaggcagccacctgggccctggaccggggcgtcagcgtggtcatctgcaacggaatgcaggagaaggccatcaaaaccataattggcggccggaaggtgggcaccttcttcacggaggccaccgagagcgccaatgcagtgccagtcgaggtgatggccgagaacgcgcgaaccgggagtcgccagatgcaggccctcacgcccgctcagagggccagtgctgtcaacaccctggccgatctgttggtgagccgcgagaagtttatcctggacgccaatgccaaggacctggccgaggcgcagaagagcggactggccaagccgttgctgtcgcggctctcgctcaacccggccaagctaaagaacctctccgttggcctgaagcaaatcgccgaggacagtcacaagaatgttggtcgtgtcctgagacgcacccgccttgcggatcagctggagctcaagcaggtcactgtgcccataggcgtcctactggtcatcttcgaatcccgcccagactcgctgcctcaagtggccgccttggcaatggcctcggccaacggactgctcctcaaggggggcaaggaggcggcacacagcaacaaggcccttatggagctggtcaaggaggcgctggccaccgtgggagcggagcacgccgtgtcactggtttccacgcgcgaggagatcagcgatctgctgtccatggagaaccacatcgacctgatcattccgcgcggctcctccgacctggtgcgcagcatccagcagcagtcgctgcacatccccgtgctgggccacgccgaaggcgtctgccacgtctatatcgacagggatgcggatctggagaaggccctgcgcattgcacgcgacgccaagtgcgattatccggctgcttgcaacgccatggagaccctgctgatccacgaggacctgatgagtggcgcaatcttcggcgatgtctgcaacatgctgaaacgtgagggcgtcaaaatctatgccggaccccggctgaaccagcagctgacatttggcccgccggcggccaagagcctgaagcacgagtacggcgccctcgagtgctgcatcgaggttgtgcccagcctggacgaggccattaatcacatccatacgtacggcagcagccacacggatgtcattgttacggaaaatgatgcggcggccaggcagttcctgggcagcgtggacagcgcctgtgtgttccacaacgccagctcccggtttgcggacggtttccggtttggccttggtgccgaggtgggcatctccactgcccggatccacgcccgcgggcctgtgggagtggaggggctgctgaccaccaagtggatcctcgaggggcaggaccatgccgccgccgacttcgccgagggaggtggccgcacgtggctgcacgaaaccctgccgctggactaaataaccttaaactgaactattcttagatgtagcataccgaatcgcgttccaaagtagagtgcactttcgtcatcttttagaggagtgcattttgagcgaagggtaattacgtggggataagtggatccggatccgaatcccaatgtggatgagggcgaggacaaggatgtgcagctccgatgacagctgccgtcgtggccacatgggatatattaatttgagtgaaaaatatttgcagagacaacttgtgtaattaataaagtaagggagagaaagtgggcgaaggttgttcaaactgtcagcccttgtcttgggccctcaaagtttgcagcgaaagttccgcgctgcagatgggggatacaagaaaataaaattaactggaagaaagctgg

SEQ ID NO: 16725 - protein, 776 aa, DROSOPHILA
MLQNSFKLAQSLRNGFYRNAWRAFSSHGPRQPLVSPERRLEKAHPTFTERSQLKYARRLVVKLGSAVITREDNHGLALGRLASIVEQVAECHLEGREVMMVTSGAVAFGKQKLAQELLMSLSMRETLNPKDSKEFDGATLEPRAAAAVGQSGLMSLYDAMFAQYGVKIAQVLVTKPDFYNEETRNNLFCTLSELISLNIVPIINTNDAVSPPMFIRDDEPAGGARRGIPIKDNDSLSAMLAAEVQADLLILMSDVDGIYNKPPWEDGAKLMHTYTSDDSNSIEFGKKSKVGTGGMDSKVKAATWALDRGVSVVICNGMQEKAIKTIIGGRKVGTFFTEATESANAVPVEVMAENARTGSRQMQALTPAQRASAVNTLADLLVSREKFILDANAKDLAEAQKSGLAKPLLSRLSLNPAKLKNLSVGLKQIAEDSHKNVGRVLRRTRLADQLELKQVTVPIGVLLVIFESRPDSLPQVAALAMASANGLLLKGGKEAAHSNKALMELVKEALATVGAEHAVSLVSTREEISDLLSMENHIDLIIPRGSSDLVRSIQQQSLHIPVLGHAEGVCHVYIDRDADLEKALRIARDAKCDYPAACNAMETLLIHEDLMSGAIFGDVCNMLKREGVKIYAGPRLNQQLTFGPPAAKSLKHEYGALECCIEVVPSLDEAINHIHTYGSSHTDVIVTENDAAARQFLGSVDSACVFHNASSRFADGFRFGLGAEVGISTARIHARGPVGVEGLLTTKWILEGQDHAAADFAEGGGRTWLHETLPLD

SEQ ID NO: 16726 - DNA, 5224 bp, DROSOPHILA
catagtactattggcatccctggccacgttcgcttactccctgtacgtggttggcagcctgatgatgttcctttcgacgcctcgttcgatttccaaggcgcacacctggattttcaatttactggacaacaagtcgcgcctgcagaccgcctatggacccgtggtgttcgataccctctacctgatcggattcatcttccagcacagcttcctcaagtcagccgtggtcaagaagctgttggccaagttgggattgtcgggtgcggagcgcactatttatagcctgacgtcatcgctttgtttacatgtttgtatacccacaaattggacagaaatagctcccaactgcaactttggacatttcagtatttgatcgtcaactggctgcccgctcagtcgattgttctgtggcaaatcgatgtggagcagagtgctccgctttggtggaccttcgtgatcacccatggcatctgctgggttgtcatctttggcggcagtttggtgatggatctgccagagctgctgggcgtcaagcaagcctactacgatctgaaggcctacggaccgcccatcagctacaaatccggggaattgcgcaatctgtacgcccatgtcagacatccctcgtttgtgggcctgtcggtcatcctgttcgccacgaatgtgatgagcgtggatcggctagtcatggccttgctgctgaccacctacatgtacctggcctggtccacagatcagaaggatgtggcctatcagaagattcaactgcagcgcaagaaactcgaactgaaggccaagtaaacttaatctcaaaagtgttcttactaagatctagttgtaagttgacatgagtttgtattgaataatacttttctaacaatttcagtttccgaatcagaacgaaacaaataatgaaaaaactaaaagatatataaaaatatatatggttcagtttttactattttactactattgctagcttaattaattattttaaaatttaactcattcttacgatagaaggatcaaagggctgtcctttaaacggcgaaccttcggcatcccaggcagctttcaggcgatccaggtttatagcttggtcgggacttgaggtctgaatttcattttgttgcttgtctgctgccaactgctggaccctaagcttttctatggtggcctgggtttcctccggcaaatcatctatatagcgttcgcattcaatcttcttggaatcgatttctggatcaccttcgaagagccgatcccaccagagctcctttgctttatctacagttatatacagtttatgaaaatggtttataaagatgttttaggtgaatgcccaccgtaacttatgatcaatcggttctgatcaattgtccacaccgcctccttgtgtttaatccgctggctcaggtttccctcgaggatgatcgtctctgggctatgcttgctgctcactttgatgtgctgggcctgaattgaaatgtgcagcttcttcgccgtttgatgatccttgggaagcagagcctgcacctccacatccttgagggtttgtgaccagcagtgcgtttcgaacacatctccgtttttgtagtcgctgggggagaactttgactgctccttccctttttgtggcggctggctctctatgggtttcatttcctcgtcctgaggaccatcttcgctttccaggaccacttcttcgacggcaggcggagccgtttctccatcatctgcaccgccttccgcggtcagggattgtagcaagcaatccggatcgtagcgctgcatggcgccatatagaatctgatccctcacgcctttggggaagcctattttatccgcttcatcgcgttttgtgtgataaaagtcggtgctaaaaagggaagtgggactacagttttgttaaggatcttgagataaaatcttttacttgcgtcgcagaaatccgaaaatggagtccaggaaacctgtaatagttttccgatcctgcagaatttccatgagcatagcatcgtttcgctgaaagtccatttttgtaagaatagtaaccggccgcttttaacttaacatctaatgttcacgtctatcgataacaatgcatttaaatcggcgatagctattaaaaagatagatacatattaaagattttagagtgtggtcaacatatataatattaataggaatctagttctattagaaaataaggtcaataaagcatttgttgatcgaattaacaaaaaacctagtttagttaacacaatcaagttggcagccctgcgacaaacttggtatatcgatagttgtcgccttattttccaaatccattcccaaattgttattattgaaataattttaaaaatgatcggtagactttctttttggaacaaggacaacgtttccaacgaggtggactgcttggcctgccgtctggtcagtggccttggactcctgggaattggtgccttcctattggcacagtcgaaaaaaagacaagcgaaacctctggagaatttcactatgaaaggcttggctgcaggtgagccacttgggatcttaaatccggtcttatgtttactcctttctccttcgtcgccatagccgttggagttctgggcgtggcccgcctggcagacgcgaatttcctgaaggcaaccgccgagaagccaaaagaacaggaaaatactagcactgatcatcagttcttttctagacgttaattcaatgacgttttaattataatcgtagagtcacttaatatataaaggttaatgttttcttttgtacgaccatgtggcattacaataatatagctgtaaccttgtttttagaattttttctatttaaaatcgttgaaaacaaaaccttgtttgctttaatgaatttatgatttattttaaataaattaattacataggcatacacaatattgcatcttttgaaagaggatcataaataaacatatgtttgtattaataataatattataaaatatcaacaggattcttattttatagctttcaaaaaaggtgtttgcttgttcatagcttggctgttgatctatctattgatttctgctaaatgttgttgcttggctttaaaggatattttatagatgcaattttaaaacttttatgttctttatgtccttttatgttatattgtgtcgattgcgttcctttactgttaatcgtctagaatcccactttccccagcttggtatcagtctttggattggccgtgatgttctgcaccgccacaatggtctcattgatgtgtgtctgcagctcgcgtaggctctggatctggagaagacgtagtatgcgcatgggcaggtccagggcagagtcgttggacgagacgacgtcgtttcccttgtcaaaagggaagggtttacccactaccggcttgcgatccttggcggcgggcgagaggcgttcgtgcaccacgcgagcgatagcctccagctgcaacagatggttcgggtggtgcggcacattcagtttgctggccagcagccggactccatccacgaacgctttttcctgagctggtgggaagaaagaattaatacttgttgtactttacctgattatcatctatagataataaaagtggtttttggaacctcttaaaaaatccataatatataaatttaaagttccttaaatggtaaatttagttaaaatcagaccatactattaatatttccatcgaaaatagcctggaccctttgttgggactgcttgccattgctttggggtggcacctgtttggtgttaatcgaggcaaactgatcaggatcatcgaggaagtccaggcgcacagcatagctgacaatccaggccagctgctcctgccgcgtctccaggggcggcatgctcaaatcggcacagtactttaagtaaccctccttccagatctcagggttgtcgacagtgcgcagcttacagcgatcctctatggagtaaagccggatcttctggtcctccaaccagaggactgtgttggcgaattccttgcggtctgcggaacgaaaagaatgggatgacttatagccccatcaggaaaactagacaattaccgctcatcaccaccgggatgtcaacatcgggacgacccagtacctcgagtttcatcttgagcgacagcatgctttcaacggattactatacaaaaatcgattcgctctgttaatttacaaaaaatgttacagccggctgtgcttattcttatcgcccaaatttaagggatggaacattaaacgagaggacttatcgacgtagaaattgggctgccaacttgctgtgataaagctgttcgaatttaataatctcgaaaaagtatcgatatataatttttaaatcaaatattttgtaagaaactacttactgtcaaaaagtattttttccgataattatttttttgcacatcatattattcaattaattgaagaactattaatacaattttaaagctcttcattgaccgattaaaattgtcaattaattaaaaaagtcaaatttatcccggaacacgcgaattcttaatattaatgtaagttcttttaaaattgatttttgaaattgtaaatttgaacaaattgacattgtaaatacaatgcacaaattcccaatcgagtaacatcgacctcaatgctgaaagtacagcctaataacagacaaaagatcttgttactagacatttttgaaaacctagacatggtatttaggtgctcaattgcatattatctcgaatatacatttatataataatctttcgctcaacagtgaatgtcctacgctgaacagaagcaatatagtttataataatataataagaaatattttgggaatgcgttaccataggattcatcaatctgaccaattgatttgcactgaaaaaatcgaaatgagttctaaaaagtatttccccgccaaaaaatatttttcccttatcagcgataagaaacgacaagtacaaaggctgtattgtatatcatatatgtatgtatattaattaaataattaaattaagtttgagggacatacatttacatcctagcaaattatagactaataactacacgttatatatcgagatgctgagttataatatttgtttgcaaacaactacacgaatacacgtatcaacagcagcagtttcctattatctcccaatatcttgcagttcctctggatccagaggatcgccaccggaa

SEQ ID NO: 16727 - DNA, 1843 bp, DROSOPHILA
gccggctgtaacattttttgtaaattaacagagcgaatcgatttttgtatagtaatccgttgaaagcatgctgtcgctcaagatgaaactcgaggtactgggtcgtcccgatgttgacatcccggtggtgatgagcgaccgcaaggaattcgccaacacagtcctctggttggaggaccagaagatccggctttactccatagaggatcgctgtaagctgcgcactgtcgacaaccctgagatctggaaggagggttacttaaagtactgtgccgatttgagcatgccgcccctggagacgcggcaggagcagctggcctggattgtcagctatgctgtgcgcctggacttcctcgatgatcctgatcagtttgcctcgattaacaccaaacaggtgccaccccaaagcaatggcaagcagtcccaacaaagggtccaggctattttcgatggaaatattaatactcaggaaaaagcgttcgtggatggagtccggctgctggccagcaaactgaatgtgccgcaccacccgaaccatctgttgcagctggaggctatcgctcgcgtggtgcacgaacgcctctcgcccgccgccaaggatcgcaagccggtagtgggtaaacccttcccttttgacaagggaaacgacgtcgtctcgtccaacgactctgccctggacctgcccatgcgcatactacgtcttctccagatccagagcctacgcgagctgcagacacacatcaatgagaccattgtggcggtgcagaacatcacggccaatccaaagactgataccaagctggggaaagaaattcgcgtctgccaggcgggccacgcccagaactccaacggctatggcgacgaaggagaaaggagtaaacataagaccggatttaagatcccaagtggctcacctgcagccaagcctttcatacgaaacgatgctatgctcatggaaattctgcaggatcggaaaactattacaggtttcctggactccattttcggatttctgcgacgcaacaccgacttttatcacacaaaacgcgatgaagcggataaaataggcttccccaaaggcgtgagggatcagattctatatggcgccatgcagcgctacgatccggattgcttgctacaatccctgaccgcggaaggcggtgcagatgatggagaaacggctccgcctgccgtcgaagaagtggtcctggaaagcgaagatggtcctcaggacgaggaaatgaaacccatagagagccagccgccacaaaaagggaaggagcagtcaaagttctcccccagcgactacaaaaacggagatgtgttcgaaacgcactgctggtcacaaaccctcaaggatgtggaggtgcaggctctgcttcccaaggatcatcaaacggcgaagaagctgcacatttcaattcaggcccagcacatcaaagtgagcagcaagcatagcccagagacgatcatcctcgagggaaacctgagccagcggattaaacacaaggaggcggtgtggacaattgatcagaaccgattgatcataagttacgataaagcaaaggagctctggtgggatcggctcttcgaaggtgatccagaaatcgattccaagaagattgaatgcgaacgctatatagatgatttgccggaggaaacccaggccaccatagaaaagcttagggtccagcagttggcagcagacaagcaacaaaatgaaattcagacctcaagtcccgaccaagctataaacctggatcgcctgaaagctgcctgggatgccgaaggttcgccgtttaaaggacagccctttgatccttctatcgtaagaatgagttaa

SEQ ID NO: 16728 - protein, 591 aa, DROSOPHILA
MLSLKMKLEVLGRPDVDIPVVMSDRKEFANTVLWLEDQKIRLYSIEDRCKLRTVDNPEIWKEGYLKYCADLSMPPLETRQEQLAWIVSYAVRLDFLDDPDQFASINTKQVPPQSNGKQSQQRVQAIFDGNINTQEKAFVDGVRLLASKLNVPHHPNHLLQLEAIARVVHERLSPAAKDRKPVVGKPFPFDKGNDVVSSNDSALDLPMRILRLLQIQSLRELQTHINETIVAVQNITANPKTDTKLGKEIRVCQAGHAQNSNGYGDEGERSKHKTGFKIPSGSPAAKPFIRNDAMLMEILQDRKTITGFLDSIFGFLRRNTDFYHTKRDEADKIGFPKGVRDQILYGAMQRYDPDCLLQSLTAEGGADDGETAPPAVEEVVLESEDGPQDEEMKPIESQPPQKGKEQSKFSPSDYKNGDVFETHCWSQTLKDVEVQALLPKDHQTAKKLHISIQAQHIKVSSKHSPETIILEGNLSQRIKHKEAVWTIDQNRLIISYDKAKELWWDRLFEGDPEIDSKKIECERYIDDLPEETQATIEKLRVQQLAADKQQNEIQTSSPDQAINLDRLKAAWDAEGSPFKGQPFDPSIVRMS

SEQ ID NO: 16729 - DNA, 2731 bp, DROSOPHILA
ggcactaaaaattttcttttttaaattgaatttaatgaaaggcgtgagcaaagagaacggaaaatggtaggaaatgcccacggccgcaccatattcaaatggcattttcaaataaatacggtcgcgttggccaagggattccctgaatcgttttcaatgaaataccgcccataaatatggaaagtaaatttagttttacgatttttacgccatgaaattattgatataagctattagaaacgattaggaaaatatgctagaaaatttacgattatagctaataaaaataaattaaagcttcaaaacttacattactaaaatatatattaccttttttggttttaactaagaatttgacatacttttgtgaaatctcatataagaaagtcccatgcaacctcaaaataattccgcaataaatcctattgtgtaagcgaactgcggaaaaaagtaaatgaatataaataaataaaaaataaatcgcccgatgcaaagtccaagtgcttatcctggccatttttatgggcccgcttcaactttgtttgccggctgctatatatatttttattgcacaaaaagatttgctctctttgccgcctttcccctttaatgtccctcatccagcatcgttataataattattgcaggtattaagtcaagtagccgcaaagagccctcgctgcctccgggctcatccaatcagccctttgaaacgaggccccattcccagggacatttttttttgttcgtggtcactttttcgttgcccttttttcagggccttgcatagcaataattctgtctctccacaacagtagagcttccataacctaaacaataattttgcaaataaacattcattactgtaccttatcagtagtatgagcagactttgagatttacttgaaagtaaaaacgtatcaattaatatgtgtaataattttcttttagcttctcacaatttaatttgcaagcttaagttatgcaagctctgctgtaccttttgggatatatactatatatgggtagaaaccgcagcgattttcgcgcaacgcggctttttgcggatcacgttcatctcctggggacaaaactaaattgtgtttaattaattttttgttgcataattcggggattttagttttacgccgctgcgaaatggcaaaaataccaaacagtttgcggttgttggtgcatcaatgaaagcaacaaatgtaccgcacacgtgtacagtcatcaacagtcagtacaaatatttcaaggagggcagataccaaagtactatgattaaacagatcttttgataaaaattctgggttcataaattttttaatagaagccaaaatcgtgctcaataatttgttttgtctgttagtcattatttcgcttactactactatgttttagttgagtgcaagtattttccccactaaagcaattgaaattcgtcagtcttcgggctctgtcgctttgtaatacgatttttggacaatcagatcgcagtacacaggcaggaatcattctattgacaacatatcctggcttgcagacacaaggacctccgcatatcaaagtacaattgggctttcctttggtatcacacgtttctggacaagctgtggggcaatccgtttgagttccatttactgaacaatcgactttctcagcaaagcactttaccgccgaaaaactacacagtaccacaagagtgaatgtttcccacttccacatactatttaggattattgccgtctctaaataaattatctaacgaagaaactctaaatttatatatataacgtagttgaccgtatcgtaatgtaaaagaacaaatttcattagtcaccttaggatgtttttgttctcgcttcagcagagctaaatataccattgaaaagataagcggttactgagattcacaagggatggacatgcttagaaacgtactagtctagttaatgggatctggataatgttaacttgaaatatttgatatatttatactccttccaatctttttgaacaaccccctttgaaaacttttatttatttcaatgcctactgaatgcgacacatttttgtcgctgaaaactttacctcaacttggcgctgtgtgagttttctttaataaaatttcattcagtctacttggatctgcactcgttttgtggccatgtgacacgcacacacaaacaaactgaagcagaaaccaacacaaatgcagacaaatatcttgcaatgttggcggctgcagactgtcatttgtttacttgtgtaaactttaattaaattccaaaaagacgacgacagccgcagctggtgcaggagtatcctccccatggttccccattaaaaccccattgccctcaccaacataaccgtgttgccattgcacaattttaggcccacattgcagttcagtctgccaattgccataattatgagcactggactaacaaactccagctttacacaagaaaacaaaccttagtttaaagataaatttaaattttacaattttacgatattcaagtcttgtcactacgtttagtaccaaaaatgtgaagatttaactaactttgtatccaaaacctaattagataataaaaagcattcttaagtatttaaattaaatcaccttaaaaagcaaaagcctgataacttacattgttataatattcatgctataattttataattatttcagtgtataaagagccgtatccattca

SEQ ID NO: 16730 - DNA, 401 bp, DROSOPHILA
atgtggaagtgggaaacattcactcttgtggtactgtgtagtttttcggcggtaaagtgctttgctgagaaagtcgattgttcagtaaatggaactcaaacggattgccccacagcttgtccagaaacgtgtgataccaaaggaaagcccaattgtactttgatatgcggaggtccttgtgtctgcaagccaggatatgttgtcaatagaatgattcctgcctgtgtactgcgatctgattgtccaaaaatcgtattacaaagcgacagagcccgaagactgacgaatttcaattgctttagtggggaaaatacttgcacgagatgaacgtgatccgcaaaaagccgcgttgcgcgaaaatcgctgcggtttctacccatatatagtatatatcccaaaag

SEQ ID NO: 16731 - protein, 108 aa, DROSOPHILA
MWKWETFTLVVLCSFSAVKCFAEKVDCSVNGTQTDCPTACPETCDTKGKPNCTLICGGPCVCKPGYVVNRMIPACVLRSDCPKIVLQSDRARRLTNFNCFSGENTCTR

SEQ ID NO: 16732 - DNA, 2748 bp, DROSOPHILA
agccaacatttataatggcttggaaaatattattattatcaagttggtgggacagaactgctgaagcttgaaattcgcattcataccgaaactatctatgtcatttccgaaaaggttttttttttaatgatcatattagaatatgtattctaaattaagcttagtcactttaaaacccgaaaaaaaggaagagtacaaatcctttaagtttttaaacctttacaactgtttcacaaaaaatcaactgaactttgaaaatcgtttaggccaagtaaactaattgcttaatcatttaaacctaccgatcagaaatacacacacacaagcggcagaaaagaaaaacttgaaatgagctgaaaattctaaaacaacttcctatttataccaaaaaactgatcaaaagtagtgaagtagcttttgcaaagacaactttgtaagccgagcttatactgccataccagcaagttggccaaattcgaaagctccgaaagctgagcttgcaaattgaatttttaacgcttcatttgtgaagcgacataaacagtgactaagtgtttacttagatccacaaatcaaatggcacgccaattagcaatgcgtattgattagaaggagaaacttgcaaatcagaattcgctgttgaatggaaagcatttggcttataggtcaactatctgaattggtttaaaatcgtttccggtcgtttagtcaattaaatatagttcaggttcaatattctttttgggtttcttctttagatttcaaaaactatcctaaatttaaattgttttcatatttgctgactgcactttgaaatgctctttacttttaatattataaagctactacttttaagtatcccctataacataacatacaaccacatcaagtgtcgttacacttttttccaaatgggaacacttttaaaattcaccaatctgtggttgtcaaatccaaatgtcattgtaattcgggacacttcagtatttgagtcaaaaatatgggagcagagcaatcggcattgttggcctgcactcagacgggcatccatgaggatcgcctggaaatggataactcaaagttgttctttcaattgtactttgataggatgccccagcctgtgacgggtcccgtgacagaagcgctgctccacttggtggataaagtgaatgtggctggggctaataatggtaatatccgatacctttataccaattgtccttaaaatgtgtactcttgaagctgatgaaacccaatcgatcaaggacgaatgtaatagcggggaaagcgacaccatatcggtgctcagtaatgacagtgaagtctcgacaccaagtttggatgtggaaatagagcccatacagatagccgaatttgagccgatagatcaatacaatatgcctattgaggaaaccgatcagacatatacgctaccattgttaaaataaatatgtagattaatttaacatatgaatttatgtacagaactaattgcaattgttcgtctacttaaaattaactttctttagtctcagcgacttaatgggtctgacaatgctccttcgctcctcgcgatgctttttcatctccgcctcgcgcttcttggcatggaactgtgacttcttctgcttgttcacttcgaatgtcatctgacgattgcccagggagcgacccacattggtgacctggccctccagctgggacatgacccttacgcgatcctgcaagctcgcttttttgatgcgctgctgcagtagactgctgccttgatgttgatccaagggggtcatggtgaaacggttgccattggtggtgggttgttggctgtgtccattcgtctgcggtctttttgcggtatccgaaatttcatccggctgctgctcgtcatcttctagctcctcctcttcctcacgttgtcgcttcacctgtttgtacgcctgcttcatttccttgacatactcccttcggtcatcatcgtcagatgaggcctcatctccgctgtcatccttcgtttcgccatcgctcttctcgaagccaaataggtcctcgtcattatcgctttcctcgcgctgctgtgcctcgtccgcgtgcaactccgccacatgagccacctccacgcgcttcttgagttccttggccttggatttatccagacggttcagaacaggagccagcagacgatactcctcggcagacttgttaacttcaaagtcggcattctcaaacatggccttgaaacgcgagtcctccagcaggctgggcacatttcgctgcttggcactgttggaaggattggcttgctcgtccataatcttgagagccaactctttgttgactttgggcagcttggattcgatttgcaggcgggacttgcgctcactttcgatttcttggcggatcttatctttgcggaagcggtcgaaggcgaagggttccacaactgccttggctttgttgtacaatcttgcgtccataaagtatctgtagaatttttaggtattagacaagatctttacctcttccaatctttttcaaacttacccgtgcatataacccttaagaagattgctgccaacgagatgctccattcccaattcagccagctccttcgctgtgacgaactgatagtcatcgtacacattctccacgacctccgattcgatctcctcggtgaggttatccaagaacgagcaccatcggggtgctggacccattgcaggcacataataggtcatcatcttaacatcc

SEQ ID NO: 16733 - DNA, 673 bp, DROSOPHILA
atgggagcagagcaatcggcattgttggcctgcactcagacgggcatccatgaggatcgcctggaaatggataactcaaagttgttctttcaattgtactttgataggatgccccagcctgtgacgggtcccgtgacagaagcgctgctccacttggtggataaagtgaatgtggctggggctaataatggacgaatgtaatagcggggaaagcgacaccatatcggtgctcagtaatgacagtgaagtctcgacaccaagtttggatgtggaaatagagcccatacagatagccgaatttgagccgatagatcaatacaatatgcctattgaggaaaccgatcagacatatacgctaccattgttaaaataaatatgtagattaatttaacatatgaatttatgtacagaactaattgcaattgttcgtctacttaaaattaactttctttagtctcagcgacttaatgggtctgacaatgctccttcgctcctcgcgatgctttttcatctccgcctcgcgcttcttggcatggaactgtgacttcttctgcttgttcacttcgaatgtcatctgacgattgcccagggagcgacccacattggtgacctggccctccagctgggacatgacccttacgcgatcctgcaagctcgcttttttgatgcgctg

SEQ ID NO: 16734 - protein, 66 aa, DROSOPHILA
MGAEQSALLACTQTGIHEDRLEMDNSKLFFQLYFDRMPQPVTGPVTEALLHLVDKVNVAGANNGRM

SEQ ID NO: 16735 - DNA, 3610 bp, DROSOPHILA
gccgccgttttgcgggggtttatttatataaaaacttaaaaatatatctacagatgcctatacaagtcctggcgcatatttcgatatgttctctcctctgttctttgtcgaagtcatagcaaagttggcagccagacataatttagcgaaaacgaaatgaaactaagtgataaatggtatttgggaatggagcaaattgaatactctgaacgaacgcaaaatcccgataatgctctgactaatacgacttagggcctgatggaaataaattattctatcaaaaaacggagagcctattgtcagagcttaaatcgaagctcgttagataaatccatttgttagctttggcttaacacattctgtcatttgatgcttaaattaaaagtaattggaatacccaattttgctatttgtcaaaaaaatatatctattgtgtatatttgggactattgccattctaaaacaatatataaaataaatataaatatttatattatgtatgtatatttatgactattgccattctaaaacaatatataaatatcaaaactatctagcctaagcccagcgttccaataaattatttattttcccaaatttcacaagcttataagtgtgtgcggattaaaattctaacaatataacaagacttacaacttacaaaacaacttattttatattgaaatctagtaccaatttagttgctctaagttgtggcttaactagggttctttaattcgtaatccaacttgttgccgtaggcgtaatacccgaaatcagaacacttttgtgaaatcgaaatgatgtgcatccgaccaccctccccggaaacgcctgatccccagccagcgttgcatatcgcggaattcatcaacatgttactagatgaacaattgttcgagatgacagggacatgggcgtggggccggcggggcgggacagaacttatttaaatgcagctgccggagcgcataacgaatcactctgatcgctgtcgctgttggatttacacgtcgtgagtgtagtcttgtccgcccatccgaaatccgtaacccgcataagggataaccgatctgtctgtatccttgtagtgccgcccgcaccaaactaaccaaacatgtgtgacgaagaagcatcagccctggtcgtagacaacggctccggcatgtgcaaggccggattcgccggagacgacgcgccccgcgccgtattcccctcgatcgtaggccgtccccgtcaccagggcgtgatggtgggtatgggtcagaaggactgctacgtgggcgacgaggcgcagagcaagcgcggtatcctgtcgctgaagtaccccatcgaacacggcattatcaccaactgggatgacatggagaaggtctggcaccacaccttctacaacgagctgcgtgtggcccccgaggagcaccccgttctgctgaccgaggctcccttgaaccccaaggccaaccgcgagaagatgacccagatcatgttcgagacgttcaactccccggccatgtacgtggccatccaggccgtgctctccctgtacgcctccggccgtaccaccggtatcgtcctggactccggtgacggtgtctcccacaccgtgcccatctatgagggctatgccctgccccacgccatccttcgtctagatctggccggtcgcgatctaaccgactacctgatgaagatcctcaccgagcgcggctacagcttcaccaccaccgccgagcgcgagattgtgcgcgacatcaaggagaagctgtgctacgtcgccctggacttcgagcaggagatggccactgccgccgcctccacctccctggagaagtcttacgagctgcccgatggccaggtaatcaccatcggcaacgagcgcttccgcaccccggaggccctcttccagccatcgttcctgggcatggagtcctgcggcatccacgagaccgtctaccagtccatcatgaagtgcgacgtggacatccgcaaggatctgtatgccaacaatgtgctgtctggcggcactaccatgtatccaggtgcgtagtcttaattaattaggaccataaagttcagaggaaattcttccgagggaatgggatcaaaactatgcgggatacttaaaaaaaaaaacaagtgttactttatacattcatttggcagagaggaaatctttaaataataaagcctaaatatttagctgagctttgtaataacagttaaaaaaaatcttatggaaagtagtattacaaaaaaaaaaaaaagaattcacctaatgggttatatcctttccctatatctcatattcatgcatgctattattaaaatgtcatgtaatgagtacaccaaagctcctcggttctgtagcaccactaatggattctatttctgtcctcttcaggtatcgctgaccgtatgcaaaaggaaatcaccgcacttgccccgtccaccatcaagatcaagatcatcgccccgccagagcgcaagtactccgtctggatcggtggctccatcctggcttcgttgtccaccttccagcagatgtggatctccaagcaggagtatgacgagtccggtcccggcatcgtccaccgcaagtgcttctaagcatccaagccacccaaaccagatcaacatctcctcgagcgcggccctggtgtttgtctccagcgtaagacatccgaccaggcgccggcgccaagggtgaggacgcagttcagtgaaaagtatctttaaattacatttagttgatgaagaagttttaacatagatagagaaaacaagagaaagagacgagaaaagaccggaaacgagcggcaacgccttctttttttattattattgctatttttatttgatttgactcggaatttgtactgcttgactcgcttgccagcgcgtaaagtggccaaaacaatcggttgtacgtacaataaaaaccaataacccatgtgaatcgaacccaagtcgaacgtcacaggagcagcaggaatgcgtggtggggaaacttttttaattaggcctcgacgaatgtcaatcaggcacttgccggccaacttttattctctaacagctgccatggcaatcccccagtacgggtatctgtatctgtatctgtatctgtatctgtatctgtgcatctatccccccgcatgctcttctgtcacattttcacaaacccagatggattttccacacgaagagaggttgcgaggaatgacttctggaggactgaagtcggaaatacaaggagcagcgacagtcttaactggagcccaactgctcacagaacttttcgccaacataaatgtttgtgctcaacttttggctgcaaacttttgaggtttcgccaaactatgcataaaccaggtgccgaaaactgttgcttaattagttagggccaagcttgctggagtcgccaaagaaaagagtctaactgggtttattggtctaatgtctgctgctaagtcgtcagtaacacggaaactcttctaatgactagggagcacgtgcattcttgatgtttttgggcacccaaaatcttgccccaaaaccttgccaattatgattttagagatgcagtcctggggattctggcacgtgtaga

SEQ ID NO: 16736 - DNA, 1172 bp, DROSOPHILA
ttggatttacacgtctgccgcccgcaccaaactaaccaaacatgtgtgacgaagaagcatcagccctggtcgtagacaacggctccggcatgtgcaaggccggattcgccggagacgacgcgccccgcgccgtattcccctcgatcgtaggccgtccccgtcaccagggcgtgatggtgggtatgggtcagaaggactgctacgtgggcgacgaggcgcagagcaagcgcggtatcctgtcgctgaagtaccccatcgaacacggcattatcaccaactgggatgacatggagaaggtctggcaccacaccttctacaacgagctgcgtgtggcccccgaggagcaccccgttctgctgaccgaggctcccttgaaccccaaggccaaccgcgagaagatgacccagatcatgttcgagacgttcaactccccggccatgtacgtggccatccaggccgtgctctccctgtacgcctccggccgtaccaccggtatcgtcctggactccggtgacggtgtctcccacaccgtgcccatctatgagggctatgccctgccccacgccatccttcgtctagatctggccggtcgcgatctaaccgactacctgatgaagatcctcaccgagcgcggctacagcttcaccaccaccgccgagcgcgagattgtgcgcgacatcaaggagaagctgtgctacgtcgccctggacttcgagcaggagatggccactgccgccgcctccacctccctggagaagtcttacgagctgcccgatggccaggtaatcaccatcggcaacgagcgcttccgcaccccggaggccctcttccagccatcgttcctgggcatggagtcctgcggcatccacgagaccgtctaccagtccatcatgaagtgcgacgtggacatccgcaaggatctgtatgccaacaatgtgctgtctggcggcactaccatgtatccaggtatcgctgaccgtatgcaaaaggaaatcaccgcacttgccccgtccaccatcaagatcaagatcatcgccccgccagagcgcaagtactccgtctggatcggtggctccatcctggcttcgttgtccaccttccagcagatgtggatctccaagcaggagtatgacgagtccggtcccggcatcgtccaccgcaagtgcttctaa

SEQ ID NO: 16737 - protein, 376 aa, DROSOPHILA
MCDEEASALVVDNGSGMCKAGFAGDDAPRAVFPSIVGRPRHQGVMVGMGQKDCYVGDEAQSKRGILSLKYPIEHGIITNWDDMEKVWHHTFYNELRVAPEEHPVLLTEAPLNPKANREKMTQIMFETFNSPAMYVAIQAVLSLYASGRTTGIVLDSGDGVSHTVPIYEGYALPHAILRLDLAGRDLTDYLMKILTERGYSFTTTAEREIVRDIKEKLCYVALDFEQEMATAAASTSLEKSYELPDGQVITIGNERFRTPEALFQPSFLGMESCGIHETVYQSIMKCDVDIRKDLYANNVLSGGTTMYPGIADRMQKEITALAPSTIKIKIIAPPERKYSVWIGGSILASLSTFQQMWISKQEYDESGPGIVHRKCF

SEQ ID NO: 16738 - DNA, 4090 bp, DROSOPHILA
caacaacagcgacagcaaccacaaaaaaaaaaaaaaacagaaaaagaaaatataaagtcctttcgcttaataagacgcaagcattgcaacatttattgtatcggttaagcataaatactagaaaattaaacatgtttgttggcgcaaactaaagttttgaccatgaaatttcgaaaagtttatcgcactaacaccatccttcggtctcaatttatagatgaattcgtttgagatatagatcatgtttttgttggctgatgaatccctgtatataatatatatatgtatgaatttttgtatctccctaattttttgttgagtatttgttgttgtcgcgtgcaagaattggaggaaacgatcaatgttatatgaatatttacgatgtattaatggcataatgcaataggaaataaataaaatggtatttataaaacccctaccaatagaaatgaatttctctttcaaataatttaaattttaatttgcatatttaaccattcgtttatatttaattctacaccaaatcgctggataattttataatttaccggatttccatttaatagatttaaattttataaatatttgggtacttacgatttacttaaatattttgtaaaaagcttttttaatccatttagtggaataccctcaactttgacttgcgcataacttcattcttgttttatttagtgatgctaacgttgggttggaaatcagctgattatgactatgaacaataaagtttgtaagtcaaacaacgatttttcgtatactgttcttttgtttgttgctggttgtctaattaatcattttaactggttatcagtccaatttttgttttctacactacactattctacactattttcgatttccttgaaatttagcgggaaaaactctgagctagcatcttcggtggcatcgctgtgtgcgcgcttttgtgcgaatgccatggtatgcaaattaaatttaatttattccgatcatcatgaaagtgacaaagtagctgcttaagtagccagggaagcgcacaacgtaatctaatctcgatccatgatgcaaatcaagcgcctcctgtgcaaatcctgcggcctgggcacccttctggtggcggtcgtctggctgctggcgctgcttttctactcgcacagcctgcgcagctccatccgctcggcaggatggaggatcgacgaagggaacgcaacgccacgggccgagctgagctaccaggccagggtcaccgtcggatgcactccaaatgccagcattaccactggcgaatcgccggcggcacccaagccgcccagtgatccggagcaattggaactgttgggtgtggtgcgcaacaagcaggacaagtacatacgcgacattggctacaagcatcacgccttcaacgcgctggtgtccaataacataggactcttccgggcgatcccagacactcggcacaaggtgtgcgatcgccaggagaccacggaagcggaaaatctgccccaggcctccatagtcatgtgcttctacaacgagcacaagatgacgctgatgcgctcgattaagaccgtgctggaacgcacgcccagctacctgctgcgcgagattattctggtggatgatcacagcgatcttccagaattggaattccatttgcacggggatctgcgtgcccgcctgaagtacgacaacctgcggtacatcaaaaacgagcagcgcgagggtctcattcgttcccgggtcattggtgcacgcgaggccgtgggcgatgtgctcgtcttcctcgactcgcatatcgaggtcaatcagcagtggctggagccgctgctgcgcctcatcaagtcggagaacgccactctggccgtgcccgtcatcgacctgatcaacgctgatacctttgagtacacgcccagtccactggtgcgcggaggattcaactggggcctgcacttccgctgggagaatctgcccgagggcacgctcaaggtgccggaggattttcgcggacccttccgttcgcccaccatggccggcggattgtttgccgtgaacaggaagtacttccagcatctgggcgagtacgacatggccatggatatatggggtggcgagaatatagagatctccttcagagcctggcaatgcggtggcgccattaagatcgttccctgctcccgtgtcggtcacatattccgcaaacgacgtccgtacacttcgccagatggagccaacaccatgttgaagaactcactgcgtttggcgcacgtctggatggatcagtacaaggattactatctcaagcacgaaaaggtgcccaagacctatgattatggagacattagcgatcgcctcaagcttagggagcgtctgcagtgcagggactttgcctggtatctaaagaatgtctatccagagctgcatgtgccgggcgaggagtccaagaagtcggcggcagcgcccatctttcagccttggcactcgcgaaaacgtaactatgtcgacacattccagctgcgactgacgggaacggagctctgtgccgccgtggtggctcccaaggtgaagggtttctggaagaagggcagctccctgcaattgcaaacctgccgaaggacacccaatcaactgtggtacgaaacggagaaggcggaaattgtgctggacaagttgctgtgcctggaggcatccggggatgcgcaggtcacggtcaacaagtgccacgagatgctcggcgatcagcagtggcggcacacccgcaacgccaacagtcccgtctacaacatggccaaaggcacctgcctccgggcagctgctcccacgacgggcgccctcatcagtctggatctgtgctccaagtccaacggagcgggcggctcctgggacattgtgcagctgaagaagccaacggaggcggagggcagggccaaggaggcgaggaactcggacaaggcgctgtgagcgattcgctcggatcgaataattccgattgcaatattagactgataactgtttagggcaaagtgtattatgtttaaatagccagtattttttcatcaaactttttttttttaataaatatgatcaaaatgttgatggtgcagtttgattaatggccaatggtggtggccttggaaacaggttttctttcaaataatttgcaaattaatgtgtacgaatatgttatgtctgcatatttaatgattttgtgatgacttatcaaaatttaacttaattgtgaaaataaatgtatgtatgtacctacaatttaccttataaatatgcttcgtattcgtaatacgaatatcttatatctgcatatttaatgattttgtaatgacttatcaaagttcaactttgaataatggaaatttttggacctttaccactacaattttacttatgaatatatttagatagttaaattcttgcaatataacaccttttttccatttgctgcaatttcaaaacacaattttcaataccgactatctggtggtaatagaaaaaccacgtttttttttatgtatatgtgttatgtatatatttataaagaataaaaactttgttaactataaaataaacctaagctcgaaattgtaccgataaaaaaaaaattaattttagtatattatagactacctattaatttgtacttaagcaaccctttttttttaagtgtatgatttggtttttgcacatttggtatctctttacaagaaaatggtatattggctggcatcgaatacggtcacactttgtttatgctgaaacaggcgcgaaattgtgtgattattttaaccattttaaaagcggaaaaatgcaggccaaagcaaccgacagcaggcaggaacctaccctgaatatgggtaagctgataagcagtaataataactgattagttactataattaaacgctgtttgcagacacaaatgcgcgtcgcaatttcatcaaattccatgcgaaactcggcgaggtaagtaaatgctaaatgcaataaatccggtttaactgcattctacgccgtattttgcagaaacccgcaactacagtgaggttctttgatcacaccgatcgctatacggtccacggca

SEQ ID NO: 16739 - DNA, 2090 bp, DROSOPHILA
acaaagtagctgcttaagtagccagggaagcgcacaacgtaatctaatctcgatccatgatgcaaatcaagcgcctcctgtgcaaatcctgcggcctgggcacccttctggtggcggtcgtctggctgctggcgctgcttttctactcgcacagcctgcgcagctccatccgctcggcaggatggaggatcgacgaagggaacgcaacgccacgggccgagctgagctaccaggccagggtcaccgtcggatgcactccaaatgccagcattaccactggcgaatcgccggcggcacccaagccgcccagtgatccggagcaattggaactgttgggtgtggtgcgcaacaagcaggacaagtacatacgcgacattggctacaagcatcacgccttcaacgcgctggtgtccaataacataggactcttccgggcgatcccagacactcggcacaaggtgtgcgatcgccaggagaccacggaagcggaaaatctgccccaggcctccatagtcatgtgcttctacaacgagcacaagatgacgctgatgcgctcgattaagaccgtgctggaacgcacgcccagctacctgctgcgcgagattattctggtggatgatcacagcgatcttccagaattggaattccatttgcacggggatctgcgtgcccgcctgaagtacgacaacctgcggtacatcaaaaacgagcagcgcgagggtctcattcgttcccgggtcattggtgcacgcgaggccgtgggcgatgtgctcgtcttcctcgactcgcatatcgaggtcaatcagcagtggctggagccgctgctgcgcctcatcaagtcggagaacgccactctggccgtgcccgtcatcgacctgatcaacgctgatacctttgagtacacgcccagtccactggtgcgcggaggattcaactggggcctgcacttccgctgggagaatctgcccgagggcacgctcaaggtgccggaggattttcgcggacccttccgttcgcccaccatggccggcggattgtttgccgtgaacaggaagtacttccagcatctgggcgagtacgacatggccatggatatatggggtggcgagaatatagagatctccttcagagcctggcaatgcggtggcgccattaagatcgttccctgctcccgtgtcggtcacatattccgcaaacgacgtccgtacacttcgccagatggagccaacaccatgttgaagaactcactgcgtttggcgcacgtctggatggatcagtacaaggattactatctcaagcacgaaaaggtgcccaagacctatgattatggagacattagcgatcgcctcaagcttagggagcgtctgcagtgcagggactttgcctggtatctaaagaatgtctatccagagctgcatgtgccgggcgaggagtccaagaagtcggcggcagcgcccatctttcagccttggcactcgcgaaaacgtaactatgtcgacacattccagctgcgactgacgggaacggagctctgtgccgccgtggtggctcccaaggtgaagggtttctggaagaagggcagctccctgcaattgcaaacctgccgaaggacacccaatcaactgtggtacgaaacggagaaggcggaaattgtgctggacaagttgctgtgcctggaggcatccggggatgcgcaggtcacggtcaacaagtgccacgagatgctcggcgatcagcagtggcggcacacccgcaacgccaacagtcccgtctacaacatggccaaaggcacctgcctccgggcagctgctcccacgacgggcgccctcatcagtctggatctgtgctccaagtccaacggagcgggcggctcctgggacattgtgcagctgaagaagccaacggaggcggagggcagggccaaggaggcgaggaactcggacaaggcgctgtgagcgattcgctcggatcgaataattccgattgcaatattagactgataactgtttagggcaaagtgtattatgtttaaatagccagtattttttcatcaaactttttttttttaataaatatgatcaaaatgttga

SEQ ID NO: 16740 - protein, 632 aa, DROSOPHILA
MMQIKRLLCKSCGLGTLLVAVVWLLALLFYSHSLRSSIRSAGWRIDEGNATPRAELSYQARVTVGCTPNASITTGESPAAPKPPSDPEQLELLGVVRNKQDKYIRDIGYKHHAFNALVSNNIGLFRAIPDTRHKVCDRQETTEAENLPQASIVMCFYNEHKMTLMRSIKTVLERTPSYLLREIILVDDHSDLPELEFHLHGDLRARLKYDNLRYIKNEQREGLIRSRVIGAREAVGDVLVFLDSHIEVNQQWLEPLLRLIKSENATLAVPVIDLINADTFEYTPSPLVRGGFNWGLHFRWENLPEGTLKVPEDFRGPFRSPTMAGGLFAVNRKYFQHLGEYDMAMDIWGGENIEISFRAWQCGGAIKIVPCSRVGHIFRKRRPYTSPDGANTMLKNSLRLAHVWMDQYKDYYLKHEKVPKTYDYGDISDRLKLRERLQCRDFAWYLKNVYPELHVPGEESKKSAAAPIFQPWHSRKRNYVDTFQLRLTGTELCAAVVAPKVKGFWKKGSSLQLQTCRRTPNQLWYETEKAEIVLDKLLCLEASGDAQVTVNKCHEMLGDQQWRHTRNANSPVYNMAKGTCLRAAAPTTGALISLDLCSKSNGAGGSWDIVQLKKPTEAEGRAKEARNSDKAL

SEQ ID NO: 16741 - DNA, 7080 bp, DROSOPHILA
gaatcacagcgaaggacatggacaaggcccacaagctgctggaggactacctaaagcgctttcagctgagcccggtgttcagcaaggaagagtttcgtcattggtttacccccaaagaaggtattatcgattgcttcgtggttgccgacgaaaagggcaacatcactgatctgactagctactactgcctgccatcgtccgtgatgcaccatccggtgcataagacggttcgtgccgcatattcgttctataatgtgtctacaaagaccccgtggctggacctgatgaacgatgcactgatctcggcccgcaatgtccagatggacgtgtacaatgccctcgacctcatggagaacaagaagtactttgcaccgctaaaattcggcgccggggatggaaacctgcagtactacctctacaattggcgctgtccatcgatgcagccggaggagattgctctgatactcatgtagtcaccttgtcacctaagctcacattctcgccctgcctttcacagctcccctcctccgctttcttcaccctgctggaagtgccgtgcggctgctttgctttgctcctatttacgtagctattacctgtaatcttcagttattccagcgaggaaagccctttgcgagcatacacctaaatagcatcattgtgaaaattgcattttgcaacggccaagcttcgatattttttactacaagaacgaacacaaattgtataaaatgcgcagcaatatcaataaaaatgtaacgtttacttggacctttattgcctataattgacaataaattattttgctgctcttttaaagatgacaagtttttattttttttaagcagattattgtatttttgcccactgtcccagcatgtgatagtctggccactctgtcacatggccattggtctggcaaggtcggtgaaaaagcgcgcgctaagcaaaacagctgcacttgtgttggtttattagttaacgaaatctgattccaatgttggtttcctcataatattgacaattaaagacagccgccgacatggacgattcggtgttcaagctaaaataccaaaagtacaagttgcgcgtcaaggtgtgggagaaggacttcaagaagaagaatggccgtgttccatcgaaggtgagattgggatgcggatatgacaagtatgctaactggttgacctgttgcagtatgatataagggacgccagtcaggagattcgggactcatacaaaatgtactacaaactgaagacatccttcctggaagagacgctgaacgatgttctcagcgaagatggatacgatattctggagatgtcgcaggccagtgatttcggtgtgagcatgctggaccaggacgtcagtcttaatgaaggtcctcagctaccgttggatatatctgcactggtggggccgcagagctctggtaatcttgaggaaattccacaatcggtggagggctcattctcaaatctcatcgacctgcccaatcgtcaagtactcaccaatctggtcaatcgcgatgaaaaccatgtcattcgcaaattcgaggcggtggaggagctgccaatcaaccaaaatgcctggggcttgaatgtgagtaagaagccaccagctccaccacagcctgtagaggcctccaaatccgctccggggcacggaaagcaacccaaagcgggcgctagtcttaagcccagcttgagtgccaagttattccaatcctcacgcggttttgctaaacgaaatccccgaaagccgctttcacgttgtgtcagttcctctagttccaccacatcacttagctcagttcctactgatcatcacgaggaactgctcgactttgagaccatactcatacgcaaagcccaggagtacaaggagaagcagcaggccatagctaacaatccaatgctggccagtgagcacagcaaggaaagtatcaaaacactggtggacgacggctggctccggcgaaatacaaaggaaaacactcttgatgaagaagtgccctttgcggaagcaaataataacagtggtacgtccaagaaaacaaactttggcctggccaatcttgatttaagtaaactaaagcccactgttaaggaggaaaaagtgttgcaggccaagcccgatcaaatggcaatcatacaggagctgcaaacagatatgaattctagcatgaaccagaaaccagatcatcttaatcacacacctcctgcatccagtcaaaaatcagtcgctcctaaaaataaacctccaccttccgagcaggaaaccgattcggattccgactctgttgtggctgagagtgaagaagagcaggaaccacaagaatatcggcaactatcaaaacgtcgcaaaattgtttcaacagcatcaggaaaagtggaagtagccgccccagttgaaattcccaacaaagtcgaaccagagacagaaacatttgctcaagagaatccagatttctctgcagatgaagaccaggatgctacatatgtaccagagaataaaaagaaagataaggcaaagcgcaagcaagccgccggaaaacaaaagaccactaagcccaaagcggaaccaaaaccgaaaacagaaaagaaagccaaagtcaaggccgaaaagaaacccaaggcggagaaaaagccgaggaactctaaaaaagccatcgctgtcgagccggctcctgatccagaagaggatgagcgccaaccattgaatccagaagatttgaaatacgtgttggccttggaggcgggagatattacctccgttccgcgcattaatgtgcaggatctagaagaagcggatgctaccgcccagcgctatattagaaccttcgccgctggacccaacccaggattgtcggaagggtccaacattcgagtggatgaaaagagagccgcagcacgaaagaagctggaggaacgcatagcagctggtaaattaaacgagaactttgtgaccataaatattcaaaagaaaaaattcgtgcgtggcaaaaagtccgtgaacttcagcaagtacaagaagcaacagtggcggcataagaaacgagtggctgccttgagtgggccggacatggatatgggtggctgtgatggcggagtgctcacgtgcttccagtgcggcggagtcgggcatttcgctcagcagtgcaaggtgaagggagacagcttgttgccactttcggcacagctggaagaggatccctcgccgtttcccacgcttgccgaggctcaggagatggccagtcagggagcagtggtggcacacagtcgcaacatctcacggctgccccaagcggccaatgcagccatcctgcaaggcgatgagttgaacgagtcagaggaagatgaccaagaaagcagcggagatgaggaggtacagcagcatccagatccaaattggtctagcgatgaaatggacgttgatttcgaggccctagatgcggccgtcgaagcttccctaagccaaccggtttcgcaagagaaagcagcttcacctattaagacatacgtcggccacaagattcccgaggagttcctcaagcaggctggactggacaccacagcctctagttcgaatcgcagccagcacggtggggtgaagcccctatacgatctccttccggatggcagtgtccaggacacgacgccagaggtcctagaggcactccacatgttcgggcacaccaacttcaggaaaggtcaagatcgcgccatcatgcgcactctctctggactatcatcgctagttacacttagcacgggcagcggcaaatctttgtgctaccaattgcccgcctatttgtatagccggaaagtgggagctattaccctagtcatctcaccattggtgtcacttatggaggatcaggtgaccggggtgccgcactttctgcgagctcactgcctgcacactaatcagaccgcgccgcagcgtatgaagattcagcagatgattgccaatggggagattgacattcttcttgtctctccggaggcggttgtcgccggggaacgagccacaggatttggagccattcttcgccagctgccgcccattgcattcgcttgtattgatgaggcgcattgcgtgtctcagtggagtcacaactttcgacccagctacctaatgatctgcaaggtgctgagaaagaatctcggtgtacgcacagtgctggggctaacagccacggcaactttgccaacgcgtgttagcattataaatcaccttggcatatcggatggagaacgtggtattataagcgacatcccactgcctgacaatctagtgctgtccgtctccaaggatgagaaccgggatgcagctctgctccaactgctcaatagcgaacggtaagacttggcccaccatctttgaaacttgaaggagacttaaatacattttgatcattctagcttcgagccctgccagtccattattatctattgtacgcgtcgtgacgagtgtgagcgtatcgctgggtttattagaacgtgcgtgcaagaccgtagggagccaactcaggatcagacgaaaaaacgtaaacgtgtgaattggcaggctgagccctatcacgctggaatgcccgcttccaggcgacgaaccgttcagaaggccttcatgagcaatgagctgcgcattgtggtggccaccattgcctttggtatgggcatcaataagccggacatacgcgcggtaatccattataatatgccaagaaactttgagagctatgtgcaggaaattggtcgagcaggacgcgacgggttgccttcccactgtcacctcttcttggatgcgaagggtggcgaccagagtgagctgcgtcgccatgtgtattctaactccattgatcggcatgttatccgtaagctgctgcaaaagatctttgtgccatgtagctgtgacaaggaggcttccaagaggacagctcttccgattccccttgaaggtgatggtcctagagtgcatatgtgtccgggacacgagattggcttttccgtggagaaaaccgttgagatgctggacatcccggcggagaacatatctactttgctctgctacatggagcttgatccccgatggtgcatcagtgtgctcagctcagcatatgtgatggctaaggtaatctcgtatggtgggccaaagtacttgaagtaagtcctttagacacgtgtattgtgtatgtgtttaatgttattggtttttccttgcacaggcatgctgcaaaggaatgtccaccattggccatggctattgctttgcagattagagataagacattcaaggaggactctaacatcatagaattctcggtcacagatatcgcggcaggaattggctggaacagtggtgtggtcaaataccaactgaaggatctggagtgggtaaaaggtgagatggtaatccgttcaaaaaaggatccgtttaattagaaattaatttttcgatagtaaatggatatcccaagcgatcgcccatcacggtgagcttctatgatttgggattccgcatcaaggtgccgggcgattttaccgaatcagagatcgacaacgctctggacactctctatacgcgatccgtgaaacaggagcgtacgcagctcatccagctgcaatatgtggcccatggattggctgctgtggcctacagctcttgtggccagtgctgcaatgcggattttccgcaggatcggggcgagcagctaaaggctatcgtgcgcaactactttgccaatgactacccacaggatctggagctggaaatagaggtaattgcttggcaacacatttcaatttcttacttttattgctttcctctctgtccattagccaagtaacgtgccggatgagaacatcatagacgacgttcatgctctaataaacatgtacccggacaatacatttaccggacgtaatattgcgcgcatctttcatggcatcatgagcccgaactatccggctgtcatctggggacgctgtaagttctggcgtgcccacgtcaaagtggatttcaatcgcatcctgcacctggccaatatggctattatcaagaggcgtacgtgaccgtaatgtcgggatgaaccgccgataccatggttaaccaattaatagctccaagaattttaaaaatatgtgatgccattcaataacattttactcgcacaagtctgataatacaaaaataaattacaaattctatataaacagcttttgtacttattatgagtggaaagagaaattcgtacggacaatctaaatttttagcttggtttttaaactctctaaatctatgtgtttcattagctaataaatttgcaccatacaatcccacgccaatggaacaataacaatttatgataatttcattgccgaaaacaacagagcactaaaataaagtaaacaaatgccaagctcgtttagaggcaaattgcagctacggcttcaaatgaaacagcagaaatcaattcgatggagcccgtaaagaaacaaacatccggctgagtcattcccaataacatcacgaaatgtataaccccggtcgaaggtgtcatcttcaaatcgaagcctagccaaaggtcgtccttcctcagttcacacgaacgcgaagcaaacaacccaacaaatggggggatctaacaacaactcagggcacagacaactggaaacagagaaacatcattgaagttgtcggatcagcgaagcgtttgataaaggttttttatgacttggccattttgtgaggcctttggcttctcgtgccgatgttgtttataatcataaacgagactcgagtacacaaaagtcgacccaattacaacttgtttgttctgagagtgagacgtcaacgtcatcatcctcgctccatgatcatccacattgtgcagatggccagcgaagccatcgagcagcaagctgaccttgcctccaattttactccaatttcgaggcataaaagcgaaaatcaattgaaatggtagcaggcaaataccacaatgcaagcaacgagataggaaataataaaaaataaaggaaaaactaaaagcaacgagcaacttgactggcc

SEQ ID NO: 16742 - DNA, 4782 bp, DROSOPHILA
ttggtttcctcataatattgacaattaaagacagccgccgacatggacgattcggtgttcaagctaaaataccaaaagtacaagttgcgcgtcaaggtgtgggagaaggacttcaagaagaagaatggccgtgttccatcgaagtatgatataagggacgccagtcaggagattcgggactcatacaaaatgtactacaaactgaagacatccttcctggaagagacgctgaacgatgttctcagcgaagatggatacgatattctggagatgtcgcaggccagtgatttcggtgtgagcatgctggaccaggacgtcagtcttaatgaaggtcctcagctaccgttggatatatctgcactggtggggccgcagagctctggtaatcttgaggaaattccacaatcggtggagggctcattctcaaatctcatcgacctgcccaatcgtcaagtactcaccaatctggtcaatcgcgatgaaaaccatgtcattcgcaaattcgaggcggtggaggagctgccaatcaaccaaaatgcctggggcttgaatgtgagtaagaagccaccagctccaccacagcctgtagaggcctccaaatccgctccggggcacggaaagcaacccaaagcgggcgctagtcttaagcccagcttgagtgccaagttattccaatcctcacgcggttttgctaaacgaaatccccgaaagccgctttcacgttgtgtcagttcctctagttccaccacatcacttagctcagttcctactgatcatcacgaggaactgctcgactttgagaccatactcatacgcaaagcccaggagtacaaggagaagcagcaggccatagctaacaatccaatgctggccagtgagcacagcaaggaaagtatcaaaacactggtggacgacggctggctccggcgaaatacaaaggaaaacactcttgatgaagaagtgccctttgcggaagcaaataataacagtggtacgtccaagaaaacaaactttggcctggccaatcttgatttaagtaaactaaagcccactgttaaggaggaaaaagtgttgcaggccaagcccgatcaaatggcaatcatacaggagctgcaaacagatatgaattctagcatgaaccagaaaccagatcatcttaatcacacacctcctgcatccagtcaaaaatcagtcgctcctaaaaataaacctccaccttccgagcaggaaaccgattcggattccgactctgttgtggctgagagtgaagaagagcaggaaccacaagaatatcggcaactatcaaaacgtcgcaaaattgtttcaacagcatcaggaaaagtggaagtagccgccccagttgaaattcccaacaaagtcgaaccagagacagaaacatttgctcaagagaatccagatttctctgcagatgaagaccaggatgctacatatgtaccagagaataaaaagaaagataaggcaaagcgcaagcaagccgccggaaaacaaaagaccactaagcccaaagcggaaccaaaaccgaaaacagaaaagaaagccaaagtcaaggccgaaaagaaacccaaggcggagaaaaagccgaggaactctaaaaaagccatcgctgtcgagccggctcctgatccagaagaggatgagcgccaaccattgaatccagaagatttgaaatacgtgttggccttggaggcgggagatattacctccgttccgcgcattaatgtgcaggatctagaagaagcggatgctaccgcccagcgctatattagaaccttcgccgctggacccaacccaggattgtcggaagggtccaacattcgagtggatgaaaagagagccgcagcacgaaagaagctggaggaacgcatagcagctggtaaattaaacgagaactttgtgaccataaatattcaaaagaaaaaattcgtgcgtggcaaaaagtccgtgaacttcagcaagtacaagaagcaacagtggcggcataagaaacgagtggctgccttgagtgggccggacatggatatgggtggctgtgatggcggagtgctcacgtgcttccagtgcggcggagtcgggcatttcgctcagcagtgcaaggtgaagggagacagcttgttgccactttcggcacagctggaagaggatccctcgccgtttcccacgcttgccgaggctcaggagatggccagtcagggagcagtggtggcacacagtcgcaacatctcacggctgccccaagcggccaatgcagccatcctgcaaggcgatgagttgaacgagtcagaggaagatgaccaagaaagcagcggagatgaggaggtacagcagcatccagatccaaattggtctagcgatgaaatggacgttgatttcgaggccctagatgcggccgtcgaagcttccctaagccaaccggtttcgcaagagaaagcagcttcacctattaagacatacgtcggccacaagattcccgaggagttcctcaagcaggctggactggacaccacagcctctagttcgaatcgcagccagcacggtggggtgaagcccctatacgatctccttccggatggcagtgtccaggacacgacgccagaggtcctagaggcactccacatgttcgggcacaccaacttcaggaaaggtcaagatcgcgccatcatgcgcactctctctggactatcatcgctagttacacttagcacgggcagcggcaaatctttgtgctaccaattgcccgcctatttgtatagccggaaagtgggagctattaccctagtcatctcaccattggtgtcacttatggaggatcaggtgaccggggtgccgcactttctgcgagctcactgcctgcacactaatcagaccgcgccgcagcgtatgaagattcagcagatgattgccaatggggagattgacattcttcttgtctctccggaggcggttgtcgccggggaacgagccacaggatttggagccattcttcgccagctgccgcccattgcattcgcttgtattgatgaggcgcattgcgtgtctcagtggagtcacaactttcgacccagctacctaatgatctgcaaggtgctgagaaagaatctcggtgtacgcacagtgctggggctaacagccacggcaactttgccaacgcgtgttagcattataaatcaccttggcatatcggatggagaacgtggtattataagcgacatcccactgcctgacaatctagtgctgtccgtctccaaggatgagaaccgggatgcagctctgctccaactgctcaatagcgaacgcttcgagccctgccagtccattattatctattgtacgcgtcgtgacgagtgtgagcgtatcgctgggtttattagaacgtgcgtgcaagaccgtagggagccaactcaggatcagacgaaaaaacgtaaacgtgtgaattggcaggctgagccctatcacgctggaatgcccgcttccaggcgacgaaccgttcagaaggccttcatgagcaatgagctgcgcattgtggtggccaccattgcctttggtatgggcatcaataagccggacatacgcgcggtaatccattataatatgccaagaaactttgagagctatgtgcaggaaattggtcgagcaggacgcgacgggttgccttcccactgtcacctcttcttggatgcgaagggtggcgaccagagtgagctgcgtcgccatgtgtattctaactccattgatcggcatgttatccgtaagctgctgcaaaagatctttgtgccatgtagctgtgacaaggaggcttccaagaggacagctcttccgattccccttgaaggtgatggtcctagagtgcatatgtgtccgggacacgagattggcttttccgtggagaaaaccgttgagatgctggacatcccggcggagaacatatctactttgctctgctacatggagcttgatccccgatggtgcatcagtgtgctcagctcagcatatgtgatggctaaggtaatctcgtatggtgggccaaagtacttgaagcatgctgcaaaggaatgtccaccattggccatggctattgctttgcagattagagataagacattcaaggaggactctaacatcatagaattctcggtcacagatatcgcggcaggaattggctggaacagtggtgtggtcaaataccaactgaaggatctggagtgggtaaaagtaaatggatatcccaagcgatcgcccatcacggtgagcttctatgatttgggattccgcatcaaggtgccgggcgattttaccgaatcagagatcgacaacgctctggacactctctatacgcgatccgtgaaacaggagcgtacgcagctcatccagctgcaatatgtggcccatggattggctgctgtggcctacagctcttgtggccagtgctgcaatgcggattttccgcaggatcggggcgagcagctaaaggctatcgtgcgcaactactttgccaatgactacccacaggatctggagctggaaatagagccaagtaacgtgccggatgagaacatcatagacgacgttcatgctctaataaacatgtacccggacaatacatttaccggacgtaatattgcgcgcatctttcatggcatcatgagcccgaactatccggctgtcatctggggacgctgtaagttctggcgtgcccacgtcaaagtggatttcaatcgcatcctgcacctggccaatatggctattatcaagaggcgtacgtga

SEQ ID NO: 16743 - protein, 1579 aa, DROSOPHILA
MDDSVFKLKYQKYKLRVKVWEKDFKKKNGRVPSKYDIRDASQEIRDSYKMYYKLKTSFLEETLNDVLSEDGYDILEMSQASDFGVSMLDQDVSLNEGPQLPLDISALVGPQSSGNLEEIPQSVEGSFSNLIDLPNRQVLTNLVNRDENHVIRKFEAVEELPINQNAWGLNVSKKPPAPPQPVEASKSAPGHGKQPKAGASLKPSLSAKLFQSSRGFAKRNPRKPLSRCVSSSSSTTSLSSVPTDHHEELLDFETILIRKAQEYKEKQQAIANNPMLASEHSKESIKTLVDDGWLRRNTKENTLDEEVPFAEANNNSGTSKKTNFGLANLDLSKLKPTVKEEKVLQAKPDQMAIIQELQTDMNSSMNQKPDHLNHTPPASSQKSVAPKNKPPPSEQETDSDSDSVVAESEEEQEPQEYRQLSKRRKIVSTASGKVEVAAPVEIPNKVEPETETFAQENPDFSADEDQDATYVPENKKKDKAKRKQAAGKQKTTKPKAEPKPKTEKKAKVKAEKKPKAEKKPRNSKKAIAVEPAPDPEEDERQPLNPEDLKYVLALEAGDITSVPRINVQDLEEADATAQRYIRTFAAGPNPGLSEGSNIRVDEKRAAARKKLEERIAAGKLNENFVTINIQKKKFVRGKKSVNFSKYKKQQWRHKKRVAALSGPDMDMGGCDGGVLTCFQCGGVGHFAQQCKVKGDSLLPLSAQLEEDPSPFPTLAEAQEMASQGAVVAHSRNISRLPQAANAAILQGDELNESEEDDQESSGDEEVQQHPDPNWSSDEMDVDFEALDAAVEASLSQPVSQEKAASPIKTYVGHKIPEEFLKQAGLDTTASSSNRSQHGGVKPLYDLLPDGSVQDTTPEVLEALHMFGHTNFRKGQDRAIMRTLSGLSSLVTLSTGSGKSLCYQLPAYLYSRKVGAITLVISPLVSLMEDQVTGVPHFLRAHCLHTNQTAPQRMKIQQMIANGEIDILLVSPEAVVAGERATGFGAILRQLPPIAFACIDEAHCVSQWSHNFRPSYLMICKVLRKNLGVRTVLGLTATATLPTRVSIINHLGISDGERGIISDIPLPDNLVLSVSKDENRDAALLQLLNSERFEPCQSIIIYCTRRDECERIAGFIRTCVQDRREPTQDQTKKRKRVNWQAEPYHAGMPASRRRTVQKAFMSNELRIVVATIAFGMGINKPDIRAVIHYNMPRNFESYVQEIGRAGRDGLPSHCHLFLDAKGGDQSELRRHVYSNSIDRHVIRKLLQKIFVPCSCDKEASKRTALPIPLEGDGPRVHMCPGHEIGFSVEKTVEMLDIPAENISTLLCYMELDPRWCISVLSSAYVMAKVISYGGPKYLKHAAKECPPLAMAIALQIRDKTFKEDSNIIEFSVTDIAAGIGWNSGVVKYQLKDLEWVKVNGYPKRSPITVSFYDLGFRIKVPGDFTESEIDNALDTLYTRSVKQERTQLIQLQYVAHGLAAVAYSSCGQCCNADFPQDRGEQLKAIVRNYFANDYPQDLELEIEPSNVPDENIIDDVHALINMYPDNTFTGRNIARIFHGIMSPNYPAVIWGRCKFWRAHVKVDFNRILHLANMAIIKRRT

SEQ ID NO: 16744 - DNA, 6313 bp, DROSOPHILA
caaagaaaatacatctaccattgccccgctaaaagctttacatttgcagacggaaaggtaggattcagggcattagcaatctggcagcccgaggagcgaaaaggggaacaacatttttgctgaatgaaaatgtttgcctcaaagttgctccttccttttcccattttcacagagttcagtttatgagcgggttattttgattaatgttccttcaactggtgtcaactggtaggcggacaaaaaggagcccgatagcaaaattcagcaaagctggtaaggacttagtggatagtgaagtgtcaggcggaagtgaaaagagcagagcaacaattattcgatgaccacagaaggggagtggggagcgtattgacttagggcaaaaagtgatatccctgaacatcttagaaccctctttccttatcgacacacatttacttaggaccatctttttgacccaattcgttctgacatttttaattacttttagataattaatcccaagttcagataattcgagaagatttgtctgtaaaattgttagggaccttcccaccgtgattcctttaggttttcttttgatggtcccttctatcgaatgtcctttgggcttattgacaagctgtaaataatttggcatgacatgatcctgatagccttgtgcggtaactttgtccaccctgatccgtaagtctgaactccttctaaacgcaatttgtaaacctataaaaaaagaaaaaagcagctctcatattctttcgtaattatgtgaatgcaagttaaaagtttaagccgattgagccacaattttgtctttccaattgatattagcaaacagctatggtatagttattttaatacaatgccatctccatacatggttttttactctctgcgtacaatacagttaagttaagtaagccagaaaatttcaacgaaaattcccgcctcccaacgaagtgttgaagtcacaataatttgctttcctctcaattttcctttcgcagaaataagtcaaagaagtcggggaaatcgcactcaacgtccgcctttccaccaagacgcatgtaaacgcaaccggagcccaaagaaggcaagtggcagggcagggaaagatgccatcggcagatcagatcctgtttgtaaatgtcaccacaacggtggcggcggcggctctaaccgctgcggccgccgtcagcaccacaaagtccggaagcggcaacgccgcacggggctacacggattcggatgacgatgcgggcatgggaacggaggcggtggctaacatatccggctcgctggtggagggcctgaccaccgttaccgcggcattgagtacggctcaggcggacaaggactcagcgggagaatgcgaaggagctgtggaggagctgcatgccagcatcctgggcctccagctggctgtgccggagtgggaggtaataagcacaatgatagtatttcatttcattactaataataacggatagcttctgcctttttgttttttattaacgtttgacagcaaaaataaaatattcacatgcaaaccttaccttttaaaaaattgcgttataaatccccttttacttttgaccattattttgatcaagtatttgtatacccaaccgcctgtttgttcgtacttctgtctgtccgtccgtatatctgtccgtatgaacagaaactataaaagaatgtacaacaggaagttgagattaagcatattggttttagttaacttttacgcagtgcaaccaaaatttaaaaaaatgttataattttaatagattctatcatttgtcttgccaatttctattgaaagttcgcctgccacaaatttcacttatattaagtgtgaccgtcaccacgtagtgcaagtgaccctccctagaccaccaaactggtagtttctactctttcaataagtctaaataccagtagatcttatttatgttggtttaaagctctccctaacttcttttctattttaactaggcccttctcaccgccctggttctctcggtcattatcgtgctgaccatcatcgggaacatcctggtgattctgagtgtgttcacctacaagccgctgcgcatcgtccagaacttcttcatagtttcgctggcggtggccgatctcacggtggcccttctggtgctgcccttcaacgtggcttactcgatcctggggcgctgggagttcggcatccacctgtgcaagctgtggctcacctgcgacgtgctgtgctgcactagctccatcctgaacctgtgtgccatagccctcgaccggtactgggccattacggaccccatcaactatgcccagaagaggaccgttggtcgcgtcctgctcctcatctccggggtgtggctactttcgctgctgataagtagtccgccgttgatcggctggaacgactggccggacgagttcacaagcgccacgccctgcgagctgacctcgcagcgaggctacgtgatctactcctcgctgggctccttctttattccgctggccatcatgacgatcgtctacatcgagatcttcgtggccacgcggcgccgcctaagggagcgagccagggccaacaagcttaacacgatcgctctgaagtccactgagctcgagccgatggcaaactcctcgcccgtcgccgcctccaactccggctccaagtcgcgtctcctagccagctggctttgctgcggccgggatcgggcccagttcgccacgcctatgatccagaacgaccaggagagcatcagcagtgaaacccaccagccgcaggattcctccaaagcgggtccccatggcaacagcgatccccaacagcagcacgtggtcgtgctggtcaagaagtcgcgtcgcgccaagaccaaggactccattaagcacggcaagacccgtggtggccgcaagtcgcagtcctcgtccacatgcgagccccacggcgagcaacagctcttacccgccggcggggatggcggtagctgccagcccggcggaggccactctggaggcggaaagtcggacgccgagatcagcacggagagcgggagcgatcccaaaggttgcatacaggtaagactcttcgtaatcgtgaagatattgcaagcccataattgttttacacatttattttaataaaaatatttgtaataaagggtcttgtgtttacaactgctaataagtctagataataaatacatatacatattatacccgttacttatcgagtataagggtatactagattcgttgaaaagtatttaacaggccgactatataaagtatataaattcttgatcaggatcaaaagccgagtcgatctaggtatgtccgtctgtccgattgtccgtatgaacgttgagatctcaggaaatataaaaactagaaggctcagacaaagacgcagcgcaactttgactcatgttgccacgcccacaaaccgcacaaaactgccccgcccaaacttttgaaaaacgtcttgatattttttcatatttttataagccttgtaaatttctatctatttgccacgctagggtatctaatattcagggaaatcgacaaaaaaattaaaaatctaaagtgctcttttatttagagagccacatggaacaagcgatataagttgtataagttgtatgggagaaatggctttttccatgccacttgattaattaaacttttcctcacctcgattccaggtctgcgtgactcaggcggacgagcaaacgtccctaaagctgaccccgccgcaatcctcgacgggagtcgctgccgtttctgtcactccgttgcagaagaagactagtggggttaaccagttcattgaggagaaacagaagatctcgctttccaaggagcggcgagcggctcgcaccctgggcatcatcatgggcgtgttcgtcatctgctggctgcccttcttcctcatgtacgtcattctgcccttctgccagacctgctgccccacgaacaagttcaagaacttcatcacctggctgggctacatcaactcgggcctgaatccggtcatctacaccatcttcaacctggactaccgccgggccttcaagcgacttctgggcctgaattgaggctggctggcgggggcgggtggaagatataaaccgggccaatcatggttcgagcgggagagcgtaactcaaagtttgtgccaaacttaaatggtcgtgtatgcgttcagcggagatctcagtctatgtacagttggacccccagttgatgaacttccgagttcaacttctctaacacatatatactttcaaatgcgttcttggtgaactcattttgaagaagtggatgaatttggtaaagtgtaatagattgaatataatttttaatgtttaacgtttcggcaaagtgaaaagcccccacattggaaagtcaaagatgagactcgagtgtatatatagtttcaaactaagttattatttctagccgtaattaaaatactttcatttagttttgaacatttttttaatatattgttgtttggaatcgattgagatgtaccaccacattaagcgtagattgttcaatactcatactaaaatgggttgtgctgcgattaaagtgaggatgttgcctcaaggcacagctactaggaaaatcataaaaattacatggtaaagaattatacatgcattatactccagctaagtggcatcccaaacgagaatagcatcaaattgaatttaatacaattaaattaaatgtttaggcacaaagaattgtggcaactttcgtgtttcaccctaagcgtatggataaccaaaaaggtgtttgttaaattaaatctgcgctcaagatatgtaagcaactactaagctaaataataacttccaagagagaaacgttttctaggcattactttaacgatttgtatttatatgtactttaattgtaggtaaacgataaaccactatacctaatgtatactttcaaatacgctttggactatttgttaaataatttaacgattaattgtttttatggcatagcaactattgtgttgagtgggcagcttaaagctagcacatcgaaacttacttaaggtagataaatgtttaactgcacgttacgaaatgcaacagagttggcgaaaggacgtaattcaatggatgtgttaactcaagtacatgctatatcgtaaatgtatatcacaatttatgtcttttaacgacgatgtacgatagtttcactaattatattgtttaacgagaaagagcgagcaaagcgtaaatgaaacaaataaaagacacattcgaattaaagttataagaaaaagcgtttgaatttatctagattggtctaccttcttaagggtaagttaattaggtttcaaaacgaaagactttttccctcttaaaagatctagctgaaaaaatgattacctagcaagacccgtagttttagcgacaccttctgataacttacattatatatccttcgttacaatgtatttcttgtgcttataatttttaactaaataattttcaaaacttccttcctctaaacggtttcgagctattggacattctcattgctgccagtacagaaaataattaaattcgtttgattattttagcagaatagtttccctttggcccaaatgaaaacaaacagaaaacgaataagttggtttttaaattttattgacacggttggaagaacctgtaatacataaaatgaatcagtgcatcagtgcactttaaagtacaataatttttcatatttacattatctcttcgcctgactgcaaagtacgcggcatggcatatcgttacaacaaagacactagaataacactagaattattctaaggggtctttggttacaagctgtttacccgcaactatcggctgcgttcgatagccattcgcagggaacgccggtttgtttcaggtagctcaattgtctcaccactagcaaagtgacggcttgtaaattgttgggatttaaaatttaaaattgtctgctgcacagggcaagatcctaaacattggttacctgagagcgcggatttccgcgaagcgagacgcgttcacagacaagcagaccgcatcccttcgcagagcgcatccctgtaatgaatataagccagcgacgcacttgaaagaccagccagaccaatggagacctcggaagcggtgaatacgtgtgaggagggagaccagctgaacggctccttccgcctgcagtgctcgatgtcctccgtggatatggagagcgagagtgacctctcgctggcattcgagcgcgaggagcaaataccggatgg

SEQ ID NO: 16745 - DNA, 3125 bp, DROSOPHILA
gcagaaataagtcaaagaagtcggggaaatcgcactcaacgtccgcctttccaccaagacgcatgtaaacgcaaccggagcccaaagaaggcaagtggcagggcagggaaagatgccatcggcagatcagatcctgtttgtaaatgtcaccacaacggtggcggcggcggctctaaccgctgcggccgccgtcagcaccacaaagtccggaagcggcaacgccgcacggggctacacggattcggatgacgatgcgggcatgggaacggaggcggtggctaacatatccggctcgctggtggagggcctgaccaccgttaccgcggcattgagtacggctcaggcggacaaggactcagcgggagaatgcgaaggagctgtggaggagctgcatgccagcatcctgggcctccagctggctgtgccggagtgggaggcccttctcaccgccctggttctctcggtcattatcgtgctgaccatcatcgggaacatcctggtgattctgagtgtgttcacctacaagccgctgcgcatcgtccagaacttcttcatagtttcgctggcggtggccgatctcacggtggcccttctggtgctgcccttcaacgtggcttactcgatcctggggcgctgggagttcggcatccacctgtgcaagctgtggctcacctgcgacgtgctgtgctgcactagctccatcctgaacctgtgtgccatagccctcgaccggtactgggccattacggaccccatcaactatgcccagaagaggaccgttggtcgcgtcctgctcctcatctccggggtgtggctactttcgctgctgataagtagtccgccgttgatcggctggaacgactggccggacgagttcacaagcgccacgccctgcgagctgacctcgcagcgaggctacgtgatctactcctcgctgggctccttctttattccgctggccatcatgacgatcgtctacatcgagatcttcgtggccacgcggcgccgcctaagggagcgagccagggccaacaagcttaacacgatcgctctgaagtccactgagctcgagccgatggcaaactcctcgcccgtcgccgcctccaactccggctccaagtcgcgtctcctagccagctggctttgctgcggccgggatcgggcccagttcgccacgcctatgatccagaacgaccaggagagcatcagcagtgaaacccaccagccgcaggattcctccaaagcgggtccccatggcaacagcgatccccaacagcagcacgtggtcgtgctggtcaagaagtcgcgtcgcgccaagaccaaggactccattaagcacggcaagacccgtggtggccgcaagtcgcagtcctcgtccacatgcgagccccacggcgagcaacagctcttacccgccggcggggatggcggtagctgccagcccggcggaggccactctggaggcggaaagtcggacgccgagatcagcacggagagcgggagcgatcccaaaggttgcatacaggtctgcgtgactcaggcggacgagcaaacgtccctaaagctgaccccgccgcaatcctcgacgggagtcgctgccgtttctgtcactccgttgcagaagaagactagtggggttaaccagttcattgaggagaaacagaagatctcgctttccaaggagcggcgagcggctcgcaccctgggcatcatcatgggcgtgttcgtcatctgctggctgcccttcttcctcatgtacgtcattctgcccttctgccagacctgctgccccacgaacaagttcaagaacttcatcacctggctgggctacatcaactcgggcctgaatccggtcatctacaccatcttcaacctggactaccgccgggccttcaagcgacttctgggcctgaattgaggctggctggcgggggcgggtggaagatataaaccgggccaatcatggttcgagcgggagagcgtaactcaaagtttgtgccaaacttaaatggtcgtgtatgcgttcagcggagatctcagtctatgtacagttggacccccagttgatgaacttccgagttcaacttctctaacacatatatactttcaaatgcgttcttggtgaactcattttgaagaagtggatgaatttggtaaagtgtaatagattgaatataatttttaatgtttaacgtttcggcaaagtgaaaagcccccacattggaaagtcaaagatgagactcgagtgtatatatagtttcaaactaagttattatttctagccgtaattaaaatactttcatttagttttgaacatttttttaatatattgttgtttggaatcgattgagatgtaccaccacattaagcgtagattgttcaatactcatactaaaatgggttgtgctgcgattaaagtgaggatgttgcctcaaggcacagctactaggaaaatcataaaaattacatggtaaagaattatacatgcattatactccagctaagtggcatcccaaacgagaatagcatcaaattgaatttaatacaattaaattaaatgtttaggcacaaagaattgtggcaactttcgtgtttcaccctaagcgtatggataaccaaaaaggtgtttgttaaattaaatctgcgctcaagatatgtaagcaactactaagctaaataataacttccaagagagaaacgttttctaggcattactttaacgatttgtatttatatgtactttaattgtaggtaaacgataaaccactatacctaatgtatactttcaaatacgctttggactatttgttaaataatttaacgattaattgtttttatggcatagcaactattgtgttgagtgggcagcttaaagctagcacatcgaaacttacttaaggtagataaatgtttaactgcacgttacgaaatgcaacagagttggcgaaaggacgtaattcaatggatgtgttaactcaagtacatgctatatcgtaaatgtatatcacaatttatgtcttttaacgacgatgtacgatagtttcactaattatattgtttaacgagaaagagcgagcaaagcgtaaatgaaacaaataaaagacacattcgaattaaagttataa

SEQ ID NO: 16746 - protein, 601 aa, DROSOPHILA
MPSADQILFVNVTTTVAAAALTAAAAVSTTKSGSGNAARGYTDSDDDAGMGTEAVANISGSLVEGLTTVTAALSTAQADKDSAGECEGAVEELHASILGLQLAVPEWEALLTALVLSVIIVLTIIGNILVILSVFTYKPLRIVQNFFIVSLAVADLTVALLVLPFNVAYSILGRWEFGIHLCKLWLTCDVLCCTSSILNLCAIALDRYWAITDPINYAQKRTVGRVLLLISGVWLLSLLISSPPLIGWNDWPDEFTSATPCELTSQRGYVIYSSLGSFFIPLAIMTIVYIEIFVATRRRLRERARANKLNTIALKSTELEPMANSSPVAASNSGSKSRLLASWLCCGRDRAQFATPMIQNDQESISSETHQPQDSSKAGPHGNSDPQQQHVVVLVKKSRRAKTKDSIKHGKTRGGRKSQSSSTCEPHGEQQLLPAGGDGGSCQPGGGHSGGGKSDAEISTESGSDPKGCIQVCVTQADEQTSLKLTPPQSSTGVAAVSVTPLQKKTSGVNQFIEEKQKISLSKERRAARTLGIIMGVFVICWLPFFLMYVILPFCQTCCPTNKFKNFITWLGYINSGLNPVIYTIFNLDYRRAFKRLLGLN

SEQ ID NO: 16747 - DNA, 2746 bp, DROSOPHILA
cttccaagcccaacttgaataaatttaataaatatctccctttgtcaggatatcaaacattgcagttcatgtcactttaaaaacatttgatccaagtattccaaagtagaaagtagttattaaggtaaaagtgttaggcaagacattattattaaattgtcactactttttggtgatattttctaagagcaccgatctcattattatatgaatatatggttgacttaggaactgtttgatcatgcgcggtatccggataaaaacaagattaagagagcggaaagacggcgatgtcaaggctgcgtcacagatcggaaatagacatcagctacgattttggcgggcagaaatatgctgtttgccgtttcagttaccacaattactccagcaggctgatcaaatattgatcgacttgaggacccccaccatgtgagcccactacgtcactgctgacggccacaaagggggggggggggtgtggtgtggtgtgatgtctttgcgataagaatttcggctacaatgccgcgaatttgttgcctcagccgggaactttcctttgccatcgataacaagataacaaataaaatgatttaatttatacttatgaatcgaaaactcccacggcgtcgcattgcagtaactggcttgtcagttactctcaaactgtgtccacagcttttccgcggtggcgcgtagaaaagctcacgccaccttgcagtggctctaaaaacttttaaaaactaaatctctttagttagattagatctctcatattacaagccaattttatgtatatccctgatcttgatgtttatattttttaaattcagtggcttgacatcccagaagtttggagtactaatctcacgtctacacatttttagttcttgaacagaatatatttaacaaaatataaatattcaatgattttgaaagaaaatggtacggtctatagttttgtttcggattttattaatctacagttttgggtatgcttattttagatcctgttggttcgcaggtaatcttcatcgtcatctccatcggcatcctccaccacgctgtacgaattcttgccggcaccatccttggccagatgcgtttcgaagaactcctcgacagtgtctgtgttccacttggttatggacaacgtctcctgcactttgccactggcatctaggagcttaaccacgggatccagtcctcttacgtatttgatctgcaggttggggaacttggcaggtcggccgctttgaataaaggcctgaatctgcggataggcccggaatttgcaggtgcacacctccagaattgccttggcatatgtccgctgtgccgccggctgctgatccaaagtgcagcattgcttacactgaggcctgaaatgttaaaaatgttttggatgaataaaaaagagcaatgggctcaagcagaaactataaaaagttaatataatttttgttattaaaaactgaaggaagaatcatatttagtcagtggtatggaggagcttactaagtcaagctaagcatttttggttggaatatttaaaatgaggtatgaaatttaacctgatctaattagattaacatattaattaaacaattttcaggtcttcttatggaatgattatagcatagttcatgggtatctttacaactccaaagctagattaattaaatgttattgaacccacttgatggtatccaatccgaaatcatccagtttttcgcaactggaacacattaactgggccttaataaaacccaacgcccggcagtcggcggccgtcaattcggcttgaatttgctggcactgtagggtataaaatatatattaaaaacatgtcttagcttcagacataacttacacttaaagccagtagaagaaatatagcacatttatgcatttttgtggctaaattctaattaaatttactacgtccacgtcgttgtttacaaaattttcttagcttagtgatgagtagaagggaaaataacattatttaggcttatcgattatattcgggttgcttgtcttttcatcgtttagggtattccgtatactgtttatgaattagacaattaatcaaacttttgaacagctttaataaacttattattattatttcttgatattttttcagcaatttgaaacttttgtcactataaaagtgtacaaaataatttcaggtttttatattcaagtacgcaagtttattttccgatgttaataactaatttcatgtgattcgatagcttatcacgcttacatccctacaatcgatacggactgcccagcagctggccaccactagctcagaaatcgaagattattcgtggtggtgcatttgtttttttcgcttcgctcgcgaagtgagcccagttttaaattatttaaattgcgtatagtgaagccacttgaaagcgaaacgcctactgtcgcagttctgccaaaaaaccaacagtattagctgtgtgcgtgtttggcaacaacaagtcaacaaaattcgaacaaaatcaataaaacggaaacgtgagagagcgctgcgcaaaagagaaaagcgaacgcaatcgcaatcgaccaacgcatagaagaaaacaaggtgaataaatagaacatggcatagaaaaggcgaactagaatcaaatcgaattaaaatcgggtacagaaatagacgtgaaaagaaagggcgaagaaagggaaacaaataaccgttacaggagcactcctggagatttaaggc

SEQ ID NO: 16748 - DNA, 429 bp, DROSOPHILA
atgtgttccagttgcgaaaaactggatgatttcggattggataccatcaagcctcagtgtaagcaatgctgcactttggatcagcagccggcggcacagcggacatatgccaaggcaattctggaggtgtgcacctgcaaattccgggcctatccgcagattcaggcctttattcaaagcggccgacctgccaagttccccaacctgcagatcaaatacgtaagaggactggatcccgtggttaagctcctagatgccagtggcaaagtgcaggagacgttgtccataaccaagtggaacacagacactgtcgaggagttcttcgaaacgcatctggccaaggatggtgccggcaagaattcgtacagcgtggtggaggatgccgatggagatgacgatgaagattacctgcgaaccaacaggatctaa

SEQ ID NO: 16749 - protein, 142 aa, DROSOPHILA
MCSSCEKLDDFGLDTIKPQCKQCCTLDQQPAAQRTYAKAILEVCTCKFRAYPQIQAFIQSGRPAKFPNLQIKYVRGLDPVVKLLDASGKVQETLSITKWNTDTVEEFFETHLAKDGAGKNSYSVVEDADGDDDEDYLRTNRI

SEQ ID NO: 16750 - DNA, 6554 bp, DROSOPHILA
agctcagctatttattagtgaaatgtcaaaggtcaaatgtctttctcatatgtgtgtgtatatatttaattctcattttatcgtaaattaaacatcataaatccttataatgctgttatagctcgttcttttgtttgttgtggttgctgatgggcttgaatttgttggttttcctaatttttcagtatgtcgcatgcaacaggttccgacaatagattgctagttagcattcgtgtttaatttgcgtttacttataagataggttctcattcagttttatataaaaatagttgttttcttgtttatttacgcttaattaaatgttgctgctgccatttgctcttcctgggattaaatactttgcgctgcctggcggcggaaaattaaaagttaacacaaaaacagaaaacatgaatggaaaacatacaaaattcacaatggcccaagtacaagagcatacgtacattcatactattattttgtttatttttttgtggatttgcattttaagtagctgggttttaaattcatttgcttaacataagatacatatacaattgtttaaagcgcgtttttaaatgcaagtgtaacacaaaaataataatcgcatgcaaagtatgtgttaaataataattagaaagtagcagcagcaatggatttttcgcggtttttccgggttggtttgctttttattgggagggcttgggtggaaattgcctgtttctgtaatcagagtcggacttttcctttgctagcatttcttctcttctcgtttaacattgcacaagtttcgattgttatcattatcttgctttagttatgtgtatataatttcttaaagcgttccatagttcttcattctcataattgttggttctcgctactataaaatgttaaatgttgctgttgtggggcatgctttaggtttacttttttctcgccttttttttttgttacattaactttaaacttaatagattgttagagttgtttcttttttactgttgctgttcttttggaagttggacaaactctgcggttgcttgtcagtttatcgtcgttgttggcctcctcttccctttccgcatctgtttcgacattaaatgtcctgcaaaaagacaaacgatatgtttagaaatctagttattatagaccagcaacacaattccttacctattctccgtttgaggcatgctgctgcagggttaggatcagctgctccttctgctcgacgatgccacgccagtgctcgtcctgctcacgagcacgctcttccaagtccatcaatgtgtttgtctgttcgtaagattttattgtcattggataggttataaattactatagggcaaaagtaattaccgtcttggtgaccagctgggtgagcttgtcgttgcactcccgcagctgcaggttctgtttgtgcagctcctgctgctcggcggcggaggaggattggctattcgaactactattattgctactaatattgttgtgggtgctattgtggttgctactgctactgttgcttgattgtgtggacttatgactactgctgctctgcttctcggacttctccgcgtcgagcttctgccgcagcttatcctgttgctgcttgacatgggtggccaggacctgttccagccactggtcaaaggatgcttgcagggcatttcccgactgcgctttcacagcgtcgggataaaggcgctggtagagatcccggatcctctgctgctcgctcttggctgaactggcactacccccgccattggcggccactgccttctgttgctgcagctgcagctctttgtgttgttgctgcaaagattaatgcatacaattagtttacaatgatttagactctacgaattttcagatggaatcatataggcaagcagaagaagctgacaaagatcatgcacttacgcctacggactgcgctgaatttgttttcgtcttagctgttaatgcttcggcattttgcaacgcttcaatcaacttccaatttttcatacgcacgtcctgacgaaacacgaatacgtggcaattagtaaaggattcaggaaaagcaagaaggatgcagatgcaacgggcaggacgaacgacggcataacgactcaaatgcgacgcgattacatatagttgggctcaaattggtttgaaatccttttcaattcaattatccgcattcattattaatcttcatgcataagtcttgacatatatatgtatcaatttcagtgattacaaagtaaagtgcaataaagtttaaagtaggtggtataaaatagggaatgtaatgggaatgcaacacaaaaagaaaagttttttaatatatatttctagttatagagttcatctctatactcacattatttttctcccgctgctcctggagctcctgttgcagatgttgctccttagcctgcagctgctcggcccgctgttgagcctcctggagctgcgactgcagagcgttggcttgcttctgctgctgggcgtgggcatccgtcagcgagccgacctgcgagcgaagagcactcagctcctgctgcttctgggccagcgcttcggtctgaacctgggcctgctccgactgggcggcggtggcctgaaccgcgctgttggcggcttgggtgagctgttggctgagcgcaacgttgcgagcctctaggacggacaagttctgtcgcagctcctgcaactcggcggcgtggacgcgctgcagctccgactgagtctgttgaacagcgctcagctcctgcttgaggtcggcgttctccgcctccagctgcttgcgctgctctagctcaaagatgctattgttctggcgcgcttccagctcttcgcgttgcagctccagggcttgcagctgctgagcctgctgctgaatcacctcgttcttctgctgggtctctgcattaacgaatgcggtcatttccgccaggcacttttccttgtgtgcgagatcctgttgcaaatgttgcaactgaaccagatcctgcgaattggcttgcttctccctccgaagggtctaaaacaaagaattaatgatttgtaacgaatttgaatataggctatgtttgaaaatattcttataaatctcagaagcttttcttaccgtaagctgttgacgctcaagcgtcaacttgtcattcagactggacagctcctggttgagggcggctagctcctgctccttgccttgcaacttatcgatataagcctggtttcgggcatgcatctgggcgcgttctgtgttaacctcttggcgtagttcgcgaagcttagcctgaattccgatggaggcctcctgctcctcggccaacagcttttccttctcttccagctgacgcttgagtttctggcagatgtcatccgaccactcagagtgcgaagcgggcatatcctgttgcttgtttagcagatagtcgatgagtatctgaatctctgagcgatttagctcggcacgagaaaatacgttcatcagagcgttgacaccaatggtctggttctggtgatcggccagtttatccaaagcatgagccaaatccttacccgttagggtttccttttgattctgtttcttgttttgctgctgctgcttggttttgttgttggcctggttgtgttgcgttttgggtgagccattctgctgctgctgctgttgcttgaggatctgcttggtcactacgggtgcctctgtttcgacagctacgaccttctccttcttggacacattgcctccggcgatctttttctgactttgctgcttgttgttgttgtcttctttgcgttccttttgctcttgcttcttcagctccaccacatccttggggatcttggtttcaaaattattcaaagttggtgtctcctcggcgttagctgcaggcttaacagcaacagtttcgttcttgttgaccaggattccggctgtcttgttgttggctccgttacgtttatccttctttccctttttgccagccccagaaggttggttctccttctcagccacgctactgggtcgtcgctgatcagtgaggacctctgcatcgggttcaaattcaacatgctgcttggagagaccgggttcctcgccagccacggagccctgaccctccgactgaccatcggagtagtcttcggcttcctctggttccggctcgttgttcacatccctctgctgttcccgctgacgttgcttcttttcgcgcttaagttccttcttcttgggcttcttggtagcggcaccaccggccgccttgtagagattggcgctcagggcacgcttctcggctaccacctcctcaaaagtcttgcgccggaagatcttgttgatgaacaggaacgagagcagcgaggcgctgaccacacaaccgatgacgatcagtatgtggaagtccatatttgcatatctttccggtttagccgtggatttttctcagggatctcctttgcgaatgctgttgaataaatagagagtttctcgttactattttgtattttagcaatattagaaggtaaatatttctaggtatttacatttgcaggtgtaaatacatatgaaaaaattaaacaataatgttcgatttcatctaaaaggggaagcccggaattacggccacgttttctccgtttggtttccaaggaaagcaaccaacaaagcaaaaaataatctcaagtgtggaaatgttagaaatgctttttagggtcactcgtgtatatatttttgctatcaaactcatttcgtagcattatcagcttttttcagcttgagaaccactacaatgtagtataaactgatgacgtgggggtcaaaaatcgaaaaacgccgaagaaatgcccactaaaaacgacagatcaacgacactacattcaatggcaattacgctttatatagccggattgtttgagttgaacgtgcttatcggtttaccggccggaaaatggttcagagcgcaacaacacaagttctccttttgtatgaacacgttgttattgctgcagttgactgggcttgctggacgttatattaataaaaacgctgtgcggttgataatttcattgttgttgttgctctgctgagataaaaaaaatgcactgctgaatggctcaatattcctggtattccggattatacagctcaactcgccaataaatccccatgaatttcaaatttaggcaaaaaggtcatttgaatttcatttggcgcaggaagggcgataagaaatctcagctggaattatcgattcctcaaagaactcagcgattaagacggaaaaatgtattccgggcagaagtggggagccgacaaagtcacaaagaataaaattagcttatgaaacagcagctgctgggcagccttgaacgaaagttggtagacatttccagcacccaaaggtgttgacgcagattgaaaggaactcacataacaatccgaaaaaagaataacaatttaaaataactcaaagtctagattctgacgcacacgtatgcaaatttgccaattcgcaaaaaaaatcaacactgtttaatctattttcgttaaactccacgagtctcttccaatggacacgatgcgaatgccaaaggctagtgaaaagattcgcagcagagctgggctcgcaattcgagatctctcctcagctctctacacttgaagcaattcccaagatcgactaaatatttatttttgaataggttattttctggatgttttctgtaagtgcaagttacgttttatgagagcaagattttattgaagaatcagcaaacaaatttgcaataagtcttgagtttaaaatatgcgataacattacttgtatcatcaaaataaaatacgtttatatatttactccgcccagttatctttgaaactttaaaataatatatatttgtagtttgtacatttttgaaataaaaaatactaacattactaacagaacgttttattctcagtgtgcttgcgctccgtggcacttttctctcttcgctcccaccacagttagaacaaaacttgaaatttcgctgactccgcgagctcagtggaagaattcacaaattgcaaaaatttcaattcaaggttgttgctctctgcggctgcgataactggcaggtcgggtatttattttcctctgttggcttgtcaagttctggcttcttatttctgctgctttgctggctcgcgtcatgtttctggctaaaagatactgactgtgtttctgtttcttcttatccacaatcaacaaacatttctaaggggctttcaaaaatactgggttacgtgatactgggtagatgaataatccgtatacagcaaatctttccaggtttactctatctacatataactaactcttgatttcatttattaacaaatgtaaccatttttagtgtttccaactgttgtattgcgaccattgtgacaatttagatggttcatagcatcttcactacaatttatgaaagtttttacaactccaattgtctattatctagtcctatgaaaccgacattcattattacggatgggtggactgaccacaaagttaaat

SEQ ID NO: 16751 - DNA, 2821 bp, DROSOPHILA
tggagtttaacgaaaatagattaaacagtgttgattttttttgcgaattggcaaatttgcatacgtgtgcgtcagaatctagactttgagttattttaaattgttattcttttttcggattgttatcattcgcaaaggagatccctgagaaaaatccacggctaaaccggaaagatatgcaaatatggacttccacatactgatcgtcatcggttgtgtggtcagcgcctcgctgctctcgttcctgttcatcaacaagatcttccggcgcaagacttttgaggaggtggtagccgagaagcgtgccctgagcgccaatctctacaaggcggccggtggtgccgctaccaagaagcccaagaagaaggaacttaagcgcgaaaagaagcaacgtcagcgggaacagcagagggatgtgaacaacgagccggaaccagaggaagccgaagactactccgatggtcagtcggagggtcagggctccgtggctggcgaggaacccggtctctccaagcagcatgttgaatttgaacccgatgcagaggtcctcactgatcagcgacgacccagtagcgtggctgagaaggagaaccaaccttctggggctggcaaaaagggaaagaaggataaacgtaacggagccaacaacaagacagccggaatcctggtcaacaagaacgaaactgttgctgttaagcctgcagctaacgccgaggagacaccaactttgaataattttgaaaccaagatccccaaggatgtggtggagctgaagaagcaagagcaaaaggaacgcaaagaagacaacaacaacaagcagcaaagtcagaaaaagatcgccggaggcaatgtgtccaagaaggagaaggtcgtagctgtcgaaacagaggcacccgtagtgaccaagcagatcctcaagcaacagcagcagcagcagaatggctcacccaaaacgcaacacaaccaggccaacaacaaaaccaagcagcagcagcaaaacaagaaacagaatcaaaaggaaaccctaacgggtaaggatttggctcatgctttggataaactggccgatcaccagaaccagaccattggtgtcaacgctctgatgaacgtattttctcgtgccgagctaaatcgctcagagattcagatactcatcgactatctgctaaacaagcaacaggatatgcccgcttcgcactctgagtggtcggatgacatctgccagaaactcaagcgtcagctggaagagaaggaaaagctgttggccgaggagcaggaggcctccatcggaattcaggctaagcttcgcgaactacgccaagaggttaacacagaacgcgcccagatgcatgcccgaaaccaggcttatatcgataagttgcaaggcaaggagcaggagctagccgccctcaaccaggagctgtccagtctgaatgacaagttgacgcttgagcgtcaacagcttacgacccttcggagggagaagcaagccaattcgcaggatctggttcagttgcaacatttgcaacaggatctcgcacacaaggaaaagtgcctggcggaaatgaccgcattcgttaatgcagagacccagcagaagaacgaggtgattcagcagcaggctcagcagctgcaagccctggagctgcaacgcgaagagctggaagcgcgccagaacaatagcatctttgagctagagcagcgcaagcagctggaggcggagaacgccgacctcaagcaggagctgagcgctgttcaacagactcagtcggagctgcagcgcgtccacgccgccgagttgcaggagctgcgacagaacttgtccgtcctagaggctcgcaacgttgcgctcagccaacagctcacccaagccgccaacagcgcggttcaggccaccgccgcccagtcggagcaggcccaggttcagaccgaagcgctggcccagaagcagcaggagctgagtgctcttcgctcgcaggtcggctcgctgacggatgcccacgcccagcagcagaagcaagccaacgctctgcagtcgcagctccaggaggctcaacagcgggccgagcagctgcaggctaaggagcaacatctgcaacaggagctccaggagcagcgggagaaaaataatcaacaacacaaagagctgcagctgcagcaacagaaggcagtggccgccaatggcgggggtagtgccagttcagccaagagcgagcagcagaggatccgggatctctaccagcgcctttatcccgacgctgtgaaagcgcagtcgggaaatgccctgcaagcatcctttgaccagtggctggaacaggtcctggccacccatgtcaagcagcaacaggataagctgcggcagaagctcgacgcggagaagtccgagaagcagagcagcagtagtcataagtccacacaatcaagcaacagtagcagtagcaaccacaatagcacccacaacaatattagtagcaataatagtagttcgaatagccaatcctcctccgccgccgagcagcaggagctgcacaaacagaacctgcagctgcgggagtgcaacgacaagctcacccagctggtcaccaagacgacaaacacattgatggacttggaagagcgtgctcgtgagcaggacgagcactggcgtggcatcgtcgagcagaaggagcagctgatcctaaccctgcagcagcatgcctcaaacggagaataggacatttaatgtcgaaacagatgcggaaagggaagaggaggccaacaacgacgataaactgacaagcaaccgcagagtttgtccaacttccaaaagaacagcaacagt

SEQ ID NO: 16752 - protein, 842 aa, DROSOPHILA
MDFHILIVIGCVVSASLLSFLFINKIFRRKTFEEVVAEKRALSANLYKAAGGAATKKPKKKELKREKKQRQREQQRDVNNEPEPEEAEDYSDGQSEGQGSVAGEEPGLSKQHVEFEPDAEVLTDQRRPSSVAEKENQPSGAGKKGKKDKRNGANNKTAGILVNKNETVAVKPAANAEETPTLNNFETKIPKDVVELKKQEQKERKEDNNNKQQSQKKIAGGNVSKKEKVVAVETEAPVVTKQILKQQQQQQNGSPKTQHNQANNKTKQQQQNKKQNQKETLTGKDLAHALDKLADHQNQTIGVNALMNVFSRAELNRSEIQILIDYLLNKQQDMPASHSEWSDDICQKLKRQLEEKEKLLAEEQEASIGIQAKLRELRQEVNTERAQMHARNQAYIDKLQGKEQELAALNQELSSLNDKLTLERQQLTTLRREKQANSQDLVQLQHLQQDLAHKEKCLAEMTAFVNAETQQKNEVIQQQAQQLQALELQREELEARQNNSIFELEQRKQLEAENADLKQELSAVQQTQSELQRVHAAELQELRQNLSVLEARNVALSQQLTQAANSAVQATAAQSEQAQVQTEALAQKQQELSALRSQVGSLTDAHAQQQKQANALQSQLQEAQQRAEQLQAKEQHLQQELQEQREKNNQQHKELQLQQQKAVAANGGGSASSAKSEQQRIRDLYQRLYPDAVKAQSGNALQASFDQWLEQVLATHVKQQQDKLRQKLDAEKSEKQSSSSHKSTQSSNSSSSNHNSTHNNISSNNSSSNSQSSSAAEQQELHKQNLQLRECNDKLTQLVTKTTNTLMDLEERAREQDEHWRGIVEQKEQLILTLQQHASNGE

SEQ ID NO: 16753 - DNA, 29417 bp, DROSOPHILA
attaatttattcgtagaattacagaagtgaatatgtacaaaattatgttacagtagagcttcccccatttaccttaaattttcacccaagttagttatgattttcgtacttttattaaatttcctcctcgttctgcaagcttttgtggctgcgtgggttcggtcgcagctttcagcgctgctttcccagcccgactttcccggttttcagatgccacctggctcctggctcctgttggcaatcgggcacgttccccagtcggcggcacacaaatgttgcactgctccacattttctgggagttggccgaattccggtttagtttggttcaacttacgtgctagagagttaacggcgtatttatagtacatggtctttaactaatgtatatcaagttttataaactctttttcattgtagtatgcttaatgtactcatataatatatttcgtagaactattcattgatttctcagttggttcagttgaatgtcatcgagatgatgatccttgaaaggaagacacagaaagatgttcgaaagaaggtggacagggaaagttatacgctaacgcgttgtagtggattcttaaagttttcaaaactttgtggatacactataaataagttaatttatcaattaatcatctttaaccgtttaacaaatacacacagttatcaatagtgaaacttaacagagcggataattttcattacttttttcccgattaattggtaaaaaggtaacagaacgaactcaacagaggagtttgagcaaaatagtaaattaagtgtctctgctccgaaaatgagctataaacatatatgtgagaaacatctaaaaccttaagttagtcttaaattccacagttagccacatgtacatacatttaatcctaaccagacacacgaacacacaaaacacctgtctcggtttgaggatttcccccatcatcgtgcttacagctgaaacatcattttaactacaacttaactatttatttttataatacaactttgtcgacctcgggcagtggcatcaacccactgctaccaccgccgcctccaggacctgctccacttcccgttgcgacgacggcaaggacattgcctggaatcccagatccacctcccgtgccaccgcctcccaacggcgatgatgatgaggctccaggtccaggtccatctccagatcctcctccgccatccgacggcagctggctgctggctttcgccttatcgtgcacgtacatggcggccagggcattgaaacgtggaccccagttctgtagatagttaaagtcttgattctcatcatcggtgcctggaattgcacaggggagagcgagcagtgagtttaagcgatttctgcggaaggtggggcaaaggatgtgtcggaaatggccgtaaaattacgatatttgattgaaccccgaaatctaattcgtactcaaggtgattttagataatttaaatgcagacgggagtcaagggacaatttcggtttaacatttatgccaaggtagaacattcacgaaaaatggttcgtactacaagctcagaaagctagtggaaaaaatcatttatttaaccgagttttctctttaaaaaattaaaatataaaaatcttcgtttcaatacaagaacgtggtgtaatttgcaattaaagtaagggagttccatgaacttgaattcttgagtttcgacctttccagtttaaaatgctcgaaatgttttctctggatttacttaaagtgctaaaaaaatatgagatgtccttaccggaggctagcgaactcagtgactcggcgatgctgccgctgccctcgaaggtgaagttccgcaggtcgtcgaagggcggtgcgttgttgtccttgtcgatgcgctgcttccgttcctccatcagataggccacgttcagttcctggccaggtggcagcagcgtcatcacgggatctaagtgcaaacaaccgcccaattacttggccatgtcccagccgggattcgggcactctctgtgccccgtttactcacagattatgggcatcttgcaggcggcgatgtccggcggtcctccctgtgcgctgattggtatttgcagtggcgtaatgtcgaaggccgtcatgtcgtcctcgccgccaccctcgtcctcgtagctgatgaccgtctcgcggacatccttctcgggtccggagcgcttcttcttcttggtcgtcttgcgtttgcgactatatagcacgaagatcagtgcgagaactgcaaggtaggtggagaacataggttaattgcaagattcttaatgcgaaagttatattttacttttaatataactagaaattaaatggagtttatgcgttagtcagttaactaagtttaatgagttaaatcttagaatttataaagtctaaatataagaattttgtccaatatacaattcaacttcgagctgcgtagttatattatcattcctcgtagtttcttttatttgcctcatcttaaataaatacttttgaacaccatctactcttgtttttctcctgtttgcctttttttgttttatgttttcctttttttgcaacaaaaaaattaactggaattgtgcaacaaaaacctaaagaaagaatggtagtctgttgggtgtctgtgaactgtcagtgccacaacaacagcttcattttcatttaatgaaggtaattaaatgtacgaaaaatgtttgtctgtttttgctttcgcgttcccacacttcagctttatgcagaaaataaaaaaagcacgcttaaactttatgaatatgaaaggttgggaagcttttgtaaccatcccaaactttacatgaacatttataaaaaatatttttaactggaaagcaagctggcttcggccagccgaagtttatatacccttgcaataatgcgaacttcatgatataaaatatgtaatttttttgatttttaataaattttgcaactgttattatacaagctttattatatagtggaaatgatatattgtctaataacagacacataccgaactaaagctcttcataattaaaaccaacgaagggttaattttttcattttctatttatattatattttttgtcactatttaattgactgactgaaatcaatataccactgcaagtgcgttaaaaggatgacagctctaggttggattaaattaattaaacaataaaaggtttcgttttaaatgaaatttagcggcccttaataagattgggttcccggaatagtgaaaacaaataaagcatctgacatttaagcttataatgatcccaaggcctcattcagtgctatcaattacaggaaatcaactcggcagtagagaaatgctttatgctcttttcttataaatgaactttgttcctgtctctgcgaaagtcagctggcagttattgcaactaatgaatccgcttagcccaaaagaaatgcagcggcattaaaaaccaaaaaaaaaaaaaaacgggcttgggcaatccgaaggaaacatccttggcgggcttgtcattttggagaagtcgtgccagagttttaattatttttacttagctgtttgcttaacccctctgtgccggagcccagttaatattcctgtcaactgaagcgcaaatgataaaatgcaagtctacgagtgagtttctctttttgcggtcgtctttatatactcttgcagggggaatttggatttcagtcagaaacttgcaatgcactgaaggagacattctcgtatatatatttctgatcagtatcaagagcagagtcgtttttccgtccgtctgttcaattctaagcgaactagcgcctaagttttaaatctgtctacgtgaaactttcccaaaagtctcctttctattgaaagtcgaaacatgatgaatcggtaatatgtataattttggatatatgcaaataaattgaaaataataaaaaagaaatcgtactttcgatgtatttgatatacaaggaattaacggtaagggaataaaagctacgacttgcggaagctaccatcgtttcatgttttttgtatttcttctgagcaaaagtcctgtttactcgacaaacagaaggagagtgctcgccagtttccgagaatatgttgcagtggctgagtggagggaacttattaataactttatgctacttaagcaaactaaagtataaaggcaaacgcagaaaggacaccgaatttaacaagttttcatgctacaacgactcggagtcactcgaaatgtgcatttggaatgcgaatgtttttggccgacttgtaatccgcttagctgcaaatgactgtcaaagtggggagccactatgttatccatccatcggaactcccactaccatacaccccgattcaagtcgttctgtgtctctgggtgctggaaagtttaatgcaacaattacagcataaagttgcaacagcagcaggacgcaaaacccaaagccgcaaccgagtaccgaattgaaccgaaaatagtttactaccagttcttggccatggcttgaagtgcattaaatttgtctctggccgcagaaaggagcgacaaaactttctaaattatcttgccgcacaagttttgctattaatgtgccaccccatccagaaagagccaacagaaatcttcgataattcgtccaaaagcgaagcaaaccaaatctgttttcgaaactttcgcaaatcagagaaaatttcataaactttgatcatgagccaggacaatttttacttgttttggcagcggtggatataaattcgcagttaagtgaagggaactaagagcaggatgaaacaaaaaacgtccacctgttttcagaatttaatttctctttgtagacccagcagcaattagaaacacaattaaattggtacgccaacgttaaaacgtgctaaataaatatttttttgcccagaggaaagttgtgaatttaatttcccgtcgaaacgtgctgccaaattcaactgctcaacaaagcactaaacttaattatcaagctgaccgatctgctcctttaatttgaaccaaaaataccttatgaaagcccattttaaaggttgcagtttggcatatagatggcacagtgttttgctaagcaggccagggccaactgttcattcatcaacctttaatcaacattacctccgacaagaaaaataaaacaagagcaagagcccgaaaaagtgctgcacaacagccggaggagatggcagaggggagcagcatcgtctaacctacataaaaactagcaaaaacaaagccaaaaatatcctgcaagatgaacaaaagccttgggaggaccgaaagctctttaacggcctttgtttgcacttaactgtaaaaggaccaaggaccgggtaatatcttgttgctgcccggcctgaacttgctgaccaggtcagctcatcatgcttgtagttcagttccccagtacttgctccactcggacacttgaaactttatgctaaaatacagttcagcgattcacagattacactggagcatccttagctcctgcgcacggacaggacatgaaaaagcgtcgactgtaaataatgctggataattatttagtttgttttaccaccacccacccctgcactcccaaactcccacaacaccggaagaccggaactttacgccactttacggcgaatcaaaacaaactgggcaggacaggactgcggctgtcagattttatgtcttcggctcctcagatattttcacatcataaagaaaaaaaaaaaatggaaaggacgcgcagatgaaagtacttctgtgcgacggctcgccgtttatttattgcgcctattttgcggtttagcggttttatggccactttaggcctttgttttcccgcccgcagcgaaccgtgtaattatctgccttagcagcgactaattagctcggccctggccttttgttgttgccacgattgtacccagctgcaactttggcgcaagtactcattaaagttggcccaaacgcggccggataaatcagcgtcacttttaaatgtggcccaaagtaaatggcctacggcgtttgccagaattcacggaaatatatgtgtagataaaagccatccgaaacagggcccacagtgtggcgctaattgaaaatcccttcaaatcccagacgagctggcgaaacgaaaatagattgtcgtgcattgcgtacgagaaaacgcatttgcattggcctgcgaaatgcggagtggcaaaaataaccgaatggccaaagccacttaacgctcgttcgcaaaatccattaagtgccccgagttttgttgaaattttattatattctctgcgattttttcaagcaataaaatggtcctaattggcttaggcagcgattaaaagccagctaagaattatagtttttatttttttttttcgctacgcttaggctaaaatagtcatttaattaataggattaatggagttgtaattgcaaaaaattgaaaattaaataaatagattatttttattgataatgttgtttattttttttgtagctttggacaacaattaatgtttatctgttaaaatagggcttataaatggaaaatagcatttacgtcttgaaatttcctagaaaatttgtacgagctccgcaggcaacacgaaactttcctgcactttttgccaagcttaattagccactatgcaaatatttccatgctccctttttgtcagctaaaccaacaaattgcccctgtctgggcataaaaaagtgttgcaaaaataaagcaacgaatacaagatttgttgccactttatgttgttgaaaatgcatggctgcctcccatgttaaccccttcctttttttatttttttagcctcactcggccacgactgtccaaacagatgtcagtgccgttgtattttttttcggttcttgtttttttttttttggaataagggcttcccccagcaaattgcattaacagggaagaagggtgtgggtttttgggttggaggccaagcaaaaatgttgctgcttaagccgcttaattgtcacacatgaatggggaaaaattcggcgagccgcttagcgactcagtgggtggggctttggggtagcagggtgcatttagtcttcacttgcggtcacacttcacccctcacccctcacccatcactctacttactcagtatgataatcaggcaaacgaatatggcccccagggcgcccatgctcagcttcaggcgctgtccctcctgcaccagctcgcagttttcgccccagtagccctccgggcaaatgcatcggtaccgcagccggggctccagattgatgcaggtggctccgttcagacatggcaggtccaggcactcgttgcggtccacacatcccttggtgtccgaggacatgatgcgaccctcgctgcaactgaaacgacaaattcggcgaacgggagagttattacgaattcagaggcgattactgcaacggagggcaaaacgtatgccacaaagatttccctccttctttttccacactctcggctaaataacaaaacactaggatgggatggaaaatgtatgctgtcgctacttttttctccgatttccaaaagtcaaacattctaaacacagaattaacaatgattttataaaataaacaaattaaatatttttttttaccacattttcaattaaaaatatttgtagtactaagaatgagtaaacatatgtgtattttaagtcagtaaaatttaaaaataattgtttatgtgtataaaaaaaaagaatttaattcaggctttcgaaattttcgaaagcggaacattgtaaagtgcgcctttgttctgcgcatctctccccgaaataaaactttttattttcacacaaagttgtgcaaccaagggatagaataatttcccccatgagcggggccctctcaaatattttccaaagcgcattaagggcgtgaagttttggttggactgaaatccctggacaactcagcgatggggaaattaaagctttaagcgcgcagaggagaatgcacccctcgcacacattgtgcacatttaaattgaagtcatttcgtattccaattgaggacagctccttgtccgacatcttagtgtcctgagtgagtgacacaaattccagcagagcactgcgtgaactgctgcccacaactggcaacgaaattgaggctaaagtaagcataatttatgacacgtcgccacctgaaggcgaagcgtgtgacactatttaaatttcatcgtttcacctaaaaaatcaaaaataaaagaccgcaaggatgctatcctggcgaacacgtgttaaaaagcagcaggcccagatgttcccgttcccgaaagcaaatggagcgagaagctcacagctggggtgcttagtcttctccaccgaatggcggcggaggagcgaacaggacatgatgcagtgccagattgagtgtcctcgccgctgtcgtcggctctcaaatggagtcactccgcaaaactaatgatgtggaaaatgtgctctgctctcggcgagggaactgccactttcatcgccacatccacttgctcccacacctctaacgccactgcgacccatcaccgatgaggtgttgcggagcagaagctccaggatcacgagtcgtgccccagatttccgaccaacccaccagccgggtagatgggaaaatttccatgtgcaaacactcggaaaatacacattttttcaaacaatatagtcgaagcgagctcaatgaacatgatggcaagattttttaagcttaggaactaggatactttgatagaaagaacttctacaaaatattgaacttatgccgtagaagacatgactaaaaactaaagtcattcatcttctttctcagttattaaattagtttcttattaattttgtatttactcactatcttttctatactttcgtttttttttgtgtctcaatttttctcagtgcatatttccatttcttgcggtgcctgagttgcatgagcgaaggcagacagacaggcaatgacaattgatattatttgttttgcattcgaagtcaatttgctgtttggcattgtctgtgtgcctgcagtaggaaaatggcagggagtcttactcggaaataaatagatatgcatatagcactccaggttgcttttaccctaatggcgttcaatacccaaagttatgtttcccttgcttaggactcacaagtcaaagtcaaacaaaaccaaaagtctgcaaggtaattaggtaaattcgatctactattgtccaataaatagttattctatttgtaattgatattgctgcgatttaattactacttttggcctgccttcaaaggcgaacaaaggtaactatgattaaattggaagcccaataaattactgtgcaccgttcacaaagcgaatgcccaggatgtgcaactgaaaggtctatacttacgtgcactcgtattcgttccacaagtcgacgcagtcaaagggatcgggacagatgacattcgagcacggcctgttcgaggggcagttgcgctccaggttgcgggccatcgtcgcctggccccattgggtgccattcatggcgggcggcaggggcaagtgctttccatccagcctgttgttggtcgggagaggggaaaaatgggaaaactacgcatgaatgccggcaatcgatgggctataaaactgtgtccttttcctttatctttggttaacagatgttaagatgctaaggagtaccatatatttattggattcctattcatgtgtgcttctttttatcttgctttaagtgcataccacttcgttcttagtttaaacacttttactttacaagttgtgttcaaattcgaaatagtctgtatattttttattttcttgttacttgttttctactcttaaattggctttttttctaaacatttttaattcatttcattgaattcattttcttttcatcgaaaagacatattttgtattacccctttggagagtgtatctctgctacgcaattggctctaatcagcatttgagcttacctgatgtcgtccaagcagcttctctggaaatcggactgcacctcaaaggtcttgattcccgtatactcggccttgccgcccgcataaacaccctcctgcttgtcgatggtcagccactgatgccctgtgaagtgaaaggactcgttgtagcgccgcgactccccgccatccagttccattagagctgccgatccatatcgactaatgcgaatcacatgccattggccatcgttcactgcgattgcggttagggtgagcagctgctcctcgtttctcatggagttcagattatagcggaactgcaggtggcctcttcgaagttccagtatggcgtactccctgtggtgttgatcactaacccggaaaagttcgcctccctgctctcgagttcgaaatctcagctgcaactgggtggaaaatctgtcgggctcaaagctgagggcgaatttcacatagctctgggccttgaaagtcgtcggaatggtgggtacattacagccaggacccatccaacccggctggcaatggcacttggcctgaaccaagctggccacacagtttccatgctcccaacaacgagctgtgtgctcggttttcaggcaaacttcgtcggtctgcggacaggcgggaaaactattcctggccaaagccggaaaagccaaatcatagtgctctgagttgtggataacgttgcgtatacaaccatcaaagcccttggagctgaaggcatactgccaattgtaaagggtttgatcgaagtgctgtctatagagtccgcccaactgaaggggttgatttagatttagggactcagcaaatggcggaatttgtcctctcgcctgacaggcgttatcatcgaattccggcggagtgccatcctccatttcggagaccaaggcagtgcgacaaaagtccacaaccatccggacattttcggtatcccaaaaaatatccaatcgatgccagaccccatcatccagcgttttcttggtctttaccctcaactccaaagttcccgagccgaaatcgatgagtagacgcggatagccctgttccagttcgagagctataaagtcgctgatcacggtttcctctggctttggtgggacaatgggtccattgtagagtatcaagccgtctgcaacgcgagtgatgaattccaagctgagatgggattcctggcagagttgtaatggaggataccaggcccagccattgccgcgaaaacttctcgtggattgctgacatcgcgggccattgtaccccaccggacaggccacgcatttcggaccatttcgggtttccacacaccgaccgccattataacaaaggtgggtcctgcaattgtgatcctggtgggtgaagttcctcgcccggcaaacacattgagcactaatgtccaaacgaacgcccaccaaagcagtgcgatttacactaaccgtatagggttttttgcccaactcaactttggaggtacaggaattggagccacacttccctttaccttcatgcaagcactcatttatattgaccatggtgatgttcaggcccacgtctttttcaatctcctcacgatgcatttggaccacaccatttaggcggactgctttgaaatacggttgctgagtagcagatcgagctgcaaagtggacatcggttaggggataaggagaaccttccttaagttgcacactgaatacgtcgacattgtctctatcggtgtacaataattcggccagcttgttgcgaaatctctctagcttggagggctctacttgattcttaaccgggttccaagttctaacgaaatcctcatcggttatgtgagacaacctcattgaaccagcttgctgaacggcctctgctgttatgtcgcgcactgtaacgctgagattggcaggaatatcctcctgaccatgctcacgatcgtagaccttgaaccgcaactgatagcgacctcttctcgttcccgctctcatggttaaaataccagtatccgtatccagtttaaatctttggtgctcctgaacctcccagtagtacttcttatccggcacatcccagtcatcgggatcattgacatagaccctgccaatcggcgtatcctgcgactgtccttggtagttatataccaatacggatttgctgccgggctgcattttattatcatttacatcgccaatggtaacggttagagtactggtgcccgtcatggcaggagctccattatccttgatctcaatgggaatggcatagctcttttgcgcctcgcgatcaaagggacggagggatgaaatgatggccaccccattttcattgtcacctcctgaaatgataatttaaattaattgtgtttttagtagcaagaaaagttatgaaagcctaactaaattgatgggtataaattgcgtgggagttgaagattaaagcgaatcagttttcaaaattcgacagatcggaaaccgcgtttctgctccactgcatttcccaaactaaccagaaaacgccaaaatcaaacaacttgcaattcaaaactgaaccacttttgcaattttccctccgctcttcggcactccattcaattcgattcattcgaggcaatcgccacacaatcaaagtcaaaatcaaacgctaagccaaacagtgtttgcatagtaatggtgattgaattatgttccagacaatcagcatcatcagcattgtttgtgccacaaagttagtaaccaaaaaacagaaaaaaaaaacacagtaaaagccaactgagagatagagaaattggtcgaaatgtgccatagaatcagagaaactgaaagcgatggaactgtggacagaactcagcctcgaggcttcatctcggttggtgcagttgaccatgtttgggcggctttgtttccattgcgatttggtgttttcccttcatgggttttccctaaggtaggagtatatgcacgaatctgaagttctaacctaatacttgtattatagtttttaaaattttttctatgcttatcttaagcctaatacgcacatgaatggaaaaagccacgaagtaaattgaatctgtgtgcaaatttcgtgtacaaatatttttttttataatattcttaaaaggttttgtttccagtcaaaccgaaaatttttaacgtaggctttagtcgggcattttattaaaacaaaagatttaattctcggaattaattccgagaaaggcttgagatttcgttttagtctggattatgaagcaggcttattttccttttcgtttcaatctaaacttcctttactctaggaattccttgacggaataagaaattaaggaaaaaatggccagcactaaattatttttataaatgaatagatatggcttagtgtattcattaagtcaggttgacacagaaagcaactctcacaatcttgattttaaatttttttctctgctctcctcttttgtaaaatggaaattgccctatactttttgtgaagccattattgggagttatttgaaacaaaaacccgagtcctgaacaaaaaacattaaaaaaaaaaggaaaacaagagcaccccaataaaatcgatcaaatgaaagaaaatttgaggtgtcacttgaatgctgtcgctgacattgacagcaagtttttcaattttctcgaccagtttttctgctttgccagtttgaatttcagggcacatttcattttggtatctgtgtgtccctctactttaggaacctttctcattgatttgtttttattagtattttttttttttattttttgctgacctggcacgtgtttgagtttcaagagtgtctctccaataaacgatttgacccaaaagcctttgggttgtttaagtatataattgattttcagatgctgaattaattattggtccataaacaaatgcaaactctaaataaataaaaaattaggctgcctattcgcttgatattaatttgcataattacttaaatgagatgcgtaattggtataaattgcagcaacatatctcattgaatacatttttaatcaggcatatgcattaaatatacgctgtactttgtattgtaatttttcaagtgctagcgattatttcccattcgattttttgtggcgctaactcgacagatgttgggcttagtgagcgtttaaatattttttgcatcattaatgatgcaaagcgatttgccctaggctatcttaaatacacgtgctattaaattcacatttaaccgttgttttttattacagccagaagttttagtttgccattcggcattttaaataatcaaaaaaaaaaatgtcgtttattttatctatattatctacaatatgttttcaagtacttacttcggtcatactccactttaaagcccgcttttatttcatcgctggccaaaggatccaatcgaaaggtaaagggtcctccgttgccccttagtcgatcatcgggatccttggctgccacctcaagaatttttttaccagacacattctcaggcaaagtgggcttatagtcctgggcaaaagtcggcgcgttatcattgacatccttgactatcacggttagagttgcggttgcagttcgagcaggactgccatcgtcaatggctaaaatctgaatatggtgtcgatcctgagtttcccgatccaaaggtctttgtatgctcactgctcctctatcactaatggcaaattgtcttttacgatttgtggaacgaactattttgtatgctactttggagtgaccgccctggtcggcatccgtggccttaaattgctcgagaatggttcccactttcgtatcctcatagatagagacctctatatgctcccgatcgaattttggcacattgtcgttaatatctcgcagcttcaccaccacccacgaataggccacatggtacttgtcacttccaccgggtccatcgtcgcctttatcgttgacctgaatgcggaaccggaatccactactttgcagcggatcctcgtagtccaggggttgtatgattttcaacgagcccgttccatcgccattgcgaaccatcgcaaatttatccgccccgaaaccactgtttggcaccaccttgtattggaacgtgttcgtttcgtcctcatcctgaaccgtcaccgtgagaatgggcgtctctgggatgtaagtgccattcgtttcgtccacctccgtaacccactcgtccttggtgaactgcggcggcatgtcgttgaggtccttgacgcgaatggaggcggtgccagtacctgcgaaattggacagcaaacaagtcggacgaagtgcgtcagttgggcgtcaataacagatagatgcagtgggagacaaatgggcaaattactggggaacatttgataaactttgcagtatttggtaaattgatggtctgaaggatgagttatggttaactccatggttaactccatacatagctacctattccttactaaatttaattcgtaatctatttttcaaccaaactagtctgtatttaatatccttaagtgccaatatagtcttatttgtctaaaagctggtatcgtgtttccaagtcctttggatttttggattcagacatcttataagtatcggataaggtttaagctaatcaataaatgctgtcctctggtcattcaacacttctgagaactgataccaagacccaaagcagcaagtctaatcacccggccacgtgacccaaatgtgtgtaaaccactcacctttaagtccaccgccgtccatggccaccacctgaatcgagtagtcgggcgttcgctccctgtccagacaacagacagccgttttgatgagtcccgtctccggctcgatttcaaagatgggcgcccccgtctcctcctcgatgacgttcttctcaatcgagtagattagcttggcattggtgctctcgttgggatcgtcgtagtcgacggcggacatggtcatcaccgaactgccggcggtgccgttctcggtcacgttaccaaagtagatgccctgcggaaactgcggcgcattgtcgttgatgtcctttaggttcacctggatgtccgcatagcctaccagcccctcgccaccctcgtcctgggcaaatactgtaaagcgccactgtggcctcccattgggctgatctcggtccaggggctgtggaatggaagtacacacgaattatttattaactagatttggaaataagtattcgaagtccaaaaattatcgtatatgtatgttccttttcaaaccttattttctccacatttttttttaatttgtttaatggataaagtttattggtatatgcaatattttaacttacttaaggctaaccgatttcttcgactgtatcgaaaggagatttgatttggcagctgtttgtttgtttgcaaattattttatgccccttggtaaattgtaactgagccacagtcggagaccctggaaacccttgagccgttggccatcgcttgttgtttgctcctaatctggctttggtggctttgcgattgtaggtggtcttacgcacagaagtctgttattagatttctcattaaatgagttatccacacgaaattgcattgccaatgacgaaataaaagccatccattcgatgaaaattcccttcagcattcgtttgttgtgcgttgcttgtgtgtgcgagtgttttggccctgtcaaccttttggtcttggcctggatttggcccctattcaaattacccttaaacattgcttactcagctaatgcatatagaacacacttgaaatgtattcaatgtgctagtatgtgtggtcggtttgaaggacaatttgcttttacgatgaattaattctgtagtcttattgaagtaaatgaaagctaagacttgtatttattctaaggacacaagaaaatcttcatatgttatttctacaagcatatttaggtggtcaaaaagctcatagaaggagggagagcatacttgtaagtaaatcgattgtaacgtcttgtgatgttaaatgtactatatacatttgcaatcgtgatgctttagcccttcagatttatttttaagtaatgcgtatgctggtcaataaatctattttgatttgattttgtcctttattctatgtgacccagatttcacttcacttttttagtagctaaccagacaacgcatttgattgacattctctcagctgtcggcaaataaactttaaaacccagctcgctcaattaaaacaggaaaaaattggctttactgccacgtgacacgtaatgcaatcgcaattacaaattaaaagccgtcagccagtcggcggcaagtgccatccgccaatcgaaggacctcggatccctccaaactgaactctttttattccaagcccattttgccgcttgattttacacacaattttatgccagccaaccgcgcaccaataacgaacgacgaacgtcatttacatgtggtcggttgtagagcgtcaaaaccgcaaatgccacatgctgtcgctgccccgccctctgccgcctaccgcccaccacccaccgcccaccgcccattacccactagcccactttaaccctatcgcatcagtgaactgctccatccgccagcaataaaacaaataaagcgaaccgccagcggcaacatttgaacattttatgcagaatgcgaatcggagtggggttttttgcggctcgtactttgaacggcttcgggatgcccaatagtgttggcaactattttccagctaaaagtttgtctttaaaataaatcaatataagtaatcagttaaatgtttggctattttaagctattggctattttgctgattatgttacctactagactgttctttcatgttaagataagaataaggataatataagaattgaacaccaagtcataatctagaacatattggcatagcgattgtgcttctgacttatttaaaatgacatgattaaaattatctcaaagttttaaggcattttaattattttacagcggccaattaaatgtagttattttattagagcttacaccacaacttaaggttagcaacactaaaaggatgcgtttcgcgccactttgactcgtttgtttttatggtctttgtctgaaattaattggagtctatgtatctgacaaccgacggtggcagttttttgcatctaaatgacattactttttgttcgttcatgcaccattgggtgtggtatttgtgtgtatgcctggtgtgtgcggtctgacacagttttaaattaatcatacgccaccgaaccgcgtggagagctttataatttacaaaagtcgcacaacccagcgtggtaggggatgacaacaattgaaaagcgaggaagagtggtaaatattgaaaacgtttcaatcttttcgcgagtgcccagtgaaaaaaaaaactttaaaggcctgccagatcgcttaacgcttattgtgagtttctatttggtcatttacattcgaatttaaagaagcttaaagcctaaaatgtggatcctgttccaaaatgtatgttcgaatgcaaatgttttaaaaaaaaaccattaaatgtgttatgtttccctgaacttggtcaaaactctcccttttgtgacggcaaagattacaatgtcattccacgagcatttattgttagggtatattcagtttcatatcgttgcgaccccactcattttttttaggcgttcactcgtcacacaatataaactgcgccattgtgcgagcgtaaactgtggctcaattgtaaacggccaaggggaagcccctatcaaaaaaaaaagtagcctcccggggcttatggagtacgtagcccccagaatggtcacaaaggaaaaagttatttccccgtttttgttcctgcttttttcgatttgcgcgccatttgcacggtttgctgttaacggggccgtcgcgaaattttaactggcttttattacgctcgttttacgaggggactctcgaaattggaatctgtttaaaaaacgacccgtgaggtgaacgggcgctcacttaccttgagaacaaaaatatcgcccgtcgtgcgatttatatcaaatttactattcgctggattatcagggtcgatgccctgaccagtcaggaaatatacaatatttattggtctatctacatcgccatcggtggctgtgacctgtaatgaaatggaaaatgaatagggaacggttagtaacaagaactgcattatacggtggggatagggattcagattcggtggaattccgaactggacgctgcttataaaattggtggctataaatcaaatatgcaaatgagccaaatgctttaaatgtccaataaagggcaacgtgaaagtcaaatcggggaaagtccggtgggggggctggaaaatctggacggtgggcgtggtaggtgtttttcttttagcccgtcagattgcttgtaaatttatgctccgattttttgctccactattttttgcacattttttttggactctcttccgatggcagcaaaatattttctgacaaaaaaggaatgaaatgctaatataaccgagatttatgtaattattcaatcggatttcggtttattctctcgtcttattgttttatttttattttgtttcgttttcgctttgtgattggtaaattaaatcagcatttaggaccattttcttggaataattgatcataggcaaaatgggtatcgactttgattgggtcttctaggggattgagcaattgaataaaatcaactaaatggaatagtactaaaaagctttccaagtctatagcaacactaatgcactcaaaaattccttaagaattttaattgcctcagtctatttagaaataataggtattaaaatcaagtgactgcattttccttggccgtttacatgtacaaggaaactttacaacttcttgtaatcgcttctaaacaacaagcaggaaagcaagctaaggattatggattcaagaagtacactcgaagaatttatgttatgtgagcagctaatgcaattaaaatattgcatttctcaagttaaaaatccccttaaaaaggcaaaaagagcttgcaaaaccaacgtattcaaatcactaacttttctctctgcggagcaaatgcaagctttttacctatgggaagaacaacaggattgtagatccttcaaacagttgtcgtgtcaattaaaagcaataattgccttgttcagcttgaatcttatctctctgcctttgtcgtgtgctaagtggagtatctgggtggattgtctgtgcgaattgtggaaacaaagccaaagttatgcatgtgtgcaacccattttctattataatgaaagaaaaccgagtttcagttgcattacaaccaaattgtagcaatatccaatgggtccttggcccattaaatcatcgtcacgtgttaagtgcctgccatttccacccgttcccattttcagctcccatccgctgcacattcacaatgcgacaatttacgttaaatgttcaacacaatttgatatgacaaaagagttgtctacgtgccatcattgtgcccattattactgccccgcccatttcggacgcggaagcgatcctttgagcagcgtgcgccattgtcctttcgccaggacgcaaccacaagcccacacatccctttccacgcgccgcctacacttatgggcgtaattgaaatgccttgccagccaaaactcaaacacagaatcctcgccagagctgcgctttatataaaaaatatttgcatttcttttttttaagcacagaaatcaatttgagtccaaaggtgtcggcgacagcaaacgcattccattcaccttgtatctgtgcaactgccgcatattcatatgtatgtagtatatgtacgctgtacgcaaaaaacatatacatatcctccataatgggaactgccgtgacaatgctcctccggtcgcactttggcccgccataaatgtgtaattaaaaattcgccttgtttttcatcgtttcttgtttattggtttgggcatgaccgctgagctgtgcaattttaatttgtatttaatgttaaagaaatatggaaaagttggcattaatgaaatgctcttgaaaataagtgcgggtaataaatcattcaaatgtcactatctgttattaataaatctgccttaataaaaataattaaatatctccgaacgtaataaactaggcaacggcaatctattgaatcatttatgttgattgtatttgaccatctttgatttatttgcttgaaaaaaaaaaacatcatagaacttaactttagataaggcctcacaaatttcgtcattttactcattcgataatctaaaagtgtcgcattattttatgcacccgttagagtgtattcaaatgttgatgtgaccataaactcgactctctgctcactggcctttatgttggtaaatgatggcttgaataaaagtcgcttgtgaaaatatgtgtgtgagtggtctgtgtgcgtactcatgaagttgatgtatatgtatttgcgcttgtgtacgcactttactgccgcagcgaaactatcacgttgttattaatgaatgagtatttatgcatatttacggctgaatttccccacgcgagtgcagagttttctgccaaccttttccccgcctttattcctttttctcagttactatttgttcgccacttgagtttcccagcctattgtgtttgcgctcggtctgtttttcttttcctcattttttattgctcagttttttggcactttatgcaaatttaacgtattgaatgtatggcttacgcagccactggtatttatatttaaattgcgttaagtcgataaggcgataagtgttgccctgaaaagtaggcaatggtttttcgcctgaaaactaacctgcagaatgcgtttgggcagattgcgatcgtcttcctcagtgatttgtgtacgatatgtttgacgatcgaataccggtggattatcgttgacatcgcgaacgttgatcacaacggtggtgtagttatttttgcgattgcgagttgcctccaggcgcagttcatactgatgaagataaaagatttcaattaaataattattaaaatattgtagcacaacagtgataatgcttatattttatttgaaatttagaaattattatttccccattttaacattataaagcttacgtcaagccaggcataaataaataaggaatttattcatttaaatgaaattcaaatgtcactagctgaaacgtttcaatagctaaaaatacatttatggttctatggacacatctcgtaaaataagatggtaggcaatgaccatcagcaaaactcaattatttcaattaccaggctgccactgttgtgttgaaatttgaacaacaaaagccaaattcgcatcaatggtctgcgaagtttttatttccacgggtaaaacaaaacaaagtgaaaagaaggagtaccaaatacgaaattggcaacacatgttccgggtgctgtggctggttgttttggccgttgtggcactgccactgcttgttgcatggctggatattgacagctacacggattttcagtcctgtttggggtgccaaaacaagttgcgtataggtgatgactatgcggggcatggtgcttgctgatttctatgtgttactgcctttcttccacaaagaaaaattcttcaatagtaattttcatacttcaatctaaccaatatattaatgtccatatataaatgttttacacaaatgtagtgcacaagcactaaaaaccttgttcagctgcttataaatctacataaattaataatatttgaccttttctttggtatccattttgtttcgattggatttcttttcggaagcagcaagaacccattactgattttctcagtgatagatcagtgcgttagcaatcacgttaaaaatgcgcaatgggaaatgtaacgccagctgtctatatatatcctctgtacccgagaagttttttgagatagaaacgctacatgtaagcgaattttccgttttttctggattaatttttttatacgccttgacttgcctggtcgaaagtttggcgaaccccctgaaaagttttgtatagttttacatattttccttttttgttgtccatcgccaaagcggaaaaatacataaattatgcatgcaacagaaagttaggacctagtagaagaaactaggactaagaaaaatgtgcaccaacttatagacaagtggatacacaaaccaaaacaatgtggcatcaataaatcattggaataattttttaagtaacaaaattcttgtaaatcctactaaaaggtatatttaacttttcaagttacttagtttgtgttactaaagtaagaccctaagtctgttaaacttattgcatttttcccagcttagactagttttgtagcaaaaaccagactttcagcagttgtggaagtcccagagtagtcgactacttacccttggcctcgtttcgtagtcaagtggacttgccacgtaaatgacaccggtggtgttctgtacggcaaatgcattgcctatgttaccgcctgtgatctggtatcgaatattcgtcgctgcaaagagataatgagagcgtggcgttaaaaaaaaaattaaatttaactgtagcgagtaattcaattggtgtacaaagtactcgcggagcactcggcgtatgcgtaatgaaaattaatccaatttaagtaaaataagattctgaatacttaataggatcggcagtcgaaagagctgcgttgatgaaattttgtaaagaattaagtttgtggtttgggtatttgcaaaaatttatttaattcattattaatggataattttttaagttatcgaatgggtatgtatcaatttcgtttggagaatttgaagagcctacaaaaaggaagctttcaaccaaatttagactgaattaagataaaaaaaacaatgaacaatgtcaaagagaaacaaaatggcacccacggaggtagctgaaataattaagttcattaaaaaacattttcccccacgagagtcagcacaaggacatggccccaatgtttcataagaatgccaggcacaacaagatgccatataatttacttatttcatgtttaaacagcctgcaaaagtgttgtctttgctggcagaatatggaaacgctctcatatgtgacaaccaggacacgtctggtggtagaatgaggggtgcagtggggaaaagtgtggaaaacaggagtcggggctgacgttgccacattgtctgtgcatttatgcggaaatgtgaaaggcaaacattagcgtaaattagcgacgcgtaaatcgcttaacctgctcgactcgctgagcgggggaagggaactggaactggatgagcaggatgtcaggaagctggagttttgaggcattaaaagttgcccacttttgctgtttgtgggccataatagctttctgtgcaattaaggaattagttggagagctgatcagtgagtttccgtgagatttttaaacagatttctacactaatttaaaccatttaagatattttcctataacagccatatatactcgtatatacagtaaaaaaaacaatttataagcgaagagatattcttttattcttgctaaactcacataaacaattttcgaaacaagttaataagacaataatacaacaaactgtctaagacaaataactagccctatgttcacattctcgctgcaattggtcgtggttgaacttgatgaatgtatcatactgctctgccattttttgagtcaatgctatttcatattccagtactacccgatcttcgcattgtttcatcatttcgcagcacattaatttcaattgctgataggtaaacaaatctcggttatcttcagtttctggtttggccacatgaatctctgattttgggcgacattcctccgaatcactaaagtcactatcaagcaatactggcagtcccatcaaaaaatctatcgggacctctggctcgtgaattgttttcgacttcttttttatgatatgctttcgtgaatgttttgcgggaaatatatcaggcgagttatcctcccaaggaaacgatcgcttccgcgaaatgctattgacgcctggaatactttggcgggaccattttgttaacatcttctcgatgcagttgctcccacatcgttttgtcgaattgatatgctgagattcctcatccaaagttagtaaacgctttcgagttatgtgactcatgttaatattttggctattaatttttttttcgatttgttctgttcacttccaattcgacaggcaaactgccatgcttactgtggtctgtggtaaaataattttcaaaatatacttacgttagaaaatccaatccaaaattacatttaaccagtgttatatttaaacaaaaacttctctggccgccctctcttgaaacattgattatatattctgtttagaatatatgaaatgtctcccccaaaaacctatttgtttttgtttttaaattttttcaaaccatagactataacaacaacgtgaacatcaggagtagctcaggcgagtcgtgttaagtagtccccagtcttagacaatgacatttacaatttacgatgtcatgacgccatttttaaatcactgataatgataataaattaatatacagacaccagagacccaggctcacatgggagcagaaaaggcagtaaaagtatccctgctcgtccttcgcaagctttgcgatgttgtttgtgtacttatttagcatgaaaagtcattttaaaaagtggagggaacaacattctcgctttttaccatggttttttgatctttctaggtcttcgtgtgctcattttttgttctttcctttttatttgaaggttggggtgtcggataagtgtttttatggcacacactgaaaggttgtgcgactccttgtttcccctccagccgccagccaccagccagggtctttaaaaacgagtccttaaagtgatggggaagccagggaaataaatgagtttcgtttggccgcctagaactcttcgaactggttcgaatgtgacaacatttgttcaacacatggcaaccactcgcgcacattcaaataaataatcttttcgctcataaattcgcaatgtggcacgcaatggcacaaaagttttacagctccattcgtatttccaagttgacacaaacatggcaacgcaaggagtcgcataagagatttgtcctgaccctgttttgttggtctcagccttcaattcatattctatgcgactcacacacacagctaaaatcctcttccttcagcgagtagttcaaaaatttcgtgtgcccatttatttttccgttcgccggctctgtttccctttgctagagggattacacttggctccgttgctgtggcagtagatacctttgaatttaaattccaacatctaaatatataagttacgcatagtattttatattatgtgaatatttcggtaattaaaaaacacaaatataacaaagcattaatgttttcttttcaagttgatttgtacttgaatgatacaatagaatttagttctgaattttattcagtaaccggtaggtataacaattacattgtaatctctagaatttatttcttctagatataaatacaataccatgtattttgcatgctaaacatggatttgtatcagtgtgcttttgttgtttctgctctggttttttccaattcgggttaatgcctttttcgcagtcgtcgcgacggcgacaacaaggactcgcagtcttctcggatgtcctttgagagctgttgctgttgtggagactgattcaagtaaagacaaagttctacccacgagtttgcctctgccgtcggtagggaaaaagttgttaaacgctttcaatgagattttgaatgtttttcgtgctgcaaatcgtatctgccgcagacgaagaactttccccgtccctcgccgtattaacaataataatttccgcatgggaatcaatagacagatatacaaatactcatattagatgctcacttgctctccacttgtgtttgtctttgtattttatggatttatgcatgactatgagctgtatcttctcccatgtatctttcgccttactgagcttttatatttttgtaatgtttcgtaaatatttgcggtacatggccgatgcctaataatatttgacaatggctgcacatacaaacaaacattgctatgtattaaaataaataaatgttgtaaatgtctattatgactgcgaggaaggggcaaatattctgaaacgcctgcttaatatttatgcataaattttctgtggctccatgagggaaattgcccaattggtttctgccaaatgtttatgacgttcccctatgcacgagtattttttcgtataattttttgtggcctaaggaaggaaggaagtcataggattcatgactcaagccaactgaaaatgtcgcagtcgcatgaattgacaatatcaagcaaccaattattctccaataactgccgttttgcttttactttagattgcgataaatgagaaggtaaatagattacggactttagctatttatataaaaatatttactttcttgccttatttatttactttatatatgttgaaaagttgattatttcacaatttacgtgaaatgctgcatttgacttgctataatttacagagtgaatcagtggttccggaaataaagaaataatgcctcaattgagcgtatcaagtattttaattttaaccaaaatgttgttaaattgaaaatgtaatgagacaaaccaataaaggcaatgattgccgtgctctgaataaattactagtttcatgtccttaattgctcgaataattcctgcatatatcctgtatatatatgtagccaaagctcactgacattcttgatggactttctccctgaagcagctgtctacgtcttaatgtctttcaaatgcaaatcgttggacatgatatgagcgtatggcccccggtcaattacaattaaagaaacacttaatgaaatcaattggtagtttatgcaatatatattcttttgctcaggcgattaagtacgaatatcgtcgctcgagcaaaaatctaatttcaatagaaggacaaattcacattaagcccgatgaagggacggtttattgtttatgtgtagtgattggattgttgttactcacactcattgtgatccttggcgttgacagtgaggacagtgctctgcaagtcggcattttcatcgatttcagtttcgtacagaaatctatcgaaatacggcggtgaatcgtttttgtcggcaataccaatgcgtacaaattttgtaactgcaaatgagaaagaaaaagaaagccagccatgatatagatactcatactgtataaatagattgctcggttgcatgctcttagtgtatgaaatgccaataagcagcattaattatggcaaatttattgattgacaaattgcgcgcgtgcctcttttgcggtcgagaaagtcgtatacatattcgtttatgttcgaaacgtggcaggcataaaagagggtagtactcccaccccacacatacgtatatcaccaaatttactatacaccgaaaataactgggctgagctataaattcgatactactaaaaatggaagcaaacataataaagtttaaaaaaattgtatagcaactattaggtatattggaaaagcctaatatgaaaaaaaagtatgcaacaaaaaataagtttagatgatacattttcgttgaatactttgttttggtgcacaattttttgattttccaaatttctcagcttgtatgataaactgttggcatgttatccccttgctaaagcagataaagcctcagtcaaatatactgatcctaaaaatatgtgcgcaactaaaagccagcagaaatcacaaaacaatctactcaaagtgaaaagtttgtgtcccccttttccagtcgaaagcaaaataagttttcacaaagtgcactgcgaattgagggattttccggctctcccttcggcaaacgcagctacgtttgtttgcctcactttatttgcttatttcctgctaatgtcttgccaaacaaaactttctggatagttgtgtagtttagttttcggaacgggaacgtgcgttaatgagttttattcgactaggagagctcaaggcaaatacggaagcaaattgcacttcacaaataagcgtggattttagcaatccccatagtgaaagtttttaaactttggtttgcttgacaattgtttcctgaaaaatatgaatttcatgtaaaagtcgggtcattaacaacggaatgctttcaagctct

SEQ ID NO: 16754 - DNA, 5352 bp, DROSOPHILA
gcagttacaaaatttgtacgcattggtattgccgacaaaaacgattcaccgccgtatttcgatagatttctgtacgaaactgaaatcgatgaaaatgccgacttgcagagcactgtcctcactgtcaacgccaaggatcacaatgagtcgacgaatattcgataccagatcacaggcggtaacataggcaatgcatttgccgtacagaacaccaccggtgtcatttacgtggcaagtccacttgactacgaaacgaggccaaggtatgaactgcgcctggaggcaactcgcaatcgcaaaaataactacaccaccgttgtgatcaacgttcgcgatgtcaacgataatccaccggtattcgatcgtcaaacatatcgtacacaaatcactgaggaagacgatcgcaatctgcccaaacgcattctgcaggtcacagccaccgatggcgatgtagatagaccaataaatattgtatatttcctgactggtcagggcatcgaccctgataatccagcgaatagtaaatttgatataaatcgcacgacgggcgatatttttgttctcaagcccctggaccgagatcagcccaatgggaggccacagtggcgctttacagtatttgcccaggacgagggtggcgaggggctggtaggctatgcggacatccaggtgaacctaaaggacatcaacgacaatgcgccgcagtttccgcagggcatctactttggtaacgtgaccgagaacggcaccgccggcagttcggtgatgaccatgtccgccgtcgactacgacgatcccaacgagagcaccaatgccaagctaatctactcgattgagaagaacgtcatcgaggaggagacgggggcgcccatctttgaaatcgagccggagacgggactcatcaaaacggctgtctgttgtctggacagggagcgaacgcccgactactcgattcaggtggtggccatggacggcggtggacttaaaggtactggcaccgcctccattcgcgtcaaggacctcaacgacatgccgccgcagttcaccaaggacgagtgggttacggaggtggacgaaacgaatggcacttacatcccagagacgcccattctcacggtgacggttcaggatgaggacgaaacgaacacgttccaatacaaggtggtgccaaacagtggtttcggggcggataaatttgcgatggttcgcaatggcgatggaacgggctcgttgaaaatcatacaacccctggactacgaggatccgctgcaaagtagtggattccggttccgcattcaggtcaacgataaaggcgacgatggacccggtggaagtgacaagtaccatgtggcctattcgtgggtggtggtgaagctgcgagatattaacgacaatgtgccaaaattcgatcgggagcatatagaggtctctatctatgaggatacgaaagtgggaaccattctcgagcaatttaaggccacggatgccgaccagggcggtcactccaaagtagcatacaaaatagttcgttccacaaatcgtaaaagacaatttgccattagtgatagaggagcagtgagcatacaaagacctttggatcgggaaactcaggatcgacaccatattcagattttagccattgacgatggcagtcctgctcgaactgcaaccgcaactctaaccgtgatagtcaaggatgtcaatgataacgcgccgacttttgcccaggactataagcccactttgcctgagaatgtgtctggtaaaaaaattcttgaggtggcagccaaggatcccgatgatcgactaaggggcaacggaggaccctttacctttcgattggatcctttggccagcgatgaaataaaagcgggctttaaagtggagtatgaccgaagaggtgacaatgaaaatggggtggccatcatttcatccctccgtccctttgatcgcgaggcgcaaaagagctatgccattcccattgagatcaaggataatggagctcctgccatgacgggcaccagtactctaaccgttaccattggcgatgtaaatgataataaaatgcagcccggcagcaaatccgtattggtatataactaccaaggacagtcgcaggatacgccgattggcagggtctatgtcaatgatcccgatgactgggatgtgccggataagaagtactactgggaggttcaggagcaccaaagatttaaactggatacggatactggtattttaaccatgagagcgggaacgagaagaggtcgctatcagttgcggttcaaggtctacgatcgtgagcatggtcaggaggatattcctgccaatctcagcgttacagtgcgcgacataacagcagaggccgttcagcaagctggttcaatgaggttgtctcacataaccgatgaggatttcgttagaacttggaacccggttaagaatcaagtagagccctccaagctagagagatttcgcaacaagctggccgaattattgtacaccgatagagacaatgtcgacgtattcagtgtgcaacttaaggaaggttctccttatcccctaaccgatgtccactttgcagctcgatctgctactcagcaaccgtatttcaaagcagtccgcctaaatggtgtggtccaaatgcatcgtgaggagattgaaaaagacgtgggcctgaacatcaccatggtcaatataaatgagtgcttgcatgaaggtaaagggaagtgtggctccaattcctgtacctccaaagttgagttgggcaaaaaaccctatacggttagtgtaaatcgcactgctttggtgggcgttcgtttggacattagtgctcaatgtgtttgccgggcgaggaacttcacccaccaggatcacaattgcaggacccacctttgttataatggcggtcggtgtgtggaaacccgaaatggtccgaaatgcgtggcctgtccggtggggtacaatggcccgcgatgtcagcaatccacgagaagttttcgcggcaatggctgggcctggtatcctccattacaactctgccaggaatcccatctcagcttggaattcatcactcgcgttgcagacggcttgatactctacaatggacccattgtcccaccaaagccagaggaaaccgtgatcagcgactttatagctctcgaactggaacagggctatccgcgtctactcatcgatttcggctcgggaactttggagttgagggtaaagaccaagaaaacgctggatgatggggtctggcatcgattggatattttttgggataccgaaaatgtccggatggttgtggacttttgtcgcactgccttggtctccgaaatggaggatggcactccgccggaattcgatgataacgcctgtcaggcgagaggacaaattccgccatttgctgagtccctaaatctaaatcaaccccttcagttgggcggactctatagacagcacttcgatcaaaccctttacaattggcagtatgccttcagctccaagggctttgatggttgtatacgcaacgttatccacaactcagagcactatgatttggcttttccggctttggccaggaatagttttcccgcctgtccgcagaccgacgaagtttgcctgaaaaccgagcacacagctcgttgttgggagcatggaaactgtgtggccagcttggttcaggccaagtgccattgccagccgggttggatgggtcctggctgtaatgtacccaccattccgacgactttcaaggcccagagctatgtgaaattcgccctcagctttgagcccgacagattttccacccagttgcagctgagatttcgaactcgagagcagggaggcgaacttttccgggttagtgatcaacaccacagggagtacgccatactggaacttcgaagaggccacctgcagttccgctataatctgaactccatgagaaacgaggagcagctgctcaccctaaccgcaatcgcagtgaacgatggccaatggcatgtgattcgcattagtcgatatggatcggcagctctaatggaactggatggcggggagtcgcggcgctacaacgagtcctttcacttcacagggcatcagtggctgaccatcgacaagcaggagggtgtttatgcgggcggcaaggccgagtatacgggaatcaagacctttgaggtgcagtccgatttccagagaagctgcttggacgacatcaggctggatggaaagcacttgcccctgccgcccgccatgaatggcacccaatggggccaggcgacgatggcccgcaacctggagcgcaactgcccctcgaacaggccgtgctcgaatgtcatctgtcccgatccctttgactgcgtcgacttgtggaacgaatacgagtgcacttgcagcgagggtcgcatcatgtcctcggacaccaagggatgtgtggaccgcaacgagtgcctggacctgccatgtctgaacggagccacctgcatcaatctggagccccggctgcggtaccgatgcatttgcccggagggctactggggcgaaaactgcgagctggtgcaggagggacagcgcctgaagctgagcatgggcgccctgggggccatattcgtttgcctgattatcatactgattctcgcactgatcttcgtgctatatagtcgcaaacgcaagacgaccaagaagaagaagcgctccggacccgagaaggatgtccgcgagacggtcatcagctacgaggacgagggtggcggcgaggacgacatgacggccttcgacattacgccactgcaaataccaatcagcgcacagggaggaccgccggacatcgccgcctgcaagatgcccataatctatcccgtgatgacgctgctgccacctggccaggaactgaacgtggcctatctgatggaggaacggaagcagcgcatcgacaaggacaacaacgcaccgcccttcgacgacctgcggaacttcaccttcgagggcagcggcagcatcgccgagtcactgagttcgctagcctccggcaccgatgatgagaatcaagactttaactatctacagaactggggtccacgtttcaatgccctggccgccatgtacgtgcacgataaggcgaaagccagcagccagctgccgtcggatggcggaggaggatctggagatggacctggacctggagcctcatcatcatcgccgttgggaggcggtggcacgggaggtggatctgggattccaggcaatgtccttgccgtcgtcgcaacgggaagtggagcaggtcctggaggcggcggtggtagcagtgggttgatgccactgcccgaggtcgacaaagttgtattataa

SEQ ID NO: 16755 - protein, 1783 aa, DROSOPHILA
AVTKFVRIGIADKNDSPPYFDRFLYETEIDENADLQSTVLTVNAKDHNESTNIRYQITGGNIGNAFAVQNTTGVIYVASPLDYETRPRYELRLEATRNRKNNYTTVVINVRDVNDNPPVFDRQTYRTQITEEDDRNLPKRILQVTATDGDVDRPINIVYFLTGQGIDPDNPANSKFDINRTTGDIFVLKPLDRDQPNGRPQWRFTVFAQDEGGEGLVGYADIQVNLKDINDNAPQFPQGIYFGNVTENGTAGSSVMTMSAVDYDDPNESTNAKLIYSIEKNVIEEETGAPIFEIEPETGLIKTAVCCLDRERTPDYSIQVVAMDGGGLKGTGTASIRVKDLNDMPPQFTKDEWVTEVDETNGTYIPETPILTVTVQDEDETNTFQYKVVPNSGFGADKFAMVRNGDGTGSLKIIQPLDYEDPLQSSGFRFRIQVNDKGDDGPGGSDKYHVAYSWVVVKLRDINDNVPKFDREHIEVSIYEDTKVGTILEQFKATDADQGGHSKVAYKIVRSTNRKRQFAISDRGAVSIQRPLDRETQDRHHIQILAIDDGSPARTATATLTVIVKDVNDNAPTFAQDYKPTLPENVSGKKILEVAAKDPDDRLRGNGGPFTFRLDPLASDEIKAGFKVEYDRRGDNENGVAIISSLRPFDREAQKSYAIPIEIKDNGAPAMTGTSTLTVTIGDVNDNKMQPGSKSVLVYNYQGQSQDTPIGRVYVNDPDDWDVPDKKYYWEVQEHQRFKLDTDTGILTMRAGTRRGRYQLRFKVYDREHGQEDIPANLSVTVRDITAEAVQQAGSMRLSHITDEDFVRTWNPVKNQVEPSKLERFRNKLAELLYTDRDNVDVFSVQLKEGSPYPLTDVHFAARSATQQPYFKAVRLNGVVQMHREEIEKDVGLNITMVNINECLHEGKGKCGSNSCTSKVELGKKPYTVSVNRTALVGVRLDISAQCVCRARNFTHQDHNCRTHLCYNGGRCVETRNGPKCVACPVGYNGPRCQQSTRSFRGNGWAWYPPLQLCQESHLSLEFITRVADGLILYNGPIVPPKPEETVISDFIALELEQGYPRLLIDFGSGTLELRVKTKKTLDDGVWHRLDIFWDTENVRMVVDFCRTALVSEMEDGTPPEFDDNACQARGQIPPFAESLNLNQPLQLGGLYRQHFDQTLYNWQYAFSSKGFDGCIRNVIHNSEHYDLAFPALARNSFPACPQTDEVCLKTEHTARCWEHGNCVASLVQAKCHCQPGWMGPGCNVPTIPTTFKAQSYVKFALSFEPDRFSTQLQLRFRTREQGGELFRVSDQHHREYAILELRRGHLQFRYNLNSMRNEEQLLTLTAIAVNDGQWHVIRISRYGSAALMELDGGESRRYNESFHFTGHQWLTIDKQEGVYAGGKAEYTGIKTFEVQSDFQRSCLDDIRLDGKHLPLPPAMNGTQWGQATMARNLERNCPSNRPCSNVICPDPFDCVDLWNEYECTCSEGRIMSSDTKGCVDRNECLDLPCLNGATCINLEPRLRYRCICPEGYWGENCELVQEGQRLKLSMGALGAIFVCLIIILILALIFVLYSRKRKTTKKKKRSGPEKDVRETVISYEDEGGGEDDMTAFDITPLQIPISAQGGPPDIAACKMPIIYPVMTLLPPGQELNVAYLMEERKQRIDKDNNAPPFDDLRNFTFEGSGSIAESLSSLASGTDDENQDFNYLQNWGPRFNALAAMYVHDKAKASSQLPSDGGGGSGDGPGPGASSSSPLGGGGTGGGSGIPGNVLAVVATGSGAGPGGGGGSSGLMPLPEVDKVVL

SEQ ID NO: 16756 - DNA, 3399 bp, DROSOPHILA
ttactaaataaataaataaattaatcaataagtaacgcaggattcattagataaacagtcaataattaagttcctataaattaatcttaaagactattcagcgaagaacgctaggtacccgagattgcttcatcaagcccttggatccttagctcagtccgaggaggatccatcgccgtgggtagcctcttttttccggttgaagaactggaatgtcttgtaggcggcgaacgcaaagagcacggttcctccgacggcgcacatgaaggggagcatgtctggcgtgggctgggcgaaggtcgcagcaggctcgtcatcacatttgagaccctcctcgccgtgctggtcgtatatctcgcgcttttccttatcaaagagcacttcgaaggcggccaccacctccctaaactgctcctcggcctgcggatggtcgttcttgtccggatggtagcggagagccatccggcggtatcccttcttgacgtcttcgctggacgcattcctctcgatgcccagaatcttgtagtaatccttacccattgtggtgaaatggtattctccttgttctggctgagatggtcgtctagcggtgttgcgccgtgtatggaatgtgaggcagcgtctcgacttgttggtgcttatgtggtaatgcgagtatatattgctgattcgattcgctgatttaaaacattattacaaataaacagtcaatcgataaattatcggccgccagtggccagagtgaccctaccttaccaccagaagcactgttagttaacagaagagattctgacgatcgtagcagctgtataggagcactattagcctattagtaattaatgatctgttaaatctatcttttttgagtactttaaaaggaattacacatttcgaaaatagaaaatattcatatcgcttaccggttttggtattttttcagaccgtgcggtatcttattcgccatcgaagcggtcacactgggtgccgccgccaacttcactctttccgttctgtgagcgaaaaccgaaaagtctgtgctttggtaagtgttgctaaaagttcggaataatgttgcatcccgagcattttcgggtacataactgttccacggcggtggtccagcaaagactaatcgttatcacgcctttcgcagttcttaaattcacccgacgagtccctaatacacaattaaaatggttagggagaacaaggcagcgtggaaggctcagtacttcatcaaggttgtggtaagtatagaaccttatagaattcgctcactagctggcgcctggcttatgctgttaactgatccctcctccaggaactgttcgatgagttcccaaagtgcttcatcgtgggcgccgacaacgtgggctccaagcagatgcagaacatccgtaccagcctgcgtggactggccgtcgtgcttatgggcaagaacaccatgatgcgcaaggccatccgcggtcatctggagaacaacccgcagctggagaagctgctaccccacatcaagggcaacgtgggattcgtgttcaccaagggcgatctcgccgaggtgcgcgacaagctgctggagtccaaggtgcgcgcccccgcccgtcccggcgctattgcccctctgcacgtcatcatcccggcgcagaacaccggcttgggacccgagaagaccagtttcttccaggccctgtccatcccgaccaaaatttccaagggaacaattgaaatcatcaacgatgtgcccatcctgaagcctggcgacaaggtcggcgcctccgaggcgacactgctcaacatgttgaacatctcgcccttctcgtacggtctgattgtcaaccaggtctacgactccggctcgatcttttcgccggagatcctggacatcaagcccgaggatctgcgcgccaagttccaacagggagtggccaacttggccgccgtttgtttgtccgtgggctaccccaccatcgcctcggccccgcacagcattgccaacggattcaagaatctgctggccattgctgccaccaccgaggtggagttcaaggaggcgaccaccatcaaggagtacatcaaggaccccagcaagttcgccgcagctgcttcggcttcggctgcccccgcggccggcggagctaccgagaagaaggaggaggccaagaagcccgagtccgaatcagaggaggaggacgatgatatgggtttcggtctgttcgactaagctggatcccgattgcagaatgccctctgcggcgcccgcgaaccatcgcttccgctttcggcgtttacccactaagaccctttgttatgttttctatgtgcaaattattgccgcggtttgacggacccaatggcgagttgcattaaacatgctgtaaactgctcgaaagcgcactcaactgtcttttaaacttgcactcgaatcgggataggtggacatggtgggattaggactccaaaatccaaaggcttcccacttttcttcatttccctttaaatatccgagcgacggcaggtaccgcctgcagctgctcccggtcatccggatatttacaaagtaattacttgcgataaaatgaatttcacaagatgagaaaagtttaaagtttctgctgccgttgtcggctgcgacttttgcgatttcttttgcttttcgcaaaggacatcgtcgacggaggagagacgctcataaaaattcaatttgtcttgacaaaatacgcaagaaattaagaatgtgccaagtggcggcaaaagaaactttccttccctttttcccagtttcctgcacatttcttgctctgctcgtctggcgagcgaaaatgagttacgcgactggggcgtgaaagtgccacgccctcgcggcgatgtgtcgcgcctggagtgctcaagggggggggggtggcggaagggtggtcaggagatgggagctggggaagcagtagccgcgggccaagttaaacactgcataaatagccggaccgaaatgaaaagccctgacgaaaataaatcctccgcaggcctctttggacctcagagatgggatcgtgagccacctcggaagtagttgggtcgtgtcataggttatcctataagattataccctccctataatttgttcagtccttgtatttaaaaccttaaattgtagaaaaagactcgaacaatttagtgtcttaattttatattaacgttcggaaggattaccacgtgcgtgtcacgtggtcatccctagattcggtatgttagagtcccatttggttttgagataaattaataaagacattgcataatttcaggcgccgctggcgtcaaatatacacaggaattagcataaactgtggggcggctgaccagccccaccgcaccatccaggataccacacccaccgcaccacccacc

SEQ ID NO: 16757 - DNA, 1214 bp, DROSOPHILA
tctttccgttctgtgagcgaaaaccgaaaagtctgtgctttgttcttaaattcacccgacgagtccctaatacacaattaaaatggttagggagaacaaggcagcgtggaaggctcagtacttcatcaaggttgtggaactgttcgatgagttcccaaagtgcttcatcgtgggcgccgacaacgtgggctccaagcagatgcagaacatccgtaccagcctgcgtggactggccgtcgtgcttatgggcaagaacaccatgatgcgcaaggccatccgcggtcatctggagaacaacccgcagctggagaagctgctaccccacatcaagggcaacgtgggattcgtgttcaccaagggcgatctcgccgaggtgcgcgacaagctgctggagtccaaggtgcgcgcccccgcccgtcccggcgctattgcccctctgcacgtcatcatcccggcgcagaacaccggcttgggacccgagaagaccagtttcttccaggccctgtccatcccgaccaaaatttccaagggaacaattgaaatcatcaacgatgtgcccatcctgaagcctggcgacaaggtcggcgcctccgaggcgacactgctcaacatgttgaacatctcgcccttctcgtacggtctgattgtcaaccaggtctacgactccggctcgatcttttcgccggagatcctggacatcaagcccgaggatctgcgcgccaagttccaacagggagtggccaacttggccgccgtttgtttgtccgtgggctaccccaccatcgcctcggccccgcacagcattgccaacggattcaagaatctgctggccattgctgccaccaccgaggtggagttcaaggaggcgaccaccatcaaggagtacatcaaggaccccagcaagttcgccgcagctgcttcggcttcggctgcccccgcggccggcggagctaccgagaagaaggaggaggccaagaagcccgagtccgaatcagaggaggaggacgatgatatgggtttcggtctgttcgactaagctggatcccgattgcagaatgccctctgcggcgcccgcgaaccatcgcttccgctttcggcgtttacccactaagaccctttgttatgttttctatgtgcaaattattgccgcggtttgacggacccaatggcgagttgcattaaacatgctgtaaactgctcgaaagcgcactcaa

SEQ ID NO: 16758 - protein, 317 aa, DROSOPHILA
MVRENKAAWKAQYFIKVVELFDEFPKCFIVGADNVGSKQMQNIRTSLRGLAVVLMGKNTMMRKAIRGHLENNPQLEKLLPHIKGNVGFVFTKGDLAEVRDKLLESKVRAPARPGAIAPLHVIIPAQNTGLGPEKTSFFQALSIPTKISKGTIEIINDVPILKPGDKVGASEATLLNMLNISPFSYGLIVNQVYDSGSIFSPEILDIKPEDLRAKFQQGVANLAAVCLSVGYPTIASAPHSIANGFKNLLAIAATTEVEFKEATTIKEYIKDPSKFAAAASASAAPAAGGATEKKEEAKKPESESEEEDDDMGFGLFD

SEQ ID NO: 16759 - DNA, 6260 bp, DROSOPHILA
gaactctccctgcgaatttctatggaatttcacatgcagcggcaactgcagcaaacagaaaacaacaaacgtgagaggcaaataaataaaaacacattatgcagaaagcagcacacgtccctatctacagatgtacaaatgtacatacatacatatgtacatatgtatgtacacacctacagccgtatgcgttataaacaaattgcaatcaaaagccaagtttgggaaaccaaaagatacactttcggtcgactcaaaaatgccctagagaaaccgaagttgcgacacaaaaaaaaaaaatagatagatcccttgacaaaatgtatctttatctttgtatcacaggttacgcttcttctcgaattatttatatatgtatatacatatatacaacacttggatatgaattcataaagtcaaatcaaatcatgctaatttgttaatgcgacaaaagttcagtcgcaatatgcgattgattcgtgaccagagaatatatgaatcgattcagtaacataagcatattagtatcattcccaaatcgactcatagtcatgacctcccagtgtgactcccagggtacttcagcacaacttttggctccccaaacggaaggttgagtaacttttttagccctcggagaaggggttcaccgactacagatccagcccaaaacaatcgcatgagccgtggatacggagatacctagataactaagctacagatacatttgctgactttaattgatgtgacaagtaacaagtggcgaaacaatggccaacccgaagacgaagagactgagagaacgtattgtacatggcaaattgcaagtgacagtggggtacccactcgaaaaaccaactaaagtcatttgcttgcttaaaataatatgaacaaagaaatcaatctttctcattctcttaattaagcttcatgaaatataagtcacgactttaagcttgattcaacgttgatacgaaatgactttcccactatttatagattatttaaagatcgttggccggaaattccaaaatcggaatttggatgtatgaataatgcctagactaatatatatgtttttcaattcatctttcaagacatttccccacccactcaccatgtcctcctcgtcctcgcagcagtttacatcctgcagcgtttcccgccacgccagcacggagtccgtgagcagcagcctcgcattggagcgaacgcgcagtttgcgtcccgtcctcggagccacgcccctcttaccggccaccgcccccgcggcgagcacggcccgctcccactcctccttcaagggcttcggaatggccggcgtggggttgtgctggtggttatacgaatcctccgcctcgcaactgcagccactatcatcgctgcgtggtgccagactcgtggtgtttgaggtggccagttgggcgggtggcggtggtgctggtcggcggatccgggtcatgaaccgctggtggaccagcgaaagatggtagtcgtagaatatagcgctgtacttcttcggatctttttggctgtagaaaatgcaaatgttccttaggatcggatgcaccacgactgatggctgctgatccgctggcagatcctttggcgtatcctttggctgcccggtgacgctgctgccagtgctgctgatggagcccagggtcgctgtgctgttcgtcaccgtactgcccaggcttagcgtttcatccgcctcctccttactctcccgcgagtacatgaactccatatccgtctcccacgctccatggtccatggaggcggtgggcgagggcaggggcgtcggcatcatcatcttggaacgcttggtcagcgtcgatgtggacaacttatggcgcactccggcggcaaagaccgccgccgcttggagagccatcacatccggatcagcatcggatggcagcgactcgtcgtagtcccccagatcctcctcctcatcatccacgtcgtcgtcttcctcgtcttcgtcctcctcatcttcgccctcgacgggaagggcttcgattatctcctgatctacgggttcgattgtcttgaactgccaaatgggttggtaaatggactcctcctcctgctcctctgggctggaattctccgcggcaaaggagttgcctctcaggttatcctttttccctccgttcggcttcgtctgctcctcttcaatctggcggggattgctcaaagatgtgttgggatttcgaacgggtacctttggcgccggtcgtcgaactttaataacgcaattctaaaagttgaggtggaaacatactatattgtcaaaacaaaaaataatatcctgtttcgactgttgtgttttactcgctgcaataattgacgaacggtgggatatcgttttgatttcatttcgtttcaattataataaaaacatttaaggaaaccccatctttgaataaagttacgaatttagggttacttctcacaaactgataaacatagttaattagttaggtaattacgtaaaataacaaaagtggaggcggatttcccgatcagcttttaatggaaattatcattaatatgccgcctgcgaaaacaatgaattactccattaataacttctttgctaggaatcacaatattgaacttttttgtgcagttgtgatggcaactttactgctttttacgcaaattttgcaatcagtaaaaaaaaaatattcaaaaaaatagtgtgaaaaatgacgttaattaaacgctgattattttatagttatcttgtgctttcattgcaaacttgtttgttttacttcacatttttttcattgttcaatggttgtttttaattagataagtttgtttatttatttatttttttttttcgtttcgctggccaatcgaatgttggcatccctttcgcacgtgaaccgttagtcaattttgaactgcagtgaaacgtaacagaatcaagtacacagagagaaaagtataattgcatcacaatattaacgtattgccctcaaactgtttttcatatataagaacagaaaaaaaagtagggatcaattttaatcgttcctgattgatgttgaactgatttgacggatcgcaattgggaattataaattttatatttatttacatgcactatttgtattactttgatttacggaaatcaaaccaattatagttaataaaaaaattggtaaaattcaaccgtgtcaattgaatttttaaataatatattttttttttgtggcgctcgttgataccgcccaaactttttctctctgtgcattttaattttgcctttgattgatgcggcttttgtttttgctttttattaatgagtgttgacctgtgtgattggctgctgttgttgttgttgctgttgttcattgacattgcaattggcgttgccgtcgttattcttgttgttgttgataccgctttcattgtcaacggtgtgatggttgttgttgttattgctgatgttgtcattgttgttgttgctgctgcagttgatggtgttgttgttgctgtttgttgaggggcgctctgcctcgccatttggcttaggcgctgccatcaaagctccgctgttgttgttactgttattattattgtttttcttgctgttgttactgctagtggagctctcgcccccgcacacaccctcttccctgactatcgctgtccctcttcgcctcgtacttcgattcgcgcggcgtcgcgacgcagcagcagcacacacgtctacgctctctgaaatcgctggcgaaactgaaaccgaagccgaggccaccgaacgatcgttgccgccggcgaaggagaaggcgaagagaggcaggcgccgtcgccaatcccccacaacgccaacaactgagtcacgcgctctccttcgccgataaccgttgatcggtggttgttgtcgctgttgttgttgctggtgccacagccacaagctgaacgatttgtcataggcggtgagaaagccacgcacactcacgtgcaagctggccgaaagagcgagactctgcatcaagcgcaagagagatacagagacttgaggctgaattgcgattgcgacgactgcgacgtgctcttcgattgcggccacctgttgatgttgcactgcctctttctcttcgcccagtgcgctcagatagtcattcacaaagttggccgtgatggcgcagcgccgttgctctctttccggctccacgttgtgcgctctcttctgctgcagctttcgtttaaagtccttgaccaacttcgcctgctcgtccgcacactttgcactctcctccgtgcttctccgcagtgtgaccgtgctctcctcggcggaggatgaaggatcgcgcgctggtacgctctttggctgctgccacggcccctcgtcgtagtggtgcacctgccgcctcagggaggtcatccactggcagatgctctcgttgagatacaatgatgaggatcctgatgtgctttcgtcctgcagcaggcgaatgcgagagacgcgcggcctcttgcgctctctcttgtggctctggctctcttcgggctctcttacgcggccgtagatgtgctgatcgctttggctgcccttcagttgctgctgctctagcttgagttcgcaaatgcgctggaggtcaaaggtctcctgggtgcggaacacctcgtccacgttgtggatgatctccagggagccagcgctgctactgccagtcgtgggtgtcctcgggaatatcctgcgctgcagcgacgacgaacggttcagctgcttaagagagccaaagagacgggtcaaggtcgccgcactggacttggagtagcccaagagcgaccgcgacttgaccttggtgggtggtgtgggcggtgtggttggtgtggacggtgcgggcgctttggctggcgtctctgacctttgacaccggcaccgctcgttgtcgctataaatgccgcggcacaaatcgcagatgttctcatagatgttgctgctctcgccggaaatcgtcgaaaggggcggtggcggtgggggaggcggtgtactcaccacgcccccgctcacgatgcactggcagaaatggcagtagcgtccttgggcggcaaacacgccgtagccgcaaccccgacaaagattctcgtagatcgcctcgcgcggaaaatacttgcgcagctccgcattcaggtgacctttgggggtggaggtcaggcccggcagattctcgtagatgtgcgcctccatgccgacgttatcgttaatgtccttcgcctgctgtggcatctctcttctttatttcttcttctgcctccctactttctcttatcgccgctgcgtcacatcgtaattcattattaagtgagaaaataatcgccgagcggggcaattggagagatagtaagtgagagcactgtcatcgagagaatttcgtgcaccgcaaaagaaatgtcgcgaaggtatttaattaacataaattcgatttggaaatgctcgaatggctcttcttaaatttctcactcgagtgaattgaataacttgtaatcttcgattactcactattattttttgagaaacaccccaaaaacgaccttagttctcgcagtgtaatcactgagaaaagtcaatgggcttgaactctttaagtgatgccactaccctcattttctttctttctgtctctttccctcccgcttccgactgcaatcagcgatattcattatctcagccaaagtcgctgcactctgcactcagttttcctccaaaccatcggctttgccttcaaaacacaattctttggcttgactttttttaaatctgggaatttaaaggatgaatttttcgaatctaattgcaaacagcttttaataatatgaccctgttatcgtgaatttctttaccatttcttctaatatttacatatattagctattttgataaaatattattggaacccattgctgtattcaatatatgtgtaactagacccaatatctctgtatatttcacgcccaaaaagatccagagcacttatcactaatcagtttagagctctaaaatgaattgtttgtttgccctaaaacatttgatgcttaaatgcaaataatgtttaaagtaaaaaaaaccccaatgcatttcatctgactagaattccacagtgctgcttctgcttttgagctttgtttttcgttgatatacggagatgagtcactaaccgatccaccaaaccatgtcggtcctctcgtaacccccgtccttatccctcggactcaaaatgatggccatg

SEQ ID NO: 16760 - DNA, 3192 bp, DROSOPHILA
atgccacagcaggcgaaggacattaacgataacgtcggcatggaggcgcacatctacgagaatctgccgggcctgacctccacccccaaaggtcacctgaatgcggagctgcgcaagtattttccgcgcgaggcgatctacgagaatctttgtcggggttgcggctacggcgtgtttgccgcccaaggacgctactgccatttctgccagtgcatcgtgagcgggggcgtggtgagtacaccgcctcccccaccgccaccgcccctttcgacgatttccggcgagagcagcaacatctatgagaacatctgcgatttgtgccgcggcatttatagcgacaacgagcggtgccggtgtcaaaggtcagagacgccagccaaagcgcccgcaccgtccacaccaaccacaccgcccacaccacccaccaaggtcaagtcgcggtcgctcttgggctactccaagtccagtgcggcgaccttgacccgtctctttggctctcttaagcagctgaaccgttcgtcgtcgctgcagcgcaggatattcccgaggacacccacgactggcagtagcagcgctggctccctggagatcatccacaacgtggacgaggtgttccgcacccaggagacctttgacctccagcgcatttgcgaactcaagctagagcagcagcaactgaagggcagccaaagcgatcagcacatctacggccgcgtaagagagcccgaagagagccagagccacaagagagagcgcaagaggccgcgcgtctctcgcattcgcctgctgcaggacgaaagcacatcaggatcctcatcattgtatctcaacgagagcatctgccagtggatgacctccctgaggcggcaggtgcaccactacgacgaggggccgtggcagcagccaaagagcgtaccagcgcgcgatccttcatcctccgccgaggagagcacggtcacactgcggagaagcacggaggagagtgcaaagtgtgcggacgagcaggcgaagttggtcaaggactttaaacgaaagctgcagcagaagagagcgcacaacgtggagccggaaagagagcaacggcgctgcgccatcacggccaactttgtgaatgactatctgagcgcactgggcgaagagaaagaggcagtgcaacatcaacaggtggccgcaatcgaagagcacgtcgcagtcgtcgcaatcgcaattcagcctcaagtctctgtatctctcttgcgcttgatgcagagtctcgctctttcggccagcttgcacgtgagtgtgcgtggctttctcaccgcctatgacaaatcgttcagcttgtggctgtggcaccagcaacaacaacagcgacaacaaccaccgatcaacggttatcggcgaaggagagcgcgtgactcagttgttggcgttgtgggggattggcgacggcgcctgcctctcttcgccttctccttcgccggcggcaacgatcgttcggtggcctcggcttcggtttcagtttcgccagcgatttcagagagcgtagacgtgtgtgctgctgctgcgtcgcgacgccgcgcgaatcgaagtacgaggcgaagagggacagcgatagtcagggaagagggtgtgtgcgggggcgagagctccactagcagtaacaacagcaagaaaaacaataataataacagtaacaacaacagcggagctttgatggcagcgcctaagccaaatggcgaggcagagcgcccctcaacaaacagcaacaacaacaccatcaactgcagcagcaacaacaacaatgacaacatcagcaataacaacaacaaccatcacaccgttgacaatgaaagcggtatcaacaacaacaagaataacgacggcaacgccaattgcaatgtcaatgaacaacagcaacaacaacaacagcagccaatcacacagaattgcgttattaaagttcgacgaccggcgccaaaggtacccgttcgaaatcccaacacatctttgagcaatccccgccagattgaagaggagcagacgaagccgaacggagggaaaaaggataacctgagaggcaactcctttgccgcggagaattccagcccagaggagcaggaggaggagtccatttaccaacccatttggcagttcaagacaatcgaacccgtagatcaggagataatcgaagcccttcccgtcgagggcgaagatgaggaggacgaagacgaggaagacgacgacgtggatgatgaggaggaggatctgggggactacgacgagtcgctgccatccgatgctgatccggatgtgatggctctccaagcggcggcggtctttgccgccggagtgcgccataagttgtccacatcgacgctgaccaagcgttccaagatgatgatgccgacgcccctgccctcgcccaccgcctccatggaccatggagcgtgggagacggatatggagttcatgtactcgcgggagagtaaggaggaggcggatgaaacgctaagcctgggcagtacggtgacgaacagcacagcgaccctgggctccatcagcagcactggcagcagcgtcaccgggcagccaaaggatacgccaaaggatctgccagcggatcagcagccatcagtcgtggtgcatccgatcctaaggaacatttgcattttctacagccaaaaagatccgaagaagtacagcgctatattctacgactaccatctttcgctggtccaccagcggttcatgacccggatccgccgaccagcaccaccgccacccgcccaactggccacctcaaacaccacgagtctggcaccacgcagcgatgatagtggctgcagttgcgaggcggaggattcgtataaccaccagcacaaccccacgccggccattccgaagcccttgaaggaggagtgggagcgggccgtgctcgccgcgggggcggtggccggtaagaggggcgtggctccgaggacgggacgcaaactgcgcgttcgctccaatgcgaggctgctgctcacggactccgtgctggcgtggcgggaaacgctgcaggatgtaaactgctgcgaggacgaggaggacatggtgagtgggtggggaaatgtcttgaaagatgaattgaaaaacatatatattagtctaggcattattcatacatccaaattccgattttggaatttccggccaacgatctttaaataa

SEQ ID NO: 16761 - protein, 1063 aa, DROSOPHILA
MPQQAKDINDNVGMEAHIYENLPGLTSTPKGHLNAELRKYFPREAIYENLCRGCGYGVFAAQGRYCHFCQCIVSGGVVSTPPPPPPPPLSTISGESSNIYENICDLCRGIYSDNERCRCQRSETPAKAPAPSTPTTPPTPPTKVKSRSLLGYSKSSAATLTRLFGSLKQLNRSSSLQRRIFPRTPTTGSSSAGSLEIIHNVDEVFRTQETFDLQRICELKLEQQQLKGSQSDQHIYGRVREPEESQSHKRERKRPRVSRIRLLQDESTSGSSSLYLNESICQWMTSLRRQVHHYDEGPWQQPKSVPARDPSSSAEESTVTLRRSTEESAKCADEQAKLVKDFKRKLQQKRAHNVEPEREQRRCAITANFVNDYLSALGEEKEAVQHQQVAAIEEHVAVVAIAIQPQVSVSLLRLMQSLALSASLHVSVRGFLTAYDKSFSLWLWHQQQQQRQQPPINGYRRRRARDSVVGVVGDWRRRLPLFAFSFAGGNDRSVASASVSVSPAISESVDVCAAAASRRRANRSTRRRGTAIVREEGVCGGESSTSSNNSKKNNNNNSNNNSGALMAAPKPNGEAERPSTNSNNNTINCSSNNNNDNISNNNNNHHTVDNESGINNNKNNDGNANCNVNEQQQQQQQQPITQNCVIKVRRPAPKVPVRNPNTSLSNPRQIEEEQTKPNGGKKDNLRGNSFAAENSSPEEQEEESIYQPIWQFKTIEPVDQEIIEALPVEGEDEEDEDEEDDDVDDEEEDLGDYDESLPSDADPDVMALQAAAVFAAGVRHKLSTSTLTKRSKMMMPTPLPSPTASMDHGAWETDMEFMYSRESKEEADETLSLGSTVTNSTATLGSISSTGSSVTGQPKDTPKDLPADQQPSVVVHPILRNICIFYSQKDPKKYSAIFYDYHLSLVHQRFMTRIRRPAPPPPAQLATSNTTSLAPRSDDSGCSCEAEDSYNHQHNPTPAIPKPLKEEWERAVLAAGAVAGKRGVAPRTGRKLRVRSNARLLLTDSVLAWRETLQDVNCCEDEEDMVSGWGNVLKDELKNIYISLGIIHTSKFRFWNFRPTIFK

SEQ ID NO: 16762 - DNA, 3229 bp, DROSOPHILA
aagtgcgcaacacttcctttattccacttttaggttacacgcaattaatatttccaatttatgcgaaagtgcacgcactcgcgaaagaaatgtgctggatggatggatggacggacgtggaccggtggatcagtgggtgggtgggtgaatgggtggatggctggtgctgggatcagatcatgtgtatctgaagtcggcggcccccattactttcgccactttccgaacgttatatcgaaactgttgccacacattgaatacacacatttttcttttcttcgctcgacttttcttcctggctgcgcttcttttgtttaatgggtttatgcgcaaggttgtcggtctatttttggtgttttgttgaaaggaaaaacaataacaaattattacttgcacttttcctacttgcacactcggtcgtccgacccgccgcggaattttcatcggccactcgctcgctgtctctttctctctccctcacggatactcgcgattttccgcgactttgaaattccgtatacgtccgttccgttcgtcggtcgaagctattctgagcggtacggcgcttttgaacacatcggaaaagttgaaaattttgagatttatttatagagagaacgggcagtgttttgatctctttgctgatttccaaaggtctctttgaatataattaatcaatgggttaatcagccctatagtggatttcttattgaaaaataataattaaaattcaatcactatgtaattaaatgtatttttacaatttatgagataaaaattgggtgtacaggttcatacccaatttctaactcataaattattattcgaataaacgcacctcaaaatagtttttgaaaaagcccgttaaaaacattgacttcaattcgtgctattactattagccaagtttacaaccatggttcgtggtcaggcttttatcagctacagtgtggtaaacagtagttttccgacgaagagttggcagttctggccggcgaggttatgcaaagcgagaggtttgcattccagtaaatagtaatatttctgaaagaaatgcagtccattctgtcttcaatgagggcactggccctgcgccagagcacggtggagcccctccgcctgctgcatctttccgccgtgagcgaggcggcccgtaaaggaactcgggagaaggcccgcaagaagaaagtcaaggtggaagtgaagaaggttggattcatcccgcacaaccagcgcaacaagaagtaggttgtcagctcgatgtccataacaccggatttactatcgttcttctctagaatcaatgtgaaacgggcggacaaacatgtggatgactcctggaaacaggtgcccaaagatgactgctatgtggggcgctactaccgctggccagtgtactcggtgcaggaagctatccagtgccatcgggagacgcatcatcccagcatgtacaacgtacccaatgctcccctcaatttggatattgaactcaacatgcaggcggagaagatcacacgttttgtggataacttccagcgcatggccatgattccacacaagtttgaccacggcgaggagcggaagatcatagttttcaccaagggaaatgtgagtgcagcttcttagtacaaaatcataaaataacatcttgaaatttatttccagaatgaagtcctggaggccagggaagctggcgcctcgctagtcggcggcgtggagctcattaaggatattaccagcggcgagctgctgctctccgactaccagtacgtcattgcccatccgaatatactggccgagctggtggccctgcgaggcctgatgaaacgcaagttcccaaatccaaagagcgagacgctgggcaccaacctggccgagatgatcgtcaaattctccagcggcattagttacagtgcagccaaggatgagtaccagcaaaactttggcctgatcaccgccagtgtgggcactttggacatggatgtccagaagcttgaggagaacatcaagttcctactgcaggatattaacactatgaggcccaagcgcgagggacgtttcattacacgtgtcctgctgaagagcccgccaagcagtgagcagctgaaaatcgatccctttgtctacgttccagagatgtgggacaagagcacggcgaaggtgaaaagggatggggccaagaagcagacagagccggcggaaccccaagaagcagttgcctccaattagttaaaacagaagcctatgtatttttgttgatggattgtttgtgcatactttaaacttacatctcctagagtcctaaacagtctactttactttggcagcttttaattgcattcaggccttctgggtggcggtgctgcgttgttggtgctggcgcatcatctccagctgcttgacacgggtgtaggcggcgctggccaccaggaccaccacattggaggtccaccagagagccgatcgaacgtcatggtagtactgagtggcgatcaccgtttgagcgcaggccttggccgttcccgagatattatgcgtcagggcggatgtgacctgaaatatcgatcgggctagataagcgattaacatgtgaattgtttgattaccttgatttccagcgcagtgacaaatccaatggcaaagccacaaaggccactaagcgtcatcgcggcccagaaccaagaagcccacaggtgcggatacgtgataatgctctccagctcgccattgatgatgatcaggggcaggaagagcaacgtggagtagagattattgtagtagctaagcagccatacctcctggttgacataacccaatgatttcttcgtctgaatagaaaacatggccaaagcaagcgaactaagcactccaaagatggttccccgccaggagaagacctccgtcaggctttcttggtccacacccagccagaatccaacgacaatagcgccacaacacagcaggcacttgaagctggttcgttggcgtagaatcacgtaagtgaggaccacactaaacacggttgttagggagcgaccgatgtagtagaaggccactgtgacgtaggacagcgacaggttgttggccccaatcatcagggtatagagcacagatagaggcaggatcttgcggaaggtgtcgatgtccagtggatttccctcgggaaacgtaaataccgaggggtacttcctgctcagccgacttgccacaaaacatatcactgtggaaa

SEQ ID NO: 16763 - DNA, 1118 bp, DROSOPHILA
ttatgcaaagcgagaggtttgcattccagtaaatagtaatatttctgaaagaaatgcagtccattctgtcttcaatgagggcactggccctgcgccagagcacggtggagcccctccgcctgctgcatctttccgccgtgagcgaggcggcccgtaaaggaactcgggagaaggcccgcaagaagaaagtcaaggtggaagtgaagaaggttggattcatcccgcacaaccagcgcaacaagaaaatcaatgtgaaacgggcggacaaacatgtggatgactcctggaaacaggtgcccaaagatgactgctatgtggggcgctactaccgctggccagtgtactcggtgcaggaagctatccagtgccatcgggagacgcatcatcccagcatgtacaacgtacccaatgctcccctcaatttggatattgaactcaacatgcaggcggagaagatcacacgttttgtggataacttccagcgcatggccatgattccacacaagtttgaccacggcgaggagcggaagatcatagttttcaccaagggaaataatgaagtcctggaggccagggaagctggcgcctcgctagtcggcggcgtggagctcattaaggatattaccagcggcgagctgctgctctccgactaccagtacgtcattgcccatccgaatatactggccgagctggtggccctgcgaggcctgatgaaacgcaagttcccaaatccaaagagcgagacgctgggcaccaacctggccgagatgatcgtcaaattctccagcggcattagttacagtgcagccaaggatgagtaccagcaaaactttggcctgatcaccgccagtgtgggcactttggacatggatgtccagaagcttgaggagaacatcaagttcctactgcaggatattaacactatgaggcccaagcgcgagggacgtttcattacacgtgtcctgctgaagagcccgccaagcagtgagcagctgaaaatcgatccctttgtctacgttccagagatgtgggacaagagcacggcgaaggtgaaaagggatggggccaagaagcagacagagccggcggaaccccaagaagcagttgcctccaattag

SEQ ID NO: 16764 - protein, 347 aa, DROSOPHILA
MRALALRQSTVEPLRLLHLSAVSEAARKGTREKARKKKVKVEVKKVGFIPHNQRNKKINVKRADKHVDDSWKQVPKDDCYVGRYYRWPVYSVQEAIQCHRETHHPSMYNVPNAPLNLDIELNMQAEKITRFVDNFQRMAMIPHKFDHGEERKIIVFTKGNNEVLEAREAGASLVGGVELIKDITSGELLLSDYQYVIAHPNILAELVALRGLMKRKFPNPKSETLGTNLAEMIVKFSSGISYSAAKDEYQQNFGLITASVGTLDMDVQKLEENIKFLLQDINTMRPKREGRFITRVLLKSPPSSEQLKIDPFVYVPEMWDKSTAKVKRDGAKKQTEPAEPQEAVASN

SEQ ID NO: 16765 - DNA, 6051 bp, DROSOPHILA
tcagattttaaagctttcgatcccgattacaaaggcaattttcaaagtaacctctcagttctgatcggcatcggttgtttgtttactttctgcggtatgtacatattttaaacacactcagagctatatttaatttaaaatttatgtttcatttttttcagaggactgcatagtataggaattaccaacatgatattttatatgctggctatagatatgattctatattttacgctcttgtccgagtttcctatatgggctttcttgctttttaagttggtgtttatcaatcgaccgctggagaggattggtgttattttgttgaataccgtagccaattggtatatatttccatacttgaaggaatggattgaccaatcggaagcgaaattgaactcggaataacgttcatgttataaaactatatatactacttaataaagaagatattaaagaagattgatccccacaatgtttatcaatgagaaattttcatttcttcagagtaaaaaatgtaaaacacaaataaacagcattaaaaactgctgactaagatcaagaggaactgctatgggaggcaaaaatactgcattaaagagctttaaggcacaaaagagctgttcgctacaacattttttcccatagagcttttaactgctttaacttagttcgttaaagtaaaaacagtagcagtcgacaaagaaacttgaaaaaatggtcaaccattttatattaatatatattttaaaacgtatggaaaaaccttcacgaaattcaatttgtacatgttatgtgtaaatttatttattcaaatgtagcatccaagcttcaaatgaaagctttctgcgatctcacttgtgaactcatagttgtctcactcgcacacgaaatcttcttaaagctcatcttgacagcaatcagctggcaaacatatgttatagcgctttcgatccgactaaaaagaagaagcttaaaaattgttaaaatatatttctatgtgctacgtccgtttgtgttttatattgtttactgacctgataagacgataatacgccgcaatggatgaataatgcggtgagtttggcgtcaccacaaatgatcttttgataaaggccttgtctgccatccaactacaatgcgagtacaaacagcagcaaattggggaagtgtacacaaaacgcggcctaaacggatggtgaatgttcactgtgtcgttcaaatgggaaaaggaagcagacaatggttagtcgacataactagttagctaatcgcccttcaccggattaacattcccattaagggctttataggaaatgtgggtgttgggatcttaacaggtcatctaagattagtgagtaggctttatggggtaagaaattaaatatagcagtgaacatttcatattcgaaatggttttttgggtgtatatccataagtatatccataaatggtaataatggtaagattagggattgaactttccattactgcttacttagataatttttcctgctcgaataatgttaaaattttttaaaaacctaaaggtgttgaagacttaactaatgccaagcgttttgtaacaccttctgcaatctggattatgcagccgaatttaaataagtgtaaaaagtgagttcaaaacgaaaaagtagttcaagttttcgagtttgtgtgccacaacggggtattgagacttcatttccgcgtacagagaggcgaaattatatcgcggtaattatatatgatctatatatgtatgtatatacatatgtatgtacacatagtacacctacgcaatgccagttgttcgtgcataagaaataggccgctttcaactgatgcggaaataacgcgtctgcaggcaaatgaaaaccaatttaaaaagcccaaatccaaatcaaagcccaatccaagacgaaacgaaactgaaaagccaaattaaaagtctatttcaatttcagtcattaaccgaaagagggacaaagtgtgacaccaattttcgtgcgcccctcgctttgctgggaattataaatcacaaaatgttacttttcttgaccattcacccacatttgtttttccccacatttcggttcacgttttttaatgggctagacaaaaaaaaaaaaacacgacgatgaaaaaaggcaacgatgaactggtaactggagtcaagttaacaccatttgcattatgcaagtggcttaaacaatatttggcttttcttgttgtttctttgttacggtttgctggaagtgtccactaattaatatgcaactaaataatttacaatgtgacgcgaatttcatgcaaaatatacgaaggcggagcaaaacaagaaattatttaattaacttgacttcacggtgttgaaattgtcttcaataaattgcgcaaattaaattcatttaccagaggggatgctgtatttaagtcagtaaagtttaatgctctttaaaaaaaaaaatcgattgtattaaaacacggaaaatcattaaagtggcatatacaaaaaatttttttttagttagattgcagctgtaaagattttaaaaacgatcattattcatagatggtaccacactttattggtaaattgtaatgaggcacttctaaaaattacaaaaatttacgatgcactgatttatgtatgttacttttaaagggcattctcgagtgaccagtgtccgaaaaataaaggcagcgtacacaattcgcaaatgtcagaaggtctttcaaggtgtctgggtctgatctcgaaaaaccggtagatccaccgcttcagatccaactcatcgtctccgtcggatgtggagatgtgtgcggcttctgcgaaatcttcttgcccaatttggagacgaatcttctcgagactccgcttatgctgatgcgacagttcaacttgggcatgtaccaatcggctggacagatcgaaatccttcccagaaacgaaggctatccactctgtatgccatatttgcaactggttttaattttttgcccaatgcagtttgcgtttttttcctgtcttataaatatgttgcgtctttttcgcatgcgttttgaaattaatgcaaaacatttcgtggcggctcgttttcccagtgctccagcagcgagacatctttggaacgggtctccaagttgaagttgatttgtgtgcttagtataattgctgcgattatcgagttgccgaagaggagactccaactgctcctctggctcctccgcctcctccgattccctcgcccccactgggtttttgaacatctcgtcttgactaaggttaagtcggtttgcgttaagcgattgtcaagtgtattcaaatccaaaagatgcaatctccggccagttttgacttggctctgtctcgaaattgtcgatctgcccgctgagaaatggcagctggcaggggtgtagtcatccaaaaagggggtcactttactataataatgatcatttgagtgccaattggcagatgaagtggtggccatttatagcatttaggtttataagtttcaaaacatggtcaattagggtttaagtggctgccatttttgaccgatctttgaactgtctaaaattaatctctcaatgatataaagtatgataattcgttcattaccagggccaaaaagcaggtgaagtgaattgaacttgattattttcaaaaattgattgatttctttttatgaggccaacgctttaccaaacaagtttaatatgcttattttaggacggacatatcgaattgatttttaatgactacaatatggagattaccagttcaatcattttggtaatggttgtttgttttttctcagaaaaataaacatttttacttactacaataattttcatgccattatgaaaatttgtagtttggtttttttaatgaactcgactaccttttcttttattctgtctctccattataatttatagtttattacaacatctatgcaccaaaagcccaaggtttagcctgacaaattcgatctggttccacagccaacacatttatctaccgccacctaaatattcaatctagccaaaaaatcattttccatgctaattaagtaatccgacctgccccaagcatgaaatctccataagatcccatgccgatcacacctagtgctcccatttgcggaccactttttcgcaatccaatttgtttacctttcgtttagctttgtgtgtgtatcaaattaatttccaatcaaattaaaacgaaatttgtatttacagaaagccattttagagggtccgagacaacggcgaagaaaggagaaagaaaggccgaccgctgtgataatacccgatgctccaaaacaaattagcataatcaaggcgcctgcccaatggctgaccattgagagatacatacatctattgagaaaaaaacgcacttttgtgccgcgatcattaacgcgatcaaatgcaaatgaggcgacatcagtcaagcggccgaaagcgaaatgtgcagcagcatcatcagctcgataagtttggactagcgattgcataatagagctaacatcaaacaacaaacgacctcatttcggaaatcgcaaaaccccgaacacaccgaagatagacccaaagttttgcatgacgtatacgcaacgtgggccgcaataatggatctaatggagctgctgcatcagctgttccttcacatacttgacatttttaagatctacatcaagtttgcactgatcacgctggtcatctatttcctggccgagtggtacatactgcgatatggagcagaattggaggccgaactggacgcccatctggtggaaggtgccgaactcagggaggaatcccccgagcgacctgaatcgaatagcacgctgagcaaggtgtttcgcttcgtggtgaactttttcatcctctaagcgactggattgaagccacttgtcaaggtcaatcgcaaagctgaacagttgaatcggttgctttttcgcggaattgcaattcaattcaggcagccacaactcaaggctcccgtcaagagaatgtaaaatcgaaccagttgcatttaaccaacagaaaatacaaaacaaaaataaaagcaaaaaaaaaaagctgcaaagtaaacacaatctttatatgtaataaacaataacagtaaggagctgtaaaaaaacaagttgaactgctttttttttaaccaagccatgcacaaaaaggtatcaaattcgttcattacattcgaatctgctgggcaaataagaatgactcaaactcgcttttggggttgggttttcatgaatttgggctaattgcaaacagaaccgccgcaagaaattgccacaatacattgccattgcaaaagtggcacttaaggaagtgccatataaaatgaaatcttaatgggccttttaaagaattcttcagagtgcttatacatatatgtgaaatattcataattgaggagttactccttgaaactaaataaacaaagcaagactttttccttaatgtctgtttatttattttaattgcctgtttatattcactgctggatttttattgctctcggaattataattgcaaatttccagacgcaccatttctggtaatggattataatacagaactcgcaggcaacaaagttaaccaaagttcaataacatattgctatcttttaatcgtaaaaaagctcagagaatttttaataatattaaatacttagtaaaataaaggaaacgttttcgatctataaattggttagttaatagtttatagttatcacggaccacccctatcgaacaagtgtaaatttcacgaaatggaaatgttatcagatacatctaaaatacctggcaattgtgggctatggatctattgatcgatggcttgttgttggtgtcttgccgaccagttaagtagtagttacaacacgctagtgagtgctacctgcaacaaatgtggaataccggttcaacaaaccgttcgacccacacaactcaacacatataaactgccgggcgacacggtgctctcattctcacacacagatatagggacatggacaca

SEQ ID NO: 16766 - DNA, 874 bp, DROSOPHILA
ctacgtccgtttgtgttttatattgtttactgacctgataagacgataatacgccgcaatggatgaataatgcgaaagccattttagagggtccgagacaacggcgaagaaaggagaaagaaaggccgaccgctgtgataatacccgatgctccaaaacaaattagcataatcaaggcgcctgcccaatggctgaccattgagagatacatacatctattgagaaaaaaacgcacttttgtgccgcgatcattaacgcgatcaaatgcaaatgaggcgacatcagtcaagcggccgaaagcgaaatgtgcagcagcatcatcagctcgataagtttggactagcgattgcataatagagctaacatcaaacaacaaacgacctcatttcggaaatcgcaaaaccccgaacacaccgaagatagacccaaagttttgcatgacgtatacgcaacgtgggccgcaataatggatctaatggagctgctgcatcagctgttccttcacatacttgacatttttaagatctacatcaagtttgcactgatcacgctggtcatctatttcctggccgagtggtacatactgcgatatggagcagaattggaggccgaactggacgcccatctggtggaaggtgccgaactcagggaggaatcccccgagcgacctgaatcgaatagcacgctgagcaaggtgtttcgcttcgtggtgaactttttcatcctctaagcgactggattgaagccacttgtcaaggtcaatcgcaaagctgaacagttgaatcggttgctttttcgcggaattgcaattcaattcaggcagccacaactcaaggctcccgtcaagagaatgtaaaatcgaaccagttgcatt

SEQ ID NO: 16767 - protein, 84 aa, DROSOPHILA
MELLHQLFLHILDIFKIYIKFALITLVIYFLAEWYILRYGAELEAELDAHLVEGAELREESPERPESNSTLSKVFRFVVNFFIL

SEQ ID NO: 16768 - DNA, 6238 bp, DROSOPHILA
tgaacctgcaccaccagccaagaccccagccaagactccgaccaaggcagctgctccagccgctgttgccagtcccgcagctgcggcaacgtcggcagacgcctctccatctccggccaagaaggcaacgcctgctcgcgctgccgccggagccaaggccacgccgcagcgacaacgcgcccgcggtcgctacaatcgctactaagtagacgtcgaaggaattcgtaatttaacataacataaaccttaatatacaagaaaaaatttacattcacgcccaggaggaggatgaagaaagaacagatcaaatcgatctcttcccgcaatttgacatttgcatcccaatttgcatatacactgaatgaatggaaactgagaagaagacggtcaacttttagttgaaacagttgaatatattgtacgacgaagcttcttgaaactgacgagggagaacacaaacaagttaattgaatcgagaatcgtattacctacccgattcccccctcacagaacgcataccatgccagccagcgaaccaaccattcaacttatgtaatcatataaattctataataaacaaagaaacaaaactagttgtaaaacaaacacgattcctgtgtgtcattgcgggatatggaaattggctttcaatctgttgcaaaatgagattcagtagcagtgtatatatctatgagggctgtacgatttcgttttagcgcacaattaatacatttaatacttgatctttttacacaagcgttatatttaatgctacaaatcggtacagagattaagtgaggtgagaatacatacatataaggaaagccttgatatagtaagatacgaagtgggatatatttattatttacagcttacgagactaggcgctactcccaggaatgctccgagggaggcggaaacgcttttttgagtgagatcccactgagtcgggaaatgggattaagtacttgggggcgcgcggtatgaagatcgagtggaatcagttgaattccagagtattcgcctccgtcatcgtcgtacgcatgcggctctggtcgctctgggaacgacgaagtccgcccggacgccatccgctcctccagcgcttaatgcatcccagcaaggaccagttgatggacttggagcgactcagcacatagacatacggatccgaggtgaagtgcagcgccgtaagaacatcggcgatgatgaagaacttgttcgatgcgggcacccgatttggagctatagccaacgggatggcgatctaaaacggagataattgttgataaaggccatgtaaatttattatattatattagatttgcataatacggaatggttgaagatactagacgtttagtagttactatctgcaaatttagaatggtatccacccagtactcaccatctgtggcatccagcagatgacgaacgagatgctgaggaacgccattagtttggcgaacttgatctcgactggcgaggagtcggtggccgccattgtgacgctaacgctgtgcctgtactgccttgccggctgtacactgcgatggctgtttccgcttccggtgctcagctgcgtctggtagagggtggtgccgctgctgctctcgggatcgatgctgatggcactgtttttgtccctggaaaccaggtcgtagtgcatatgccgcttggccgtgcgactccttccgatcacacagagcaaggtgtgggccacgaagaggttgcaggccacgattacaatgcacagcagggtacctggaatacatcgatggtcaaaccaatatttgaaatgtaaccaatttgataggaacttaccgaagaccataaagagcaccgcatacgtcttgttccacacgcccggcgcatcgcgatatcgtatacacttaagctggtccggattggattcatcgatgtatgcaccaaaaccaacgaatggcaggaacgtgatcaccacggcgatcatcagaatgctgttgatgctcttgcgaatgagctcgtaggtaatgtgctatggcgagagagatttgtgaatatttaatgaatgagttggcaatgtttgtgatttcctgtgtgcacttgtatcatttcttaaaattaaattacactaagaataaaatgcatagaaaatgttatttattatacatatattgcaatcaagttcataccttgtggtagataaagggtctggctagggccatccatctttctgccgccataactgctgcaatgcatccagaactgagcccgaaaaatcgccaaaccacgagtcccacgcaatccactcggatgaacgactgcaggacttcctttgagagatacattttcagcagcgtcgtggtcagcatgcccagtagagccaccagattgttggtcgccaggcatctgaaatagttgagagctccgtaaatttcggatagcttagctttatggcatttcgaagctcataaatcggaaagtaaatgcttttccttgccattagcgcccaaattgcctacagttcgttgggttctttaataagctacgaatataagttgggtataagatcgataaaatgtaataacgaattgcttttaattaattgccacttttataaaccgaaactttcaatcaagatacctcaaagctgctccatatggttgtacaactatcgattttggttatctaagacgtgactcggtccttaaacgctttgattcgaacgccgaccaatagcaatgaataattattttggttcgcaaaatgctcaattataaaaaggaaatatctattatatggatatttaaaaatttaattcatttttttgaatgtttatattataaaggatgctcctcaaatttctccattgaatattgtgtatattcactttatattcgttcatatatttaacatttgtatatttatactaatataaactaaagtacagatccctgtatttttatctacttagtgaaatatgtgactgtcaatggtgacttagattaagtgtttccttttattggtatcataaaatattgcatttgtggggcacgaatgtgtttcgatttgattgtttttggggcgccgttgacacaggaaactcatttgtctccgtgtgaaatgaaactatatgaatgtagggcttttttccaatggaaatatatgtatatatatataaaacacacgcttggaatagaacacaaaaatgggattgacaattcccggggattggcctaacagtccgtgcatcgttaggcatcgcaatgactttattcatttttgttttcattatttgtttgtgcacattgcacctttatacctgatttcagcgaacaagcgattaaaatgcattttatggtgcattgtaaaagtttcgccaaaagctaaaatgtcggaactgttcattacagggctaaaatgtctaaatcttcaattcgacgatttgcagtgcgaaatgcaaaatcgttttgctaacttgtaaaggcaaaatcattgtttactctagcaacgggaaaatacacacagctattccgcttttcgttcatagtcaaaaagcatgaagggataccctgatttatcgacaccgctcaagtgccattcaccagcttcattcaatcaatcaaattacagatcaaaggctctgcatgaaggaggcctgatgcctgaagtggaattcgcgttaatttatgcttccttgacggctcaaattgctggcgacagcaatttacgcatattacgcatacgcactgtcgtctcagcaaaaaaaaaatgttgggaaaggagcaaatcgcaaacaagctcactgaattcgccatgggccaatgctgataaatgtaatataaattgtgacaaatatttggcttatgaactaaaagaatttccgtgtgtgtcatagattttatcacttctttacagtacacaccctaccgaatgattaacacgatgtttaaaatatcaacaaagtctattatgagtattcgtattgagaagcgaatattttacaagaaattattattattatattaatattaaaaggaatttggtgaaatacacaagttttatttcactcatatttacaaaggaatagattatcatttttgagtattattatatctaccagttttttgcacctaagcaaagttaatttaaatacatattcatataaatcttttccccagtatgcacatttgccaatcaagtcaaccaccgatcgccgtcttcagttacaccataaagcttttaatgcattcgcaattggctgcattcccacgtcgccgataagattgacagaaaacagactggaatatggaatatggacaaaatctcaatgcccaaaacacatggccaacgaactaattccgtcatttgataagatatgcaaaaataaaacagcaaaaaccatgccaagcaaaacaattcaaactatgcaaatcagacccgcatagacatattatagagcaccaaagtggccgcagttgagagcaggttgaataaacttacatagccatgaactggacacaaacagtggcaaacattaactgcatgaaatgagtagctacacgctgagaaaatatgcaaaatgtcagctcaataatattattaacaataatactatatggttttgcatgcttaatatttatgcaaatcaaatagaatttggtgaactacacaactataaattactactaagatgggtacattttgaaagattttagggcaagcaaaacctactttttgcattaatatattattatttccactatgcatagctgcacttaccgcagcatgagcgtgtatttgctgtttttgttgagcttcttgcgcgccaaaatgaaaagggccagcgaattgccaaaaacgcccagaaccatgataataacaccaataatcaggcgatttcgatttgcatagagcgctttcggaggcgccacagtagttgagttgtgcggcatcaacaggtcgagcacaggtgttgtggtttccattttgccggtatgataattgcgttcgattgcaggtgattcaggtgaaaatctaactggccgcaaacgatatttctttttcataaatgagcctgccgcaaaggcaaggcagctcgcaaatgcactggtagatggaaacccgtttcgatagccaaattgggacttttttcctaagacacttaattaatgattagcgcacgcgacacttgatcaaccaacgaccgaccaattcgaaggcgattcgattcgatccgaggagcgcgtccgcagtcagccaggcgtcgatttagaatgactgccgaccgtgccgagcagagcactcgtcggctgctgcccatagctccaagctatccaagccatcatatacacgtgggggtggtggtaggggccagttcggagcgaggccagttcggctggcgccgccgccggtcggatcgcatcggatgtagcatacagcacatagacacccccaagcgaagcggccacccacatccacgcccagcgatggcgaccaccccatcgaaaattcacagctcgtgccagcgcctttgccttttggacgtgtgcgaacggtcggaatagcacgacgaattttattgttttatactctctccacctgcggctcactttaatttcactttcaactggatgtaatattaattatgcagtttttaagcttccatttgattttatacagttgactaaattagaataaaataatatactcaaaagtttacttcagcaatatatttactcatgtttctttgtcattgaaaaattaacaaaacaaaaaaacagctatttcatagatagattaattattattattaagagtcttcagattcgtcatctttagtatatggtgtgtcatttgaaaacctatttttgaggaatatatgaactgaaatctgcgtatactttaattactgtaatgtattaaagtattgtttcttttatacaaaaagtctaaaaatataagcaaacaaattattttactgaaaatttgttttttatgccacttttaagaaattttgcgaattaaacatatatttttaaagctaggagcctggtaattatagtagtttagctttaactctttgctgaaaatatttccaactaatttatttgttttcaacagaatgcattacgaaagataaaaattaaatttgcagttactaagcgttgcagttgcaccttttcttattcttatcttcttagtatatagtactgttttgttgggcaaaaatgtttattgtttagtttcaactgcc

SEQ ID NO: 16769 - DNA, 1507 bp, DROSOPHILA
actgcggacgcgctcctcggatcgaatcgaatcgccttcgaattggtcggtcgttggttgatcaagtgtcgcgtgcgctaatcattaattaagtgtcttaggaaaaaagtcccaatttggctatcgaaacgggtttccatctaccagtgcatttgcgagctgccttgcctttgcggcaggctcatttatgaaaaagaaatatcgtttgcggccagttagattttcacctgaatcacctgcaatcgaacgcaattatcataccggcaaaatggaaaccacaacacctgtgctcgacctgttgatgccgcacaactcaactactgtggcgcctccgaaagcgctctatgcaaatcgaaatcgcctgattattggtgttattatcatggttctgggcgtttttggcaattcgctggcccttttcattttggcgcgcaagaagctcaacaaaaacagcaaatacacgctcatgctgcgatgcctggcgaccaacaatctggtggctctactgggcatgctgaccacgacgctgctgaaaatgtatctctcaaaggaagtcctgcagtcgttcatccgagtggattgcgtgggactcgtggtttggcgatttttcgggctcagttctggatgcattgcagcagttatggcggcagaaagatggatggccctagccagaccctttatctaccacaagcacattacctacgagctcattcgcaagagcatcaacagcattctgatgatcgccgtggtgatcacgttcctgccattcgttggttttggtgcatacatcgatgaatccaatccggaccagcttaagtgtatacgatatcgcgatgcgccgggcgtgtggaacaagacgtatgcggtgctctttatggtcttcggtaccctgctgtgcattgtaatcgtggcctgcaacctcttcgtggcccacaccttgctctgtgtgatcggaaggagtcgcacggccaagcggcatatgcactacgacctggtttccagggacaaaaacagtgccatcagcatcgatcccgagagcagcagcggcaccaccctctaccagacgcagctgagcaccggaagcggaaacagccatcgcagtgtacagccggcaaggcagtacaggcacagcgttagcgtcacaatggcggccaccgactcctcgccagtcgagatcaagttcgccaaactaatggcgttcctcagcatctcgttcgtcatctgctggatgccacagatgatcgccatcccgttggctatagctccaaatcgggtgcccgcatcgaacaagttcttcatcatcgccgatgttcttacggcgctgcacttcacctcggatccgtatgtctatgtgctgagtcgctccaagtccatcaactggtccttgctgggatgcattaagcgctggaggagcggatggcgtccgggcggacttcgtcgttcccagagcgaccagagccgcatgcgtacgacgatgacggaggcgaatactctggaattcaactga

SEQ ID NO: 16770 - protein, 412 aa, DROSOPHILA
METTTPVLDLLMPHNSTTVAPPKALYANRNRLIIGVIIMVLGVFGNSLALFILARKKLNKNSKYTLMLRCLATNNLVALLGMLTTTLLKMYLSKEVLQSFIRVDCVGLVVWRFFGLSSGCIAAVMAAERWMALARPFIYHKHITYELIRKSINSILMIAVVITFLPFVGFGAYIDESNPDQLKCIRYRDAPGVWNKTYAVLFMVFGTLLCIVIVACNLFVAHTLLCVIGRSRTAKRHMHYDLVSRDKNSAISIDPESSSGTTLYQTQLSTGSGNSHRSVQPARQYRHSVSVTMAATDSSPVEIKFAKLMAFLSISFVICWMPQMIAIPLAIAPNRVPASNKFFIIADVLTALHFTSDPYVYVLSRSKSINWSLLGCIKRWRSGWRPGGLRRSQSDQSRMRTTMTEANTLEFN

SEQ ID NO: 16771 - DNA, 2605 bp, DROSOPHILA
ggctgtagctccttaattagtttcccatacaagcgaaattggtgaaagcctgcctgccaaaaacaataggcgtccgagtctcagtgatctcagccctttaaacacatttaaagttctagacgtttcgttgtaatcgctaaaggatttaaacaacatttaagcccagatttacgaggccgacacaatatgagagcaccgcgaaacacaaaaatggaaatcaattgccagctgaattcagaaatgggctcctccagcaatgccaagtatttcccgcgagtattttgattggcatactacaatacaaccccgcctcccacgcacagccattgaaatgccaaacagtcggcagaaggagcgcaaatttatatgtagcacatgaatttcaaatattttttctccacggctggcgacacgcggccctaattgagtgtggggagcatcggaactgggatctgggatcggggagtagaagaggggagtgagaatcgtgtgtatgaacaatattccacaacatttaactaattgagccaacaacgtggggccagaagcgagcccccaaaatatgtaaaattcagaatttgatttgtgaagaatctcttggaaataaagagctgtcccctaattgatatgtgggtggatgggtgggggttagctgacggcagctgagagctgcattgacaaagttgttaaaacatcaaaagcagcaattaaaatgtaattacacgttctgcgccaaatcgaattaaaaaatcagcgttcaaagttaaatagagtgtcgagtgcaggcggatggctgtgggcgatggagagacactgatgagcgatgataacaaggttggggtttccacattccgctttcacgggcggaacgggatccgtcgttaaccacggcagcttttagcggcacctcctcactcgaaccacgtggaaccgttaattaaaagcactgaaacgttttgaagccagcccaactcaactgaacgcaactctctttgcaggaatggaccccaattggcgacacattatcccgccgggccagaagcgggtcgtttccgagggtcagtgtatcgaggactgcaccggctacgccttcccccagcagggcatcaacatattcgcggtgatgatgcgcacccaccagatcggcaaggaggtcaaattacgccaggtgagtgcccttggatttctatatccctgacatactggggtacccgaagcgccatgctaatgagctaacttctgctcctaaccccgttttcagatacgacaaaccgaggagctgccgccaattgcacacgacagcaatatagatgttgcctatcaggactttcgacgtttgccacaatcggtgcattccatgcccggggatagactcatcgccgaatgcatttatgacagttcgtcacgaaaggcaattaccctgggtaagtgctcggggagtatatacgagtatacgtgtacttgtgtgcacatacagagtagccctgcaccgaagaaagcgtgccccggcccaaacagccataaagattgcaaaaaaggcaggattcagtattcagtatacaggaaattgtaaaaggcgaggacgaagtcccagcattgtcgtgagcgaaaatgttctataaaagtgccgatggcgctggagtgtaaacagtgtgggcagagggagttgtgtaaacaggcagtggcaacggtgagcaatcgtcgttatgacacatttaaatcagccaaacgatatgcgacaggcggcggtctggggggacggatagcaggatagctggataccagggcgaaccgttgcacacgaaggcgcaagacaaaggcgccggccactctcatcgagagggggagtaggtggatcctgccggcgaagacagagcagccacgtcattgtaaaatacataaaccaagacagtgaaacatttcacttagccacggtgtgaattggaatgggatgggatgggatagaatgggatgggttgccttccaggtgttgtagtgggagttgtcttggtcttgctctgctccgctcctggtgtgacagctgctcaggactcaaacgaaatggacaatgcggtacaatggcaagctggggtctggatcgaggttgttattaatgagattggaatactggaagatggcaaaatgtgaagctgacacaacagacaacgataatggaaagaactgatttttaaggataaagaagtgcatggtgcagcaacagggattcaattcaatgagaagcgcataggtaggcgatagagtaaaaaatatctgagcaatttatgtggacaagggcaagggctttgtggggcttcacagggatagataatattaatgaaaacatttagcctgtaactagatttttacaagatgtccttatgattttgtttataaaagtgttttcatacagtagtatgatataaataaagtcccgtcttacagaactcctgccagtgaggcatataccaggcactgcactgcagctccattaatttctccgtagagttgaaagaaataacagcacctaacgtaaatttgactttcttgcttgcttgcacaaattcaaacacaatctatacgactcgggtggcggaaaggaagcaga

SEQ ID NO: 16772 - DNA, 360 bp, DROSOPHILA
atggaccccaattggcgacacattatcccgccgggccagaagcgggtcgtttccgagggtcagtgtatcgaggactgcaccggctacgccttcccccagcagggcatcaacatattcgcggtgatgatgcgcacccaccagatcggcaaggaggtcaaattacgccagatacgacaaaccgaggagctgccgccaattgcacacgacagcaatatagatgttgcctatcaggactttcgacgtttgccacaatcggtgcattccatgcccggggatagactcatcgccgaatgcatttatgacagttcgtcacgaaaggcaattaccctgggcgaggacgaagtcccagcattgtcgtga

SEQ ID NO: 16773 - protein, 119 aa, DROSOPHILA
MDPNWRHIIPPGQKRVVSEGQCIEDCTGYAFPQQGINIFAVMMRTHQIGKEVKLRQIRQTEELPPIAHDSNIDVAYQDFRRLPQSVHSMPGDRLIAECIYDSSSRKAITLGEDEVPALS

SEQ ID NO: 16774 - DNA, 7420 bp, DROSOPHILA
aaggagtatgctgtctgctgcccacgttttggctatggacgccaaaaacctgtttgatgttgtcgattcgatacgtcaacgttatcagcatctattcccgccatccgccacaaaagaaacaagttgttcgtcaagtttcgagtcgacttctggatctattgtcgcagagccagttaatgaccttggtggttatatcaagactagcacttctggagatttgcttcaaaacacaggaatatatgataatgatttgcatcatagcttcaactcgcaattgcagttgcaaaacccaaaagccagcatcgacttaagcggcggtggtagtctacagcgagggatgagccttggcttggacacaaccaggtcgacaaacgaaccgttgcgaattgttgaggagaccctgggcagcccgggtgaacatatgtactgcaatacgtccgccttgcacggccacgcgtaattctaaagcttgtgtttttttctatgcgaagatagatattaacttaacgatctaactactgtaaatacttaatatatatcagaatatgtatatcccacgaactattcagcggataattcgcttatttacgtacggaatatacatagctttgaacatacttactcactaaaaagtttgacgagaccccaactcggccggccgcattctcacatcgtcatgtagtcaaaataatttaagaaacaaagacacgtttttgattgaagatggctagtaatagtaatttatagataatctactcgatctaatacaactaaaaattaaattcatcatcaattcgggtgtgttttaagacatttatattgtgatttatagtttaccattataggctttactcgaagctaattattttggtgcaaggttcaatcacaaaaaataaaaagattaactaaacaaaaagcgttgtttctttttttcagttattcgttgaatccaaagaaggaacattttttaatcgtccccataaataaacatcttagaaaatacggggtatggaattctttaataagttaacatcggctcacgttacaaatgcaaatgtaataaatctttttattgggtcaacaagtcattaaattcggtaacaacacccatcgacatacaaacaatgacgtgattatattggatgaaatctttttcggaagtgaagtttgttttgtactatataaagaaaaatattggatatagccattaagagattccatgtaaatatttgttcgagttgatttgctagcttagatttatatcctttacgaatatattgtgcgctctatccactcctccaacgtaaaggtggctgtttcgttcttctcggtgtcgcgctccttgaatatatctacaagaaaagtttaccatagaattttcacttttataaattagaaccacattcacattaccaatatatgtcttgattttaacagcgcacatgataaaatcatcgaaggctattttgccatcacgagaaccatatcgatggcccaaaacatttagaacacgattgtttagatgatagccagcagagttaagagcttcgcgaagctggaatccggataccctgcccgtattctcaacatcatagaccttaaatatggccttccatttggcaatttccgagagcaaagtctcgaactcctcgaatcccagctttccagacttatcagcatccaacatggcaaccatggagcggcaaacatccttggaaaagccatgagtctcatccacaattgctgtaaaaatttctttgtattctagtcttttttaaaagcgtatatatatcatcttaccatttgctgttacaggacctccatccgccggattgtcccctatcagcctcttgttcgactgatcattcattcccaactgctcctcgaatggcgtacccttcaaaaacggtccacaaatcaaggataaaagtccacaagcgccagctccatcgtcaccagggccagcagcctgggtctcaaaggccatgttattggagaaacggttgaaaaccactggtttgggtaaatctgaaaggaaatcgttgtttgaaaagccatttgagtagtttttaatctcgagccttaccgtccctcatcgaatggtccaaaatgcgtttcaattccatccaatccacctccatgtccttgccggcaatgctgtcgaagaggcgtcgcaagccctccttctgaggatcgatgggcttgggtgttgggaatcctggcgtaatctttaaagcgaaatttctgaataagcgatcccgatcccattgaccacagttaacttaccgtatcggctttgccgccataacccacatgatcatcattctctctagatgggagtgaaaagcgaaatgattgatattgaaatgaatggaaaacaattcgtttatagagaaacaaatggaatacaatacaatttacagtacaaggatttcgaatggcctaatgagtattgagaagcagattttcaagatgagcttaatttgttggggtccatttttaaaagtatattgttgtggaagtttcctttattattactttaataaatatctcgttacatgacaaaaatacaatttaaacaagggttaaaaataaaccgaaaaatttaactttgttaatagatttcactatgttgctgccgccaccctttttataactgataaattaagaaaattgaacttcatattgatcagaattattcttaacatgtaacagacagaccgacattacatttgaatttatctagaagaaatatatttcgagtttctggaatactgcaggcgttaatctcaggtaaaaatatatataagaggagtgattaaaaaatggcataaccaacttatctgtcaggaatgtgtagagggtaaagaaacaaatctagtcaaacatttactagcactagagattaaagaatactatagtcacaacataccacatattgcacgtaagaagcttttagttatagaaacccctcattatttctaatatacaaactcattgtcattgtctacttgtacgcactccatgttattttgagtttctgagaacactcgaatgatgaactctccctcctcgtttggatcgaaagttgaaggcacaatcaggtagtgaccaggaggcaatttgaagcgagcacacacctaaataagaaacgcatatgttaagtgattgcagccatatcctggatatatccgtatacgtacttcgcgggtgttgataaagtgcggcgatcttcccacagaagacttgtatctgaaaaagttcagaccctggggacggttttccagttcgcgatcattaaggctatagatagcgaaaccaatggtcagacactccattcccatattgcgcttcgatctgcgattcttttgcattaaggccacgatgacggtgcactgtccctcttcgtcttcctcatcaggatcgactagggtgataatatactgggggttgtgccagaaggtatccaggaaattgcggcaaccaccagctgtaacaccgggtgtccattctccctcatacatggacatctcccactttcgcttgccactgttttgttggtcctcggtcagtgagtccggcgacaaattgcaaatctgaacaaaatcatggcgaatgaatcatgaaatatttcaccaagaaatattaatagtcctacctccacgcgatcgaagtggttaagaaaatcttggaaggacatccagaactctccgtctctgtcgaatgttagtccaatctccgccttctgttcctcgggtatatagcgccattctggtgagctatcactccatggtccattccactcggcttcattgccccaaggatttcgcattcttatcatagggatctttccctgacgatttggcgttactatgtcaataaggcaaacctgttgacataagattaattaataaaatgttcttatcatagcaattttccgaacaaaccttggttatggagtaagcgtgaccacggattaagccctgaggagtttctgcctccgtgacatttggatcaggctcaatcgagcatcccatcatggaattgcgttcagctgctttttgcagaatggtgaatagattgccgggtgcttcttttaaatcgtaccactcggatacgccgccagtaaagtcctccatggcctcgcaagtgctgcctccctttagtgcctcgtaggatccatgaagtctagaaagcatatatacatcagttgaccataaagtatgtgaataatgtagtcctacttggcataagccttctccagcagggcgctccagaactcgttcttctccgtggagtgcatgtacatcagctctccattataagtgggcaaacggtcatcaatgattacatcaacccatttaccttaaaattttaaactaaaattgtaagaagcgcatgaataatttttttaataaataatttaccatactgccaaaagcggaaatggaagataccagcatagttctcctcgaaactctgttccgctggaattacccgaaagaaaaggttggattcctgagttaaattggctgtggcagccaagagccaactgtaaatgtaagcatttatttaaaactattaattattctggctgcggaaatagagattttgttcttaccagtcaccaagctcgccttgctgaacatcaaaacgcgaataaccctccacaaaaaactggggattctcggcaatttcctttataattaaagcatttatacctttagttacgggtaatatggtagtatctaaaacttacatgaggtctcagccattcgatgtgacgatctggacgccgggaaaactgaagagactcgttcgaagccggaaaaagtggatcttcgaaaagggaaccactggccaggcagctgttcaatattgtctcatagtcctgcacctcggaatagggtcccaggctcgagctcttctctcccagctaaaaaatacatgctattagtgatatgaatctaacaaaattgatgaacttgattaagagtattatgtatgtacacgataaagttgtgtaatggagttgtataaacgatgatgcgttttacactttacatgcgaaagaaaaagaacacaaggacaacacagtacgacactttggcagcgcattatccttggaatggaattatgtcaatgccattacgatgacgggagtaggtacttacgttcccatagtacaacgtactattactttgagattgcaatggttgctaatgagtggaatgtatatgtatttgttaacatgcatatgtagatttcaatggattgttttctatgtttgtttagtatagtatagcgccctataaataactgttgataaccgtgtgggtcaacttacaactctcatattcttgatgctgggcagaaccctcttggtgtcggcctccttcttgatgaagatctcgttgatcaccgatccgaccacatccttggccgctcccattgcagcctcaccagctgcattgaggaactcctgtcccgcttgcctcaagaatcccctcaagtcgtccatcgtgcagatatctgaaaatatatgtacatatatagtttaatatcagttagcagtgtaaggtgccgcctcagattaaaaacccattaataaatatttattgttcaaacatttgatgactagttagcaacatccaatattttttatatcgcccatatttacttataagcctcgcggtggaattaaaagcacacccagagacataaatatggtttaacgagcattacagaatcgttagtattcccagtgtgactggaagtcgggctaaatgaaattactttaattcacgcaaactgaaattatactttggagacaagaatgtctcggttcgcacccaaatataattcaaatgtttctacatatacaatgctgtatttatacatatgtagccgctatatatatatgctatattgtgtgacatcattcggaagcatgagattctctagtgactcaaagggtgtgcgccattcgggagattaagcttcgttttttatccatattaagccgggatattgacattgacccatggaactactacatatgtacgacacatatagggtatatatttctgtgacaatagtaaattggcctttaattggggcgaaatatgctagattggctgacccatctgttattgtatttgcgaacattggtaattctacggcgaaacccaaacaggtttggtaattaatgcattcttctggcctggctcattcccgtgaccaccatattttcgtaaagaatagtatattcgtcataggcacttgatatttctaatactatatatatttgcccattttccaacggaccttgattggtcgagagaacgatttccgaatcgaatcacgcactttcactccccaaaatcacagcacaacaataaagtaacggaaccacgcaccttcaccgcacggagatatttactcactacaaatatttatatctgtagctcaacacctgactgctatcgaatgttttggtatttatttttatcgaagtattttgccgaaatttgtgatttgccagccctatttcaatgtaaatatatcgataatcgcccgattttactgaaaaatatttcgataagagcatcgatatttcaaacaaatatcgacccattgacatgcgtcaggtttgtccatccctaacaaaatcgtagtacgaaatatcgaaaacgaaacacatcacgcgggcgaaatttcgtgaagttcagcatttacaaattgtaagcagtggttttatcgaacccattgaccaattagtgggcttctaaaattagtgatagactttattaaatgaaacgagaaaatagaggcgaatacacccgtacagcaaattgaccatcgattttttcacggcattgccggtgacgagaatgcgacgccgttcatacacacacacgcacggacacgaatgtgtgtatatggcgcggcgcttgtgtgtgaaagtgtattcgtataaataatatgacataatcgacgtgtgcggcttaattgacatagtttttgtgcgaagaatacctaaaagtgcgaagagagcgccaaaaaaggcgttttttgtttgtggtcaaggtggcaaaaaggacttgcaccgctattttcccctgcgctttgctccaaatattcgttcctccccatacactctctcgcacacacacaagcgtgtatatttgggcgttgcaggatgaagaactctctttctctctcccactttccttcgctctcttctcgtattctcttgaacacttttgcgcaatttgagtgatttgcaaggcaaactaatgcttttcgattgtttaccgaatttagttaaccccgtttggaagccagtttgtctggaagttacttcagtttagttgttttcaacatctccacttgacgttgcctaacactgcccgccctc

SEQ ID NO: 16775 - DNA, 2857 bp, DROSOPHILA
ggtgcgtggttccgttactttattgttgtgctgtgattttggggagtgaaagtgcgtgattcgattcggaaatcgttctctcgaccaatcaagatatctgcacgatggacgacttgaggggattcttgaggcaagcgggacaggagttcctcaatgcagctggtgaggctgcaatgggagcggccaaggatgtggtcggatcggtgatcaacgagatcttcatcaagaaggaggccgacaccaagagggttctgcccagcatcaagaatatgagagttctgggagagaagagctcgagcctgggaccctattccgaggtgcaggactatgagacaatattgaacagctgcctggccagtggttcccttttcgaagatccactttttccggcttcgaacgagtctcttcagttttcccggcgtccagatcgtcacatcgaatggctgagacctcatgaaattgccgagaatccccagttttttgtggagggttattcgcgttttgatgttcagcaaggcgagcttggtgactgttggctcttggctgccacagccaatttaactcaggaatccaaccttttctttcgggtaattccagcggaacagagtttcgaggagaactatgctggtatcttccatttccgcttttggcagtatggtaaatgggttgatgtaatcattgatgaccgtttgcccacttataatggagagctgatgtacatgcactccacggagaagaacgagttctggagcgccctgctggagaaggcttatgccaaacttcatggatcctacgaggcactaaagggaggcagcacttgcgaggccatggaggactttactggcggcgtatccgagtggtacgatttaaaagaagcacccggcaatctattcaccattctgcaaaaagcagctgaacgcaattccatgatgggatgctcgattgagcctgatccaaatgtcacggaggcagaaactcctcagggcttaatccgtggtcacgcttactccataaccaaggtttgccttattgacatagtaacgccaaatcgtcagggaaagatccctatgataagaatgcgaaatccttggggcaatgaagccgagtggaatggaccatggagtgatagctcaccagaatggcgctatatacccgaggaacagaaggcggagattggactaacattcgacagagacggagagttctggatgtccttccaagattttcttaaccacttcgatcgcgtggagatttgcaatttgtcgccggactcactgaccgaggaccaacaaaacagtggcaagcgaaagtgggagatgtccatgtatgagggagaatggacacccggtgttacagctggtggttgccgcaatttcctggataccttctggcacaacccccagtatattatcaccctagtcgatcctgatgaggaagacgaagagggacagtgcaccgtcatcgtggccttaatgcaaaagaatcgcagatcgaagcgcaatatgggaatggagtgtctgaccattggtttcgctatctatagccttaatgatcgcgaactggaaaaccgtccccagggtctgaactttttcagatacaagtcttctgtgggaagatcgccgcactttatcaacacccgcgaagtgtgtgctcgcttcaaattgcctcctggtcactacctgattgtgccttcaactttcgatccaaacgaggagggagagttcatcattcgagtgttctcagaaactcaaaataacatggaagagaatgatgatcatgtgggttatggcggcaaagccgatacgattacgccaggattcccaacacccaagcccatcgatcctcagaaggagggcttgcgacgcctcttcgacagcattgccggcaaggacatggaggtggattggatggaattgaaacgcattttggaccattcgatgagggacgatttacccaaaccagtggttttcaaccgtttctccaataacatggcctttgagacccaggctgctggccctggtgacgatggagctggcgcttgtggacttttatccttgatttgtggaccgtttttgaagggtacgccattcgaggagcagttgggaatgaatgatcagtcgaacaagaggctgataggggacaatccggcggatggaggtcctgtaacagcaaatgcaattgtggatgagactcatggcttttccaaggatgtttgccgctccatggttgccatgttggatgctgataagtctggaaagctgggattcgaggagttcgagactttgctctcggaaattgccaaatggaaggccatatttaaggtctatgatgttgagaatacgggcagggtatccggattccagcttcgcgaagctcttaactctgctggctatcatctaaacaatcgtgttctaaatgttttgggccatcgatatggttctcgtgatggcaaaatagccttcgatgattttatcatgtgcgctgttaaaatcaagacatatattgatatattcaaggagcgcgacaccgagaagaacgaaacagccacctttacgttggaggagtggatagagcgcacaatatattcgtaaaggatataaatctaagctagcaaatcaactcgaacaaatatttacatggaatctcttaatggctatatccaatatttttctttatatagtacaaaacaaacttcacttccgaaaaagatttcatccaatataatcacgtcattgtttgtatgtcgatgggtgttgttaccgaatttaatgacttgttgacccaataaaaagatttattacatttgcatttgtaacgtgagccgatgttaacttattaaagaattccataccccgta

SEQ ID NO: 16776 - protein, 828 aa, DROSOPHILA
MDDLRGFLRQAGQEFLNAAGEAAMGAAKDVVGSVINEIFIKKEADTKRVLPSIKNMRVLGEKSSSLGPYSEVQDYETILNSCLASGSLFEDPLFPASNESLQFSRRPDRHIEWLRPHEIAENPQFFVEGYSRFDVQQGELGDCWLLAATANLTQESNLFFRVIPAEQSFEENYAGIFHFRFWQYGKWVDVIIDDRLPTYNGELMYMHSTEKNEFWSALLEKAYAKLHGSYEALKGGSTCEAMEDFTGGVSEWYDLKEAPGNLFTILQKAAERNSMMGCSIEPDPNVTEAETPQGLIRGHAYSITKVCLIDIVTPNRQGKIPMIRMRNPWGNEAEWNGPWSDSSPEWRYIPEEQKAEIGLTFDRDGEFWMSFQDFLNHFDRVEICNLSPDSLTEDQQNSGKRKWEMSMYEGEWTPGVTAGGCRNFLDTFWHNPQYIITLVDPDEEDEEGQCTVIVALMQKNRRSKRNMGMECLTIGFAIYSLNDRELENRPQGLNFFRYKSSVGRSPHFINTREVCARFKLPPGHYLIVPSTFDPNEEGEFIIRVFSETQNNMEENDDHVGYGGKADTITPGFPTPKPIDPQKEGLRRLFDSIAGKDMEVDWMELKRILDHSMRDDLPKPVVFNRFSNNMAFETQAAGPGDDGAGACGLLSLICGPFLKGTPFEEQLGMNDQSNKRLIGDNPADGGPVTANAIVDETHGFSKDVCRSMVAMLDADKSGKLGFEEFETLLSEIAKWKAIFKVYDVENTGRVSGFQLREALNSAGYHLNNRVLNVLGHRYGSRDGKIAFDDFIMCAVKIKTYIDIFKERDTEKNETATFTLEEWIERTIYS

SEQ ID NO: 16777 - DNA, 7417 bp, DROSOPHILA
ttgtcggcgttttcctcgtccgccaggtcgatttgatgtttatcagttggtgcactggcttcatccggtttagaggcactgttgggtggaacactctgtgcacttggaaaggatgtgtccgcaaagagtcccagtccatcatccgacccactttgcgtcatcttgttggtacttgtggttgcttgcgtgccaaagagctcctcctttcgtccgtccagcaaatcctccagatgcgcgttggaaaagaagctgtcgtcgtcttcgccctccggccaaaagaggttttcggtgcactgacgcttggcatggctttcgcttgttgattcctcgctcaaatccaaacttctttttttgcacaaattatgcttatttgccatttggcgcgaaatagtgtgaacttcgcgtgaaaatgaaggaaaactcaggccagggctgcagcatgtaagccaagtttataaccgggatcgtgtctcaacttaagtgttgataaagtcgtattccctaacgatcgttccttttatttataaatataacatttacggtatacgattttcttcttttcgtgtttcctattaaataggcaaaatctggcaaaattttaagagctacgctaacaaaataattacaaccggcttaaatgtactttaacgttgcactcccctaattcgtttaacagcactgccatttactgtttaccgctgaccaaaaagtgcgtcttgttgctagtttaaaaaacgtaattaatacgggttttgaataccagaacaccttcgcgttttaaaaagtagattgaaatacttatgtttcttattacgggaattttgtatttgcatagagaaatccaacaatcaatgcagtaattcactaccacttggcagatttgttgttatagtaagtgcatgaagcgtcgcgcacattcaatgttcaattttcactcaaagttagcagttttcacaatttccttcagttgagtacgagtgtaacgtaacagttggtcaggatgagcagcgtgtggtacctggaacatgtgaccactggcgcacggctcatcctgcacaacggcactaatttgatgggtcgccactcgcgttgcaggataatcttgggtggacagtaccaatttgtgtcccgggagcacgccaatatcatcgtgagcgaaaagggcgttgaggttgagtctctggtaggttattgcagctcacctaagatgtacatgcttttaatagtttatgcttttatcacagaaccccctgaatgggctcttcatcaacgggggcaaattgggcgacaagatcaaccgtctggcagtagctgagggctccacaatcagcctaggagtcacgggagtcaacctaaatgaaataactggcatacatgctatattcatcctaaagaaaaaggagccggtagtcgaggaaatcgttctgtcgtccgacgatgacgatacaacaccactgcccgccgtgcgatgccccactggcactcagcccaccgagttcaatctgaaacagcaaataccaaactttggcggcaaacaggaccccggccaggaagaggaagtactaccttcgagttccaatttgcatctaccaaaactaacagaagttaagcaggaaatcgtaaagcatacctccgaagagatacaaaacatttttggtgaaccaagtgacgctattctgaattctgtattggaactaaatccatatctgtacaacaagctaactaacaagaccgcgaacaatgaaataacccgcaaaaaaatacacgacggcgactgtatagaactggacacggatacggataggaggagcatttcggaggcgcagaaagccgaagacccttcggcagagcgggaagtagacgacgaggaagaatacgatgagagtttcgccatgtctcaggcagtgatcagggaaatgaaggccgaaatgcacgtaagtgatggcgaagaagacttcttgctgaccaatggcatgggaaacttgcctgaaggttctccatcgaaccaagcttacgacgacatcgtctacgtcagcgattccgatgacgatgagctgtacgataaggtggcggattggtcaaagctgctaagccaaaaggtggtaccagacgtcatagaaatgtcgcagacctatccgctagagaatgaacacaaagattcagactcagacttagatattggagcaaaaaaaccgaaaaggacactgcggatctcatcctccagtgacgaagactctgcagacgaagtgattgtccatcaaacaaaacaaaagggaaggcgctccaaatcgaaatctccaaacgaccatgttgtgcggcagggtaagtatacaaataaattagctattattaatatgactagtaacaatatttatattgttttatctttgaaacagccgacagcacgactccggatcttccagctgttcgtaaattatccgtctcatctattgattctgtatatgaaaataaacagacaaaattaaactctaagcttaagtcgtgcttaaagagcccgaccaagacatcagtagataacatggaaaatatgacggaaaccaaaagttgctcaaaccgtcagcgcgagcaaatagttgcatcccgaaatgaaccaactaatatctgtccgcaaaagattgagactaacaaaacctcaacccgtaagcgattcgtatcgaccacttctcgggatgagttatctaccacttcaaaagaaatcaaagatgctcctaaaaataatgtggaacctcctaaaaaaatgttgcgcagccgttcaaaatcctgttatatagataggcctgtggaattggatgaacacataaccaaaaatgaagtgccccttaagaagaaatatgaaagtgttgataatagtaaggaagaactgatagtaaccctggaggctccagcaatgttaacgacacctactaaatctaaaacccaatgtgttaaaaaaaaagcaacgcagactcgcggcagacgaaagacaatacacagccgtgatgaaataagatccttgacagctgaggctgaggaaaataaaaagatttcaccagcaaaacagaccaacgaagaaatccctattccaactaaaagtcctcttaaaaggaatgcgcggctgctcaaccgatcaaaatcgtgctatatggatcgtctggtgatctcggaaaccgaagatcctgccaagaaggtgattaaggatatatctccaactaaaagcgacactacagacaacgttctaaactttgttgatgtgagacagacacgcggcccctctgtgattgaggctccatccttgcccaaaaatcgaggtaagcttcgaggggtctcggctgaggtgaaagttaaagataaggtgctagatcgccagcgttttattgactatcaagccgaaatgaacgctaaatggaagcagaaacccaaagacaagaaaaaagaagacgaaaagctaaaagagtgccgccgcgaagccctcaagaagctgtctgaaaaaccaaaggaaaatagtcatcgttcaacaaccaataagagaaagaatcctacaagtgttcccaccgttcaaaacaccaatcgtggcggatttttaacgaaaggagtggatggcccagccccaaaactggcaaagacggataacgctaagccaccaccaaagaaaccagttcccaaacaaccacccgctatcgaaacgttctcacagcagctccaagcagctgataaagctgttctgcatccgcagccacagtgctcgcgtccagtagaacggaaagaagcggagctggcgaggaatcagcgcacttgtaacaaagttacctttgctgaaatggagctttaccatcaaaaagccgaagactcaaagaagctacaaaagaaactgcgtaaggtgcatttcaacgatgatgtgaaagtacactgtatcgaaagggttaagggagccagttctaaggttcagggccgcaaggagtgcataaagctccgcctcagctcctaccgcgaacgccgcgaatggattcgaagggaaaataaaccagtgaacgacatacgccagcactctcggagtatcctaaagtgggctaaccaatggctaaagcatggcagcgtagatgcggttgctgaacaagatgtcttaatgcccattccacctgaatttgatagctttaagaactatagagagtgagttgttgatagtcttctagtttctacactatttcaaccttaaattcattttcgcaggatatttgtgcccttgatgaaactggagctgctttccaccatcgaaagagactacaaaattaacaataaaaacactttttcggtcagcttaataaacgttgaaacgcaggatatgtgctaccgtttggttaccagaggtaagcatattcaatactttttactaccaattactaattttcggacgttttttgcagtcaatagcaaaccattcggaaaattcgtcctttataccctttactgttgtggcatgctaaaagagacctttgccaatctgttggagcttaagtttgtctcaggtaagtcatcagcatatgttaagataattgtaaacattcatcaattaaatgccttgctgaccttttttttaggcaacgtattcgacttaacatttgagatcctgaaacaagatatatccgaggagaagctcaaaaacattaagcagttgactgcacggccagtagtggacagcttaagggtggagcttggcgctttgagtgccgtccatcagctccgtagctctccgctctgccggcggatcttgaagcctacgcaaacagtcaatgaggtttcactccctaaacagccgtttacgttcaaggggtgccacaagttaaatgaacatcaggagaacattgtcctgcatacctatcaacgtataattgacgacttacaaccgagtctcactctgatccagggtccccccgggaccggaaagtcaagagttatttcggaactatgtctgcagactttgtacggaaatgctgccaaaacgctggaccgcaaaatcttgatatgtgctcattccaatacagctgtagatcatattgttgggctgctaggctcagttttgcgtgtgatgaaccgcgaccaattccacctactacgttttggaatgcacgagaagatgagccactactctcgtccattttcgctggaggcgcatttcaacaaagccaaggagcagaagttgcagcgcgttagtaaagagaacgctgaaatcctaaaaaagcagcataatgatcttaaagatgagattcaacagctgaaggagaaaacgaatctcacgtcaacgtatctcttgcaacagttgcaacagaaggaaaaaaaactgcagctgataagtaaccaactgagtccgccgctgacgcagcgcgaggagtttgaaatctctcacatgtgcgtgaccagggcgaacatcatctgcacaacgctttcctcttgtgtaaaactggcaaactatgtagatttctttgacatatgcatcgtcgacgaggccacacaatgtaccgagccctggactttactgccaatgcgatttggattaacgcatatggtcttggttggcgacatgcagcaacttccggctgtggtgctgtccaagaaggccatagactttggcctttctaattcaatgtttgatcgcattcagcgaagcctgcagacacagcttgataagccgggaagttatcacttaatgcatacgaaactatttaagctgagcacgcagtaccgcatgcatccagagatctgtcgatggccaaaccagtatttctacgaggatcagttgataaacgccgagtgtactgctcgtttcgcctcaccgctcattccatactgcgttattaatttaaaatacacttgcgacagcaatggcgcccaaaacaagagtatcagcaataacgaggaggctcgttttgtggccaaacttctgacagaaatggacaaacatatgcccagcaagcgatttagctatggattaatttcgccgtaccaaaaccagtgttacgcgctaagccaggttattcccagtcacatgaatataactcctcagactgtggactcgtatcaaggattggaaaaggatgtgataataatttcaaatgccaggacacgcggctgtggctttctaacgaactatcagcgacttaatgtggcgctgaccagaccgcgtcgttgtctagtcatatgtggcaattttgaagatctaaaagtcagtatccagatttaattgaaataaaacatgttttttatgaacttttcttaattttgtagtctgttgaaatgtggcgcaaccttctcgatgatgctcgcaagaggaaagtttacttcaatttggaccgcgatgatgtgaacgacctagaccgttccttaatcaaaaagatgatggtgaatactatcaacttaatttaggggacacaacgttccctattagttaatgagattaaaactaccttttagatgctaagatatcacaagtgccatggaagagaagcgcttcccacattgtttaaaaaaaggctttgttatttttatatatatttaacatagagactgtaagatttaatattgaaatctttgtacatttagttctttaaaacgccgacgaattgcattttcgttcttaaatgccgtacagtataacaggatttataagtaaccgattatatatcatctatgtactttttgagaaagattcacgggttgaggatgttgcactatgcatggcgtagtgtatgaccgaataaaagtaaataaataaatattgaaatggttaaatcaattatttaacgtctgcatattgcactattatatatagaattacagcattgcaagagttttcctggtatcttgatctcataatttcgtccctcaggtatttaactaaaatgcgctttaattatgctaatctccagattctggcgttgtctgcctgatcatctctaagctatagttatcgtaattaaattcactaacaacacgcacacacacatagtcgatattaaattcatagttattctgtttgccttgccttgacgccttgtcacgagggcattaaaattaatggaatcgcttaacaatacgattgcactgtgtagagttctgccaaataaaacaatcgcaataacttaatgcaagataaaataaaaactaacttaagaatttaactaaaatgtagcaacaaaatctaactaaggactaataacataacaaaaattatgcccgtaattaacttattttatgtggctgctcaaactgccggcccgtttgcttacagatatatatcaatgtatatatatagaaatttctgcattacatatagaacgtacgactcagcaaacgtcttgtccgaatcttactggtaaccgatcaagtttaggttaacatgtcgcccaagttgtccttgagggac

SEQ ID NO: 16778 - DNA, 4254 bp, DROSOPHILA
atgagcagcgtgtggtacctggaacatgtgaccactggcgcacggctcatcctgcacaacggcactaatttgatgggtcgccactcgcgttgcaggataatcttgggtggacagtaccaatttgtgtcccgggagcacgccaatatcatcgtgagcgaaaagggcgttgaggttgagtctctgaaccccctgaatgggctcttcatcaacgggggcaaattgggcgacaagatcaaccgtctggcagtagctgagggctccacaatcagcctaggagtcacgggagtcaacctaaatgaaataactggcatacatgctatattcatcctaaagaaaaaggagccggtagtcgaggaaatcgttctgtcgtccgacgatgacgatacaacaccactgcccgccgtgcgatgccccactggcactcagcccaccgagttcaatctgaaacagcaaataccaaactttggcggcaaacaggaccccggccaggaagaggaagtactaccttcgagttccaatttgcatctaccaaaactaacagaagttaagcaggaaatcgtaaagcatacctccgaagagatacaaaacatttttggtgaaccaagtgacgctattctgaattctgtattggaactaaatccatatctgtacaacaagctaactaacaagaccgcgaacaatgaaataacccgcaaaaaaatacacgacggcgactgtatagaactggacacggatacggataggaggagcatttcggaggcgcagaaagccgaagacccttcggcagagcgggaagtagacgacgaggaagaatacgatgagagtttcgccatgtctcaggcagtgatcagggaaatgaaggccgaaatgcacgtaagtgatggcgaagaagacttcttgctgaccaatggcatgggaaacttgcctgaaggttctccatcgaaccaagcttacgacgacatcgtctacgtcagcgattccgatgacgatgagctgtacgataaggtggcggattggtcaaagctgctaagccaaaaggtggtaccagacgtcatagaaatgtcgcagacctatccgctagagaatgaacacaaagattcagactcagacttagatattggagcaaaaaaaccgaaaaggacactgcggatctcatcctccagtgacgaagactctgcagacgaagtgattgtccatcaaacaaaacaaaagggaaggcgctccaaatcgaaatctccaaacgaccatgttgtgcggcaggatcctgccaagaaggtgattaaggatatatctccaactaaaagcgacactacagacaacgttctaaactttgttgatgtgagacagacacgcggcccctctgtgattgaggctccatccttgcccaaaaatcgaggtaagcttcgaggggtctcggctgaggtgaaagttaaagataaggtgctagatcgccagcgttttattgactatcaagccgaaatgaacgctaaatggaagcagaaacccaaagacaagaaaaaagaagacgaaaagctaaaagagtgccgccgcgaagccctcaagaagctgtctgaaaaaccaaaggaaaatagtcatcgttcaacaaccaataagagaaagaatcctacaagtgttcccaccgttcaaaacaccaatcgtggcggatttttaacgaaaggagtggatggcccagccccaaaactggcaaagacggataacgctaagccaccaccaaagaaaccagttcccaaacaaccacccgctatcgaaacgttctcacagcagctccaagcagctgataaagctgttctgcatccgcagccacagtgctcgcgtccagtagaacggaaagaagcggagctggcgaggaatcagcgcacttgtaacaaagttacctttgctgaaatggagctttaccatcaaaaagccgaagactcaaagaagctacaaaagaaactgcgtaaggtgcatttcaacgatgatgtgaaagtacactgtatcgaaagggttaagggagccagttctaaggttcagggccgcaaggagtgcataaagctccgcctcagctcctaccgcgaacgccgcgaatggattcgaagggaaaataaaccagtgaacgacatacgccagcactctcggagtatcctaaagtgggctaaccaatggctaaagcatggcagcgtagatgcggttgctgaacaagatgtcttaatgcccattccacctgaatttgatagctttaagaactatagagagatatttgtgcccttgatgaaactggagctgctttccaccatcgaaagagactacaaaattaacaataaaaacactttttcggtcagcttaataaacgttgaaacgcaggatatgtgctaccgtttggttaccagagtcaatagcaaaccattcggaaaattcgtcctttataccctttactgttgtggcatgctaaaagagacctttgccaatctgttggagcttaagtttgtctcaggcaacgtattcgacttaacatttgagatcctgaaacaagatatatccgaggagaagctcaaaaacattaagcagttgactgcacggccagtagtggacagcttaagggtggagcttggcgctttgagtgccgtccatcagctccgtagctctccgctctgccggcggatcttgaagcctacgcaaacagtcaatgaggtttcactccctaaacagccgtttacgttcaaggggtgccacaagttaaatgaacatcaggagaacattgtcctgcatacctatcaacgtataattgacgacttacaaccgagtctcactctgatccagggtccccccgggaccggaaagtcaagagttatttcggaactatgtctgcagactttgtacggaaatgctgccaaaacgctggaccgcaaaatcttgatatgtgctcattccaatacagctgtagatcatattgttgggctgctaggctcagttttgcgtgtgatgaaccgcgaccaattccacctactacgttttggaatgcacgagaagatgagccactactctcgtccattttcgctggaggcgcatttcaacaaagccaaggagcagaagttgcagcgcgttagtaaagagaacgctgaaatcctaaaaaagcagcataatgatcttaaagatgagattcaacagctgaaggagaaaacgaatctcacgtcaacgtatctcttgcaacagttgcaacagaaggaaaaaaaactgcagctgataagtaaccaactgagtccgccgctgacgcagcgcgaggagtttgaaatctctcacatgtgcgtgaccagggcgaacatcatctgcacaacgctttcctcttgtgtaaaactggcaaactatgtagatttctttgacatatgcatcgtcgacgaggccacacaatgtaccgagccctggactttactgccaatgcgatttggattaacgcatatggtcttggttggcgacatgcagcaacttccggctgtggtgctgtccaagaaggccatagactttggcctttctaattcaatgtttgatcgcattcagcgaagcctgcagacacagcttgataagccgggaagttatcacttaatgcatacgaaactatttaagctgagcacgcagtaccgcatgcatccagagatctgtcgatggccaaaccagtatttctacgaggatcagttgataaacgccgagtgtactgctcgtttcgcctcaccgctcattccatactgcgttattaatttaaaatacacttgcgacagcaatggcgcccaaaacaagagtatcagcaataacgaggaggctcgttttgtggccaaacttctgacagaaatggacaaacatatgcccagcaagcgatttagctatggattaatttcgccgtaccaaaaccagtgttacgcgctaagccaggttattcccagtcacatgaatataactcctcagactgtggactcgtatcaaggattggaaaaggatgtgataataatttcaaatgccaggacacgcggctgtggctttctaacgaactatcagcgacttaatgtggcgctgaccagaccgcgtcgttgtctagtcatatgtggcaattttgaagatctaaaatctgttgaaatgtggcgcaaccttctcgatgatgctcgcaagaggaaagtttacttcaatttggaccgcgatgatgtgaacgacctagaccgttccttaatcaaaaagatgatggtgaatactatcaacttaatttag

SEQ ID NO: 16779 - protein, 1417 aa, DROSOPHILA
MSSVWYLEHVTTGARLILHNGTNLMGRHSRCRIILGGQYQFVSREHANIIVSEKGVEVESLNPLNGLFINGGKLGDKINRLAVAEGSTISLGVTGVNLNEITGIHAIFILKKKEPVVEEIVLSSDDDDTTPLPAVRCPTGTQPTEFNLKQQIPNFGGKQDPGQEEEVLPSSSNLHLPKLTEVKQEIVKHTSEEIQNIFGEPSDAILNSVLELNPYLYNKLTNKTANNEITRKKIHDGDCIELDTDTDRRSISEAQKAEDPSAEREVDDEEEYDESFAMSQAVIREMKAEMHVSDGEEDFLLTNGMGNLPEGSPSNQAYDDIVYVSDSDDDELYDKVADWSKLLSQKVVPDVIEMSQTYPLENEHKDSDSDLDIGAKKPKRTLRISSSSDEDSADEVIVHQTKQKGRRSKSKSPNDHVVRQDPAKKVIKDISPTKSDTTDNVLNFVDVRQTRGPSVIEAPSLPKNRGKLRGVSAEVKVKDKVLDRQRFIDYQAEMNAKWKQKPKDKKKEDEKLKECRREALKKLSEKPKENSHRSTTNKRKNPTSVPTVQNTNRGGFLTKGVDGPAPKLAKTDNAKPPPKKPVPKQPPAIETFSQQLQAADKAVLHPQPQCSRPVERKEAELARNQRTCNKVTFAEMELYHQKAEDSKKLQKKLRKVHFNDDVKVHCIERVKGASSKVQGRKECIKLRLSSYRERREWIRRENKPVNDIRQHSRSILKWANQWLKHGSVDAVAEQDVLMPIPPEFDSFKNYREIFVPLMKLELLSTIERDYKINNKNTFSVSLINVETQDMCYRLVTRVNSKPFGKFVLYTLYCCGMLKETFANLLELKFVSGNVFDLTFEILKQDISEEKLKNIKQLTARPVVDSLRVELGALSAVHQLRSSPLCRRILKPTQTVNEVSLPKQPFTFKGCHKLNEHQENIVLHTYQRIIDDLQPSLTLIQGPPGTGKSRVISELCLQTLYGNAAKTLDRKILICAHSNTAVDHIVGLLGSVLRVMNRDQFHLLRFGMHEKMSHYSRPFSLEAHFNKAKEQKLQRVSKENAEILKKQHNDLKDEIQQLKEKTNLTSTYLLQQLQQKEKKLQLISNQLSPPLTQREEFEISHMCVTRANIICTTLSSCVKLANYVDFFDICIVDEATQCTEPWTLLPMRFGLTHMVLVGDMQQLPAVVLSKKAIDFGLSNSMFDRIQRSLQTQLDKPGSYHLMHTKLFKLSTQYRMHPEICRWPNQYFYEDQLINAECTARFASPLIPYCVINLKYTCDSNGAQNKSISNNEEARFVAKLLTEMDKHMPSKRFSYGLISPYQNQCYALSQVIPSHMNITPQTVDSYQGLEKDVIIISNARTRGCGFLTNYQRLNVALTRPRRCLVICGNFEDLKSVEMWRNLLDDARKRKVYFNLDRDDVNDLDRSLIKKMMVNTINLI

SEQ ID NO: 16780 - DNA, 3483 bp, DROSOPHILA
tccgagggatacgatctgcacaggtacatattgcaggtgtaactactgtctgttgcggcaagtggctcgtaaattgcatggaaggacattcacgagggacgttcaggacattcgaggtctctcaggggtggacaaaaggtcaaacatgcctgtgtgcgtccaataaattggtggtgccgctcttggtgcggtttgttgtgtgacatttttatctaattgacagcgtttttattgcccggcaaaaagatcagatcctttggggcgtgctactagttgtgcgactgggtggccgcggaacttcaaagatgcccgaacactcccccgcaagtggttgatgtagaattcgttgcattatgatttccagcgaatcattaaggattaaggggcgtagcgaagggatctaaggaccaccgtggacgcttcgttttgctgtgtcatcctgggatctacaactaaattccctgctcacgatcgaacacacggccgtattaattgcaaggcgctaaaatgttaacccagctcttagttactgcctgccacgcttattaggcacgacgagggctaaggtgaaggtcagtcctggcactcggtcaagcgtgtccttgaagggccggcgctatcatctaccttcttcatggtaccggcaacaagcgtatcaattggaaaatttgccaagttgtaataaacaagatttttcattgcgatattccgcccccgactttgggtaagcatgtcgaatgacccggcggcggtggatttgtaaggatttccctagccgtgatcaggtagatcgaacccacttgcaaccgatgcagattagataaactcataagacccgctctgccatttggtgctgacaaatcgccaagggatttttgcaaatttcgcttcgctttgcggtcgactttaatcccgtttagggattcaaatcgattgtttgtccaagttctgtttacatttccgcccatattcctgttccggttgtgccggccatcctataatcatcttgttagcggctttagatgcccagatagtcggttttctagcgccattttaagctcgcaacgaactgaggtataaccgggctctctgagaccgctgcaactcaccaccaactgccattggtcgtgccactcgggcggcacgtgctgccttctgtggcaactcgtttacctgcccccctacctgcctttcaggcccttctgaccgtcgtggtggatttgtgagtataaatagggccgaaaggacgagagaccagtcagaaacccgccagcactcgcagcgttcgtatcgtttcatccagcaacataacaccaccatacagcagcagcaacatgtcgtccagtgagatctatcgctactactacaagacctccgaggacttgcagggcttcaagacagccgccgccgagccgtacttcaatcccatggcagcctacaatcccggcgtgacccactaccagttcaatggcaacaccctggccagcagcagcaactacttgtcggccaatggcttcatcagcttcgagcaggccagttccgatggctggatctcctcctcgccggctagccaccgatctgagagtcccgagtatgtggatctcaataccatgtacaatggaggctgcaacaacatggcccagaaccaacaatacggaatgattatggagcagtctgttgtttccacagcgcctgcaattccagtggcctctcctccggcagtggaggtcatgggctcctccaacgtgggcacttgcaaaacgattccagcctcagcaggtccgaaaccgaagcgtagctataccaagaagaaccagccaagcaccaccgccacctccacaccgactgcagctgcggagtcatctgcctcagtgaatctctacacggaggagttccagaactttgactttgacaactccgccttgttcgatgacagcgtcgaggatgacgaggacctcatgctcttcagtggcggtgaggacttcgatggcaatgatggatcctttgacttggccgatggtgagaaccaagatgccgctgccggaggctctggaaagaagaggcgtggcaagcagatcacacccgtcgtgaagaggaagcgtcgcctggccgccaatgcacgtgagcgtcgtcggatgcagaacctcaaccaggccttcgatcgtctccgccagtaccttccctgtctgggaaacgatcgccagctgtccaaacacgagaccctccaaatggcccagacctacatatccgctctcggggatctgctgcgctgaattcccggatcccgatcccagtcccaagtactattctcagttattgttggagcttgccaaatgttgtagctactttgtatatattgcctggagcccagtagtgaattaccgcttaagtattatgctgtttattgtttagttaattagcctaaatggaagacaatgattaagactaaggaagacaaaataaaagcaccattaataatttaaaacatatgttcgttttttgttaacggggactttctaacagttttagtagctatgcaacaattcctagatgcaaaatgataaatacaaaaattccaagccatccaaatcctttcatctctgaacaattctgtttccccaatcctcgatatccacacttatcggcggggcatcaattctcacacagtgaattggactttattatatgggggaaggtgatcgatttggcgcttcgcgatcaatttgtagacagttcgacaaaattagggcccctcttaatcgggttggccaaaacaaatacgcagcggacgataattacacggcacggcgcgccggactgtagctgccaaattaagttaagtgttgggctgatctgctttcagcagtcgcaggtcgcatgcaatgtccgtatgtccgcttgtccgtatgtccatttgtccgtcgctgtccctggaacctctgcaacttcatatcccagtggaagtcccagtcgagccccgaaaatcaagcgccactcacaaatcgtttaatacgaagttcgatccccgatcgttgttggcggataaactcagcggcttaagactttaagccgaaactgtgcactcagcaaaacaagaaggtgttgaagaagttttgttcaataagttaatgtaataaataatattatttaaggtaatataataaaatgtatatagtacaagataggatcaaagcaaacctttatagttagttctacacagaattcattccctttaaaatataattaaatatattatttagtgatattagatggatgatatttttggatctgttgaataaataaatcctatgacgatttctggcagtgcaacatatcattcagcttaaaacggagcagagatccccggcccagtcagtcagtcattcagtcagtcagtcaatcattcgtaagattcgaagccaatttgttgatagcgacagcaacgcccgagtgccggcgattcgatcgactcccgcatgggaa

SEQ ID NO: 16781 - DNA, 1483 bp, DROSOPHILA
atcatcttgttagcggctttagatgcccagatagtcggttttctagcgccattttaagctcgcaacgaactgaggtataaccgggctctctgagaccgctgcaactcaccaccaactgccattggtcgtgccactcgggcggcacgtgctgccttctgtggcaactcgtttacctgcccccctacctgcctttcaggcccttctgaccgtcgtggtggatttgtgagtataaatagggccgaaaggacgagagaccagtcagaaacccgccagcactcgcagcgttcgtatcgtttcatccagcaacataacaccaccatacagcagcagcaacatgtcgtccagtgagatctatcgctactactacaagacctccgaggacttgcagggcttcaagacagccgccgccgagccgtacttcaatcccatggcagcctacaatcccggcgtgacccactaccagttcaatggcaacaccctggccagcagcagcaactacttgtcggccaatggcttcatcagcttcgagcaggccagttccgatggctggatctcctcctcgccggctagccaccgatctgagagtcccgagtatgtggatctcaataccatgtacaatggaggctgcaacaacatggcccagaaccaacaatacggaatgattatggagcagtctgttgtttccacagcgcctgcaattccagtggcctctcctccggcagtggaggtcatgggctcctccaacgtgggcacttgcaaaacgattccagcctcagcaggtccgaaaccgaagcgtagctataccaagaagaaccagccaagcaccaccgccacctccacaccgactgcagctgcggagtcatctgcctcagtgaatctctacacggaggagttccagaactttgactttgacaactccgccttgttcgatgacagcgtcgaggatgacgaggacctcatgctcttcagtggcggtgaggacttcgatggcaatgatggatcctttgacttggccgatggtgagaaccaagatgccgctgccggaggctctggaaagaagaggcgtggcaagcagatcacacccgtcgtgaagaggaagcgtcgcctggccgccaatgcacgtgagcgtcgtcggatgcagaacctcaaccaggccttcgatcgtctccgccagtaccttccctgtctgggaaacgatcgccagctgtccaaacacgagaccctccaaatggcccagacctacatatccgctctcggggatctgctgcgctgaattcccggatcccgatcccagtcccaagtactattctcagttattgttggagcttgccaaatgttgtagctactttgtatatattgcctggagcccagtagtgaattaccgcttaagtattatgctgtttattgtttagttaattagcctaaatggaagacaatgattaagactaaggaagacaaaataaaagcaccattaataatttaa

SEQ ID NO: 16782 - protein, 312 aa, DROSOPHILA
MSSSEIYRYYYKTSEDLQGFKTAAAEPYFNPMAAYNPGVTHYQFNGNTLASSSNYLSANGFISFEQASSDGWISSSPASHRSESPEYVDLNTMYNGGCNNMAQNQQYGMIMEQSVVSTAPAIPVASPPAVEVMGSSNVGTCKTIPASAGPKPKRSYTKKNQPSTTATSTPTAAAESSASVNLYTEEFQNFDFDNSALFDDSVEDDEDLMLFSGGEDFDGNDGSFDLADGENQDAAAGGSGKKRRGKQITPVVKRKRRLAANARERRRMQNLNQAFDRLRQYLPCLGNDRQLSKHETLQMAQTYISALGDLLR

SEQ ID NO: 16783 - DNA, 10125 bp, DROSOPHILA
tgcaattgagttaagcccccgttgagtcgttaaaacataaatgcgtgtacaactgatatcagcgaatgcttttggtagtcagtgtgccaccgcatattacaatcacttgcatttagcataacaaacgaaccagaacttcaatggactggcgatacttggtcagagaagaggcgagacttctctccgggaatgtttatggaagacaggcgcataccaaaaaataaactctaggcatcgttagcagaataataaatcgaagatggctggcgaacaattagtagagttgccccggtgtccggaattaagggagattggtatttcggacacgcaaaacgcagattgagcgacgcgtgcaagaccaaaagccgatcgaaaatgtctaaagctgaagattcagatggattcagcaaaacaacagatatcaaaaggggtggttgaaagaaaacaatgcaaattaagattgaaattgaatgcgacacgaatgcatggtaaatgttttgttctttgggcctcgcggcttgaggtatatatgcaagatatatatatttatttattcatgggtgtttactatactatgtgtgtgtatatagaattattcgtatatagcgttttatgcacagttttcactttagttgtgacacagaattgcgcttaaagtacaaagttattctgaatatttaggaaacttgcatattttgttacattcagtattctatattgcactgcataaagctctagctgagtcaactacttagtaataaacatttaaaaaataaacctaaacgtttgccaagcaatttacttggcccatataaacaaattcactagctcatcctcccactcccactcgccattactgttacccacacacaactgactgcattgtgtgtgcgttcttgtttggcgtacaatcacagcagtcaaaattacattcaaaataaactaaacaggaaatcaagctaaatttggcctagtttcttcatttctacagtggctgcatctatatgcgactgcagaaattgtagagcagcagcttatcctcaaagtgataaacgttgtttatgtgtcgcaaaacccggccatcgaccagatgtcgggcataatgcacagcctccattcgatccttggacagtcccacctcgatgagccagctgacgaactcggtgccgtagaacactctgcgatacacacgaatacgccacctgaaaaaaagataatttattacgtatgttattagaaaatcgggattgtctagtcaagctcaagcaacttgtgctgtataagcattaaaagtggtaggattaaggtgatcaaaatgcaaagctactgtctaactatttaagttagatgaaaaaagttccggtacagagacgtacttacttagtttaactgaaattaaaaattattgtcatccaaatgactattcctattgctgcttactattctaagggttgcattaattagaagggttaaaataaaatgtttaacaaaggaaacctaactaaatatcttgctaagggttccctatatttgcttaacttaagaatattgtaagtcttggcggtgcccaccttcggtcctttgcaatatcctttttgcagttctccaaatgatgattacggaattgttcacaaatatgcttggtttcgggccgcacgtttgaccagtgcggtaggctgaccacattggctccataccttcaaagagaaatactttaaaaaacgttctaaagtttttaatattcgatcttaccataacttgcgccatagtttcacaactggcattagaagttcgccaatgtcggtgataaacactgccaaaacaatcagaccttgaccaaagttgaggaaagcatcgaggaaacttagttccagatatatgcccgacattccctccatgaccaatgtccaaatggacactgccagaccgacaaacatggagcacagcaaagtgatcaagagcacggtatgcttcaaagtttggtgctcatcagcgtcgctcgggtgttccaggggctcaagtccccttctgttctgatcctcatatcgctcgataatagtctgacaactttgacgtgaggtacttgggccacagttaaaggagctgctgcacatttgattgcgaattctggaagaattggtaattttagcacttttaattctgcaaaaatatttggtcataactcactcttccgtggcaggtgcactttcgatcttgtttagatctttattgttggcaccactggctcgttggcgtgtgcgattcaacagatcctcaatgtccacaaccacggtgctggttgttgaggaattgctcacaggcgcgccgcccgaacagcaagttccattgccagaaccacaacctcctccgcctgatcctgctcctccactggcagcaccatttgacctactggttggcagtcccgcagctgttggtatcatttcctcatcgtcggatgaagacgaataagaagctgtgcgaacgctttgcctgatggacgattgatccgtgtgactcaatagattagtcgttgatatggtcgagtgcagatcggatgattctgtagcaatttaaaaattaaagacgttttatgtgtttagggttcagggacctacccgactccggattggacaactcacgtgaataggtcatgtacttttcgtatcgtttcttataacgctgatgcagcaccaaacagccaacggttactagaaaattaaatgtaggcaggatataggtttaaacattatatatgattatatagagataagaaacattaattgtatcagattgaaaacttttggtacatcattttaggaactgtctataagtggctcaggatggtttattaacttttaccaaacctaaaccaaagacgcgacaggttttgattaactcttcaaatgcatataggtctatcatcattatttgattcaaagggtcttcttaaaatactcttttccattacctataaagcacataacgagcataaacaccgagatggctgcctgagcatttccgtactgaaagctcggattgtgtttctctcccgacatcacattcgagtcgaaggcaatcaaaagggcagataatacggccggcacaccccaggcaaacaccaactaaaggaaagaaatagttacgtcaaatcaggctgtaacattataatcacatttagttaccatatagggccatagtttcagcacaaagcacaagctgcgacactgcaggaagagcaatgaaatggccaaaagaccagtccacagacgagtgctgtatgttccgatattaaatagaagaaactgcaggtacaaaggccaacggtgcacgtgctccatcttggaccagaggattactcctatgcagcacatgagctataattgttatgctttataaacaaacttcttggagtatttaataataatatcttacctgagaaagcaccagacagaaagttattctttggggcatacgcttgaagcgcttcgtcacgatcaacaatgccagcatgatacaacaggcagccgcgccggccacgctgatgtcaaacgaaaaggcatccagctcatggagatagtccaatggcttcaggttcgtcagcgatatcattttggctgatataaacatcagcggtgccgagatgaatgtacagaaaaccatgcttcgagcaacctgaacgaagagaatacataaataatgggaagtggatttgaattgactttcaattcaattaccaattcaacctccatgttgtactgtgtcgcaatgacgaaagccccgggggcagctggaaaggtgccgtagagaaagccaaaagtgctcagctcggtggtgtcgttgaagttctggccagactgcataatgtttaccgtctgtcggattacgagcggtagcaccaatctgtgaaatgagagtacacgtgttgatctattgaatgaatatatagttagaaggaaacttacattttaaccagtataagaacaccaggcaatagaaagcctatactctttcgttcggatcctgtcccacctacgatcttaagaccgagtaggaacaaggccgttgccgaaaagctctggccaagaacacgcaacgtactggacaccatttcgggcagaccgttgggaaacaggaatcctcctgcaacacccagcaaggtcatcagcagcaacgggttaaagaacagtgcaattagggtgttgaaaaccagtatagaccgttcacccaggcagcgattccgtttggacatctgttccgcgggacaagtttctggacacaatggtggattgcgggtctgcaaagaataagaacttgtggtatatttgcagagagagggatttagataaacaccaaccacatcctccttgttcttgattatcttggagatctccatgaggaccagaccaactggatttagaatagccagtgagataggagccatcaggtacagatacgaggcatattccggatggacatccttataaagagccataactgaaggaaaaatagaatgttaggtgaaattgaatttatataaagttgcatatatttctagatgcaatatccaggttcttgtaacatgaactcacctatgggatagccgatagcgaagtcattgctctgggtgcagaatattgccatcaggccgccgcgagcgtagttcaggggcctggcgaccagcagcgagatgatcagcacggcgaagaagaccaccgccttggagacgagcatggccagaaggaagctccagttgacagcgctccagttgagctcgaccagggacaggaagatcagcgagggcagggcgaaggtgcccacaaacgtgcccagacccttggtttccgcattgctgatgatcttgaagcgtccggcaatgtaactgcaacaaggagcgagtaaaaggggaacacattacaccactaatcatgttgtaaaggcgtgtcgggccacgcccccctcaccaaaaggcgtatatttttaatgctaataacccagccagccggaaaggcggaaactcttaatcaatatgtacagtgtactctacatgcatataaaatacattcaccgcagccccacacgtgatccactcgtaaaccagttttatttcggactgtctcttggctaacaaagatttgtaaacgttttttattttcgagcgaaaatctgtatttctgtcacattcgacgagacaaattaatttgtctgttaatctggagtagggagtacttccccctgccttaaacgaactagtttagcgaccttttcttatgactcaacgcgatttattgcattcactgcatgttgtgggaataacctggggaagctcttatctccttaagatttgcgagactgctattgttaatattggcagaactcagcttctgcgtttgcgaagcgccatgtgtcataggtttctgtgagaatgctttttcctaggaatgcgaaacccttgtagacattatctatgttttatttagcgtggaagaggttacaagacatgactgataaagaagtgtgcctatgcgagagccacaagggcggaagatgaaattacagtctctttattaagcaaatatagagaaattcttcatgcccttttcttaagaaattccttttatatttataagatggaaatcaggaaaatacttgataaaaatagtaatgaatgaaagccttatatatgggtctccactttaacattcccttgggtctgaaatacaagttttaacaattgttgtctgtgagtaaggtctgtccacagaatttgtacataaacaaaaagctagactaaacagaaaacgtcaaaaactttttccttatttatctcgctcatttatctgttgagcaaaacaagtgttctagaaactcagtcgagagaaacgaaatccaaattagtcaaccgggtaaaactcattaatgtacatacatatatacctctaaaaaagaagtaaagcttaattggcaaactgtgaggatcggcacgcaaatattcatcttacgtgcccaaacaaagtgcaagttcattatattattaatactgcgaaccgacctgttgggcaactctcgcccagaatccgatgaagaaacacctgcgaatgtctatgctattatcaaactattgctacagttaaaaccataacgagtcgaggtgtttatagcccctgtattattggtagcgcttatcaggttatttccagcctaaatcataaagaaaaatgatcacagcgagtcaatcaaattctcacagcgaaaacacacacaacaaagattcatcaaataaatgattaaatataatttcaatgcgataacaatcgtaaacaaactttaattgcattacgagcagcacttaaaactggaagcgatgtgcatctcttcgctaccctttcataacagcgtgtcaaaagggtgataaatatttgcatttggggagacatttgattgacatagggatatgatttacgtttgctaatacttggaatttgtacttcaaagaaaatagtgaggtattaaaagctaataagttgaagagaaatatttaccatacgaaattgagttattacaaaaatcaaaaatcaaatcagttatagataagtctaagagctaaagcaatctatttttctcaattacatttacattttaaaggccgaataatgataaggactaaaggcagggtattacctcagttggctttgcaagtgcagaacgaaattctaaagtcagatgccaacgaacgcgaagggagagcagttaaataacatataatcgcatccgactttgtagtcgagtttgtataggcgatatcagtagctgtttgcttgaacagttggatgaggtgcatctgcctggcggtggatctttgggtgggcatgcatatcgccagtaattggcagtggtcggtagacaaatcggtaattgcggttgcataatccgtacaaaaaaggtgcaaatattgcctcaggtggagtggctcgatactgtttacgctgtattgcaaggtcattgctgtaattgtttataccgattttgtacgttttttctcgcactctctaaacgttttactttcgattattgcccactggcaattaagtttcggcttagatgcatgtataatgattgatatgggagctagcagcgcaaatttacaatttacatatgccgctccccattgttattgagcaattttttgtatgtcaaagttaataggtgcttcacggcaatttcccaggaaaagtgccacgaccggcgggaattagttcagatttatgaaaccgcctctaattataactgctaaatcggtggttaaacattgggaaaaattccagcatacgccagcagagatattccctattaaatagccggaacataatgtttcaaaggtttggattttcacgtgaatgatcaaacaatatcagttaacgaccgacttgcaatgactaatcggaaattttgtaattcaaataacctttgcaaacgccaacaaatttagcataacattctttcgcaatgcatcagcaattaaaagaactgcagcataaattaaagaaatagagacaaaatctaatcaacaaataggcattggccattaggcaactctttttataatagatcgaaattaattttatggggaatattaggctagttgctgctgcggaaaagcctaattaaacccgaataaatctcttttgggtaattccgtttctaaaaataacaaaagttaatttagctgatttcggataattgctgagtttgtttgaagaaacaaacgattgaatcggagtacgcacagacagtgagacagcagtttgccacagataataaaattcgagtgtcaattgataagtgggtgaaaacaaatcagagaaattgaaactgaatcgagacggtgtccgtcataagtgctggtcactgtacaagtgaccgcacgttccccataatcgttgcgataaggggtgaaatacatacgttcgagttaggatcctacgtgggatgtggcaagctatattgtaacttcaattactcaaactatctatcttttaagaatatctaagcaaactgaaacgttttattggtagttttttacatttaaagagtggtatttcaagattatttaagattcctaagaatgtttgtttctttccttaaaactatctatttttgatattttagcaaagaatgattactttgcttcagtggtagctataatttccctttgagaataatttaaattggtttattattggtttatgactactgtgctgtcccctagtgagcttgctaataaaaagtgtacacaatgttctgcccaataaagtaaataaaaccgaattagggctgtttagctgtacctaaatcaaacaaaggcttgcaaatgagctttaggggtgcgagcaacctggtgtttttgtgtttggggtggaatatacgggtaatcttatcgggaaggatgcgtgggaccactatctaggtgcgaagttccccaatatatctactaacccgcaaatgatgatgccgaaacactgaaccaacgccgggtaaaagttgttcatggatacgcccccgtcgtcggcgcgtggcgtcgccgttccattggccaaagatgaggccatggtcgaggtgatgactctgacattagcctctgtgctggcagcaatccgctggctggcgtagtacatggagctgtccattggggactactgtggagtggctgctaagcgtgggagttcactgttagtgggcgactctgcgcgtcatagcggaaaaagtggggtgctccggtgggccaagcagctgatgggccgtgacgtcaaagggccagctgcggatttattggattttcgccgacctttactttatgttgctggcaaatatgttgctctattatttaatcgcttatctacgcagttttgtttgccaatttgatggttgttgttgtgtattattagcactctattttccttcaatagtcgaaaatggtcgaaaatcgcaatgcccggcaggctgatttcactttcatctgttcgaacgacgcattgctgatttttgagtccgcagcacttgcttttggcaattaaacgaatttattaatttgcgcaaattaacgtagttaagagctcaaaagcgcccgccgatgcgttttgtttttaatttgcaatgcgaatggtgggaccgcagcgcggtcgttaagtaataccagcggggcaaccaaaatgtactaaaatacaccatttatatgttatgaaaataccaaacaaaaatactaaggcagtgctacaaagagaccgttaaaatatctgttatttacacagtttttcctaaaattgaacgacatataagctaaatatcgaaccagttaaacaaaccagttcgaatgagttatctttccaaattacaataaaaacagtttcatttaagaacaataagtcgttggttgacagacctgccaaacagtgctgcccaccaacactgtacggtccaaacagctgattggtataggaaaaagaagaagacaattagtcatcaaacaaaatttgtagaacgaattaaagtggaaaacccacaaatttcccataaattttgcgtgttgtagttaaaataataaagcagtcaatatgaatcgcctttttggtcgtggtaagcccaaggagccgggtccaagtctaaacgattgcatcgccggggtaagtgtcgaaatcatggagaaaacaaagcaaataacaatttattacactcaacaggtcgatgcccgagcaacaaacatcgaagagaagatcagtaatctggaggcagagctgcgcaaataccgcgaacaaatgtccaagatgcgagaaggtcctgccaagaactccgtgaaacagaaggccctccgggttctcaaacaaaagaaggcgtacgttcaatgccccacccactgcctagtatcgattatattccaaacctccagtgttactcttctccagacatttgaaattatcatttcctaatctataagttccattaccttatgaaatttacatccacaatcaatttttttattgtgtcctgttctaaatgagtattttaaaccattttgaactttatttgtttcctacacagctacgaacagcaggcagaatctctgcgcaacca

SEQ ID NO: 16784 - DNA, 3396 bp, DROSOPHILA
gcgggcgcttttgagctcttaactacgttaatttgcgcaaattaataaattcgtttaattgccaaaagcaagtgctgcggactcaaaaatcagcaatgcgtcgttcgaacagatgaaagtgaaatcagcctgccgggcattgcgattttcgaccattttcgactattgaaggaaaatagagtgctaataatacacaacaacaaccatcaaattggcaaacaaaactgcgtagataagcgattaaataatagagcaacatatttgccagcaacataaagtaaaggtcggcgaaaatccaataaatccgcagctggccctttgacgtcacggcccatcagctgcttggcccaccggagcaccccactttttccgctatgacgcgcagagtcgcccactaacagtgaactcccacgcttagcagccactccacagtagtccccaatggacagctccatgtactacgccagccagcggattgctgccagcacagaggctaatgtcagagtcatcacctcgaccatggcctcatctttggccaatggaacggcgacgccacgcgccgacgacgggggcgtatccatgaacaacttttacccggcgttggttcagtgtttcggcatcatcatttgcggatccaccgccaggcagatgcacctcatccaactgttcaagcaaacagctactgatatcgcctatacaaactcgactacaaattacattgccggacgcttcaagatcatcagcaatgcggaaaccaagggtctgggcacgtttgtgggcaccttcgccctgccctcgctgatcttcctgtccctggtcgagctcaactggagcgctgtcaactggagcttccttctggccatgctcgtctccaaggcggtggtcttcttcgccgtgctgatcatctcgctgctggtcgccaggcccctgaactacgctcgcggcggcctgatggcaatattctgcacccagagcaatgacttcgctatcggctatcccatagttatggctctttataaggatgtccatccggaatatgcctcgtatctgtacctgatggctcctatctcactggctattctaaatccagttggtctggtcctcatggagatctccaagataatcaagaacaaggaggatgtgacccgcaatccaccattgtgtccagaaacttgtcccgcggaacagatgtccaaacggaatcgctgcctgggtgaacggtctatactggttttcaacaccctaattgcactgttctttaacccgttgctgctgatgaccttgctgggtgttgcaggaggattcctgtttcccaacggtctgcccgaaatggtgtccagtacgttgcgtgttcttggccagagcttttcggcaacggccttgttcctactcggtcttaagatcgtaggtgggacaggatccgaacgaaagagtataggctttctattgcctggtgttcttatactggttaaaatattggtgctaccgctcgtaatccgacagacggtaaacattatgcagtctggccagaacttcaacgacaccaccgagctgagcacttttggctttctctacggcacctttccagctgcccccggggctttcgtcattgcgacacagtacaacatggaggttgaattggttgctcgaagcatggttttctgtacattcatctcggcaccgctgatgtttatatcagccaaaatgatatcgctgacgaacctgaagccattggactatctccatgagctggatgccttttcgtttgacatcagcgtggccggcgcggctgcctgttgtatcatgctggcattgttgatcgtgacgaagcgcttcaagcgtatgccccaaagaataactttctgtctggtgctttctcagctcatgtgctgcataggagtaatcctctggtccaagatggagcacgtgcaccgttggcctttgtacctgcagtttcttctatttaatatcggaacatacagcactcgtctgtggactggtcttttggccatttcattgctcttcctgcagtgtcgcagcttgtgctttgtgctgaaactatggccctatatgttggtgtttgcctggggtgtgccggccgtattatctgcccttttgattgccttcgactcgaatgtgatgtcgggagagaaacacaatccgagctttcagtacggaaatgctcaggcagccatctcggtgtttatgctcgttatgtgctttatagtaaccgttggctgtttggtgctgcatcagcgttataagaaacgatacgaaaagtacatgacctattcacgtgagttgtccaatccggagtcggaatcatccgatctgcactcgaccatatcaacgactaatctattgagtcacacggatcaatcgtccatcaggcaaagcgttcgcacagcttcttattcgtcttcatccgacgatgaggaaatgataccaacagctgcgggactgccaaccagtaggtcaaatggtgctgccagtggaggagcaggatcaggcggaggaggttgtggttctggcaatggaacttgctgttcgggcggcgcgcctgtgagcaattcctcaacaaccagcaccgtggttgtggacattgaggatctgttgaatcgcacacgccaacgagccagtggtgccaacaataaagatctaaacaagatcgaaagtgcacctgccacggaagaaattcgcaatcaaatgtgcagcagctcctttaactgtggcccaagtacctcacgtcaaagttgtcagactattatcgagcgatatgaggatcagaacagaaggggacttgagcccctggaacacccgagcgacgctgatgagcaccaaactttgaagcataccgtgctcttgatcactttgctgtgctccatgtttgtcggtctggcagtgtccatttggacattggtcatggagggaatgtcgggcatatatctggaactaagtttcctcgatgctttcctcaactttggtcaaggtctgattgttttggcagtgtttatcaccgacattggcgaacttctaatgccagttgtgaaactatggcgcaagttatggtatggagccaatgtggtcagcctaccgcactggtcaaacgtgcggcccgaaaccaagcatatttgtgaacaattccgtaatcatcatttggagaactgcaaaaaggatattgcaaaggaccgaaggtggcgtattcgtgtgtatcgcagagtgttctacggcaccgagttcgtcagctggctcatcgaggtgggactgtccaaggatcgaatggaggctgtgcattatgcccgacatctggtcgatggccgggttttgcgacacataaacaacgtttatcactttgaggataagctgctgctctacaatttctgcagtcgcatatag

SEQ ID NO: 16785 - protein, 980 aa, DROSOPHILA
MYYASQRIAASTEANVRVITSTMASSLANGTATPRADDGGVSMNNFYPALVQCFGIIICGSTARQMHLIQLFKQTATDIAYTNSTTNYIAGRFKIISNAETKGLGTFVGTFALPSLIFLSLVELNWSAVNWSFLLAMLVSKAVVFFAVLIISLLVARPLNYARGGLMAIFCTQSNDFAIGYPIVMALYKDVHPEYASYLYLMAPISLAILNPVGLVLMEISKIIKNKEDVTRNPPLCPETCPAEQMSKRNRCLGERSILVFNTLIALFFNPLLLMTLLGVAGGFLFPNGLPEMVSSTLRVLGQSFSATALFLLGLKIVGGTGSERKSIGFLLPGVLILVKILVLPLVIRQTVNIMQSGQNFNDTTELSTFGFLYGTFPAAPGAFVIATQYNMEVELVARSMVFCTFISAPLMFISAKMISLTNLKPLDYLHELDAFSFDISVAGAAACCIMLALLIVTKRFKRMPQRITFCLVLSQLMCCIGVILWSKMEHVHRWPLYLQFLLFNIGTYSTRLWTGLLAISLLFLQCRSLCFVLKLWPYMLVFAWGVPAVLSALLIAFDSNVMSGEKHNPSFQYGNAQAAISVFMLVMCFIVTVGCLVLHQRYKKRYEKYMTYSRELSNPESESSDLHSTISTTNLLSHTDQSSIRQSVRTASYSSSSDDEEMIPTAAGLPTSRSNGAASGGAGSGGGGCGSGNGTCCSGGAPVSNSSTTSTVVVDIEDLLNRTRQRASGANNKDLNKIESAPATEEIRNQMCSSSFNCGPSTSRQSCQTIIERYEDQNRRGLEPLEHPSDADEHQTLKHTVLLITLLCSMFVGLAVSIWTLVMEGMSGIYLELSFLDAFLNFGQGLIVLAVFITDIGELLMPVVKLWRKLWYGANVVSLPHWSNVRPETKHICEQFRNHHLENCKKDIAKDRRWRIRVYRRVFYGTEFVSWLIEVGLSKDRMEAVHYARHLVDGRVLRHINNVYHFEDKLLLYNFCSRI

SEQ ID NO: 16786 - DNA, 3556 bp, DROSOPHILA
cgataatgaagtgtgtctcattcagactaagttaggatcgtcattttttttaactaatgcagcaaaagaatcagttctgcagaatactcctatcagctggtgagtcacagcaagcgggatctccaactgatatgccccacgtgagtgcggggcatattaaacgccacacgaatggcttttgaataatatttacattcattcacctgaacgagtgccagtgtgagtgtgagtgtgagtgtgagcgtgaatgtgaatgtcagtgtgagtgcgagtgagtgagttgcgtggcgtggcgaaggcggccaaatgcgagcgagttgcgttgttaatgtgcgcaaaacaatgctgaaaccacgacgatcgagggaatctgggggcttggagcttggagcttggggcttggggcctggggatcgtcccagcaaaaatgacgaaattatggcagcaactagttataaacaatgcacattaaatgccagcagctcctaggtaacaaatgtagaagcggcggctcatcacaaagttaattcgtatatagaagcaaactaaaaatgctagaagtatattgcttaagattgcttaataaaattgtaatagaactatataaaaatatgaaaaatatgtattttttacgatatattatgatggtattcataatacacatttaactatttaaaacaaatatagatgagctaaagccgaaaatgttctcccttctgccaagcatatttgtgtatgagtaacctattcctacgaatattttacaatattttacaatatatcgtgactttaaatagatttatattcgcttattgtcttaaaacatagaagtacataattttaaaaggaattgagaggaaatatatgcaatatacagatttagatatatgcaaagggcacgaattaacgaacgacagcaacgtcaattgatagtcggcagtcggaggacgaggcgaactggggatcctaatccaatccgtggacctgatcactagcgatcctagacgggactctccagggtgctgcccgatgcggaggtgcgcagctcgcaaagttcctgcattaggtcgcggaagagcataggatttacgttgacgctaaccttcatcatcaggaaccagtcgccgatggtcaggtcccgcagggcacgcttcacatgccgtttggtcatgaaacgcaactggctgcgtatcatctgctctcggagatacctgctgcaaatcatggccagccggcacagaaggttcaaaccggacatcagggccatgagcaggaaccacgcccaaaggaagacgaagattttctcgttcagaatgttcagcggcaggatgcacaggttgtccataacgttcgccgtgccgctgcccccgaacttgagcacctcgcacttggcgatcttcgggaagacgctcgaggacacgcggttccagcgatcccagtcgtagaacggaatggtggccagcgcgcgcagatacttcgaccagaatccgttcaggaacacttccaacacgattatgttcaccacctgcggattggataccataagctgtattacgattatggtaaaattagtaaacatatcttgtgatatattagtttttcgataacaaaaaaactataatacaaaatccaaaagtttagatgtcctattgactgttatgttaagtccttatgtttaagtactaaatttatattttacacaagctaagagctctatattcaaagaaaacccacggaaattgttcataacagtttaaagtcatatatgttataatattctgtaagttttctcctcttcacattcacaaacctactcacactgatgaggaaattgaggacctcgcagaagacgtacttggccatgtagcaaaagtgcatgtcctcgtagtcggtggtgaagtacttgaccagcatgcgcagccgggtattgtaggtctcctccgagaggagcgcgtcgccgacctccgagcagagctgcttaagccgccggccctcccacaccttccacaggcacgaggggaagtagaagacgaacgactggaagagcagcaggatgatgacccactggtagtagcgcagatactgccgctccgtctggccacgaatctcggggcccacgccctcggctatcgacagggaccgcgcgtaggcctcgttgtactcgccaatcctgcgcagactcgatctgaagtggggcctggtgcggaccctcgacgatgactgcggtgcgttggttgtggcggatgagaagaaggcagagttgtaggagacttcctgatttggggaaaccagcgcctgctcctgatcgccgaagtcgtccagcttgaggatgtaggtgcccatggtccagcagtaggactgtatgtactcgatgttcttctcctcgctgatgcactggatcggatccccaaagtactgacgcgcggacaggagaagcgagcaggtgagcaggatgacgacggtgcacctggagtggatggtgaagacggaatcgtagatgcgtattgacttgaactggagatacttggagagcggcttcaccgccgaaaacatttcttctgcctccgggaagagttcctcgaggacagtttccaactctcaacgctccgctcctcttcgcctcgcggtgctacctgtttatgttcctgttcctgttcccgttcgtgttcctgttcccgatcacagtcccgatttcgatcctcctttgtcctggttttcgtccgggtttttgccctatctatgctgcccctgggattaatcacttcgatctttgagggatgacaatgaatgcaatcgaattgccgaccgaggatggtagccagttcacagatcagatcgtcgcttggttttacatatttttttgtccgtgccgtcattattacctacttgttttttttccccatttctctccggaacttggcagtatgtcagttgggtcctgtcactgccgaccagtgttgtacaatcgattgatgattaccgaaatccgattacccaaattattttacagcccaaaaggctgccaaactccattgcctactttcgggcattttttttacttaaacacaagaacccaatcaatatctttgctcacattgctttaagtttatttaagcgtttgttgttagccgtaagattatgacagatttctagctataattctcatgattcagcacttcagccttggctctctaggtcagccggtcagctcatcgaatttggggtaaaaggggagccaaaatcatcgtcgttgtcgccagtcagtccaagttcaggaatccaattatcgagggtatctgcaattaggcaaggtgcacgcagctaattaccataaatcaaataaacttgtaaagtccgctgacgatgaccttcaaggttcaagaaatatgtatcaactttttctttttggagttacaagcgacaaaaagagcaaaaacacaatgaacccatctaatataaatcgtgcatgaaataataagcagagacaatcgaaataatatatatagagagagaaaaaagatgggactgagcttataagtatattcgtttttggaaa

SEQ ID NO: 16787 - DNA, 1290 bp, DROSOPHILA
gaaatgttttcggcggtgaagccgctctccaagtatctccagttcaagtcaatacgcatctacgattccgtcttcaccatccactccaggtgcaccgtcgtcatcctgctcacctgctcgcttctcctgtccgcgcgtcagtactttggggatccgatccagtgcatcagcgaggagaagaacatcgagtacatacagtcctactgctggaccatgggcacctacatcctcaagctggacgacttcggcgatcaggagcaggcgctggtttccccaaatcaggaagtctcctacaactctgccttcttctcatccgccacaaccaacgcaccgcagtcatcgtcgagggtccgcaccaggccccacttcagatcgagtctgcgcaggattggcgagtacaacgaggcctacgcgcggtccctgtcgatagccgagggcgtgggccccgagattcgtggccagacggagcggcagtatctgcgctactaccagtgggtcatcatcctgctgctcttccagtcgttcgtcttctacttcccctcgtgcctgtggaaggtgtgggagggccggcggcttaagcagctctgctcggaggtcggcgacgcgctcctctcggaggagacctacaatacccggctgcgcatgctggtcaagtacttcaccaccgactacgaggacatgcacttttgctacatggccaagtacgtcttctgcgaggtcctcaatttcctcatcagtgtgagtaggtttgtgaatgtgaagagggtggtgaacataatcgtgttggaagtgttcctgaacggattctggtcgaagtatctgcgcgcgctggccaccattccgttctacgactgggatcgctggaaccgcgtgtcctcgagcgtcttcccgaagatcgccaagtgcgaggtgctcaagttcgggggcagcggcacggcgaacgttatggacaacctgtgcatcctgccgctgaacattctgaacgagaaaatcttcgtcttcctttgggcgtggttcctgctcatggccctgatgtccggtttgaaccttctgtgccggctggccatgatttgcagcaggtatctccgagagcagatgatacgcagccagttgcgtttcatgaccaaacggcatgtgaagcgtgccctgcgggacctgaccatcggcgactggttcctgatgatgaaggttagcgtcaacgtaaatcctatgctcttccgcgacctaatgcaggaactttgcgagctgcgcacctccgcatcgggcagcaccctggagagtcccgtctag

SEQ ID NO: 16788 - protein, 428 aa, DROSOPHILA
MFSAVKPLSKYLQFKSIRIYDSVFTIHSRCTVVILLTCSLLLSARQYFGDPIQCISEEKNIEYIQSYCWTMGTYILKLDDFGDQEQALVSPNQEVSYNSAFFSSATTNAPQSSSRVRTRPHFRSSLRRIGEYNEAYARSLSIAEGVGPEIRGQTERQYLRYYQWVIILLLFQSFVFYFPSCLWKVWEGRRLKQLCSEVGDALLSEETYNTRLRMLVKYFTTDYEDMHFCYMAKYVFCEVLNFLISVSRFVNVKRVVNIIVLEVFLNGFWSKYLRALATIPFYDWDRWNRVSSSVFPKIAKCEVLKFGGSGTANVMDNLCILPLNILNEKIFVFLWAWFLLMALMSGLNLLCRLAMICSRYLREQMIRSQLRFMTKRHVKRALRDLTIGDWFLMMKVSVNVNPMLFRDLMQELCELRTSASGSTLESPV

SEQ ID NO: 16789 - DNA, 4911 bp, DROSOPHILA
gtcataaagcaaacttgtattgtgtgaaaagtgcatgttattatataactaatagattttaatcaaacttttaagaaagttccttcgtctacaaagcaaagagcattcagctggaagttcaattcgcaattcgttttccagttgtcatccaagcgaattcaaccagctttcgtggtggacagtctgacgagctctgctgcgcctacacttgagttcgcggagtctagagtttggagtcttggatcttggttgtgggtcttgttgacgcagtctggtgattctagtgcacaagcgttttaagttcaatgcaaactcgatgggtgaccaaattgggaggaggcaacgcatcgagttggccataagcaatccaaccggactgggcaaccaaaagcgaggagttgacgccgttcagagtcacagtcatagtccaataatcatcaaatgtaaggcgagcgtaattaaaagccaatcgttccaaggttatccgcacacacacaaccccataataatccgcctgccagccacattaataatgaattggtatctttgattagtcgcgggcttccaaaaatcgtcaagaaccgccgaaagtgcttaacttagttttgattaataataaatctgaaagggaaacttctctttgatcggctgacaggttcaagccaactgggaattataattggttagcgcttgactttgatggctttaaagctgcaattgacataaaagatacgttttgcgaatggcggtttagaaaggcaataataataattaaccattcgcgtttgtgtacataataaattgatttaatattgtatgaatgtatttaatgcttctatgatttatgtatatgtagtggctatgctgttgcacctactaactttgtcaagttctgttacttttgatgtttattttattagttactaacctggaagtacaccgtatctatcatcgatggctttatccctgacagaaacccatcaaaaactcttatcctattcacttcctcttacatttcgtttacttagcaaaggaattaatcgacatttagatgtttacaatatagaattatgtacaaaacataagataagcgctacacacggtgatggaaacagaaggtcagggaaggggcagaggatcgggccgcggattaggattggcaaggtccaaaatgctatgccagagagtctttaatgcaaagtataaaaaaattcaattacatctagttgtgagccacgcgaggagatgccgcagcaggaggacagagcgggagccgggtttccgactaactgatctcgtactgatatgcatcgtccgagtcctcgccgctggataagtcccgcttacggcgacgctgctcccgcttgctgagcttcttggcggctggcgccacttccggttctggcggcgcaaggggctcctcctcggggagctcttcctcgatggcggccgcatcctcgtccggctcgttggcctcctcctcggcccgcttctgcgtcttgaccagctcgcagagatacttgtagcgcaccaggcactcctccttggtcttctccggcacactgttggcgatcttctgccaacggtctccgccggccgtcttccggtacttgactatcgccgcctccagggcgcgctgctgctcttgcgtccagttggtctccggaattagcatgctcttctcggctgaagctcctgcatttgcggctgccttcttcactttttccttacgctgcgcctgctgggactcctggacgagagcctcggccacgctgtcagtttggccgggaatgcggtagccattctccttcatcttggccgccataaaggtcacctcctgaacgctgcggttcatcgactcggcgatagtgttccagcggctgccagctccgccaggatacttttttaccaagcgaatcagctcggtaagatcctcgtcagtccagaagccgccgctcaccgtgctctaaaagtaaaagcatgaaattagtagggtttcgaatttactagggaacaggaaacactatactgtcggctttataccttctgggaagctggacgaactgcatcgtcatctgtcaattcgcgagtctgaatctgcgaatagccgcgcaattcttcctcggtcttctctggagccttgctgttctgcttgcgcttccgcagattctccttgtgctccttgcgaaggcgcgcctgctcctcggcctcccgttccagttcctcctgacgacggacggcctccagttccctgtggatgcaaattgggatgaatcaattagtttcttacttcttacttttggataccgttcccacacgatttttgttagcttgttagctattctacgctaatcgaattttagtaccttatctgtggtcatatcaagaatgctcagtttcatttgattatcgtgcgacacaaagactgacaatattccttctttggaacctatctaatggtgcaagtcatcttaaggtgcactcatgagcaccttttttggaaagcataaaatgtgtttgcatggtgacatatcgttttctttctttgtttcttaattgaattgcctatatttagaagaattgttctagcttgtgaatataaaatgctaactaaaggctatgaccaaaatttcaactgagaaatgagaaactaaccaacttttaatattaaatgatatcactctgcatgcaatgaacatacagaaaccacagcgaattaacgataagagtggcaatgtaagttatcaaaacctgatgcaatacaaaactagaattatattcttttgttgctctatatactaagatattgaagactaaagtaagagaggtctgccaaaactccgagcacaaggtcgcaaaataataatccttccgctgccaggacctctcgatatagaaacttaatgaaatagcaaaatcctacaactccaaaatgactacaatggaacaaggcgctataataacgtaaaaacgtaaggtaagcaatagaaccctgccacttactgcctgcgcttctccagggcgagttcctttagctcgttggccttgctgaatccgttcttgatggtgcgcggcaggttccacagggccaaggggatctggatgggcagggtgttgagtagcgagggcatcggtatctcgctaaggatcacgtccatgtcgatgttcttgttcttcttctgcagcttcttcagcttggtgccaaagacctgttcggcggtgtacttcttctcgaggtaggccgcccaggcgaatagatactggcccacggtggttatcaggaagaggataaaggcgccctcatagagcccgatcttgcgcatacgtcggtaatagtagagggcagacttccagttgggcatgccctccttcagtacccggtcgtacttctctcggcgcgacggatctttgagaacctcgtagatggaaacgaggttgcggaactggatgttggcatcctcggccggattcttgtccggatgcaggacaatggacagggtgcggaaggcgcgcttcacctcggcgcccgttgccgtttggttgatgcccatgaactcgtagaagttgcggtttacctcctcgaccaagtcaaagatctccagttcctccgagtgccaggcgctggcgccagtggcgcagagcagcaggaggccggccagcgtcagctccggtcgcatcatcatcgtggtccgagttccgaatccaggtcaggtccaaatcggagtaaaatccaaatttaatgcgccagacccacgcacgcaccacaaatacacacacacgcaagcaaacacggataggctcagctggaaagtggcaacgtcagcagactggtcgctggtgcgacagcgttgccaccactcggtaaagtttgtgtagacaaaaagatatttgcaacgtttctattatttatttttacgaatttctgtttttttgttcaaaaataatttactgcactaattctgtaaccatatatatgtaatcaaattttacaaatttttttttccaactaacgacacacagtaggtcaaacagatttcgtttgtttgctcattaaaatttgctcataacatttgtcaagttcttcctgaaaacaataaaacaaattctctttctataccgaattttgttttaacttgatacacgtttttcacctgtttcaaaccaaaacgcccaacactgtcgactgttatcgataagctctcgatggtgcatcacttgtgcaactaaatgaatagaagcgacgcgacgtttcactcttataagaataagaaatcagacgacaatgaagctgctctatatgctgtggctgctgagcatcttggtcctggtctcaggccagcagaagcagacagctaactccgccaccaaggacgccccagtggtggccaatgcgacgaacgtgctgcaggccaaagttattccaggatcgaaattggaatctggatctccgggagctgccagccagctggtgccgggtaaggatgcagctgtgttgcaacaggacaagaacttaaacaaaacggccacagcagaaaatgcaggtaaagccaaaaatctcacaaacaccgatacaggagtgcccaccattcctttggtcacttccaagccggctgtggagcaaaaggcggccaaggaggcgaccaatacgacctccactacaacttcttccaccacgaccaccaccaccacggcaaagccagctgcaggatcagccatagtcaccgagggccagtccatgaaggatgtcaccaagccgagcaactcgtccaccaacggcgcggcaatatccccgaccaacagcacccacaccgccacagccaccaccaaaactgtcaattcaaccatcatcgcaaccacgccaaagccgaagaagcccccagtggtattgagcactgatatacaccaggaggg

SEQ ID NO: 16790 - DNA, 1999 bp, DROSOPHILA
aataaataatagaaacgttgcaaatatctttttgtctacatttgcttgcgtgtgtgtgtatttgtggtgcgtgcgtgggtctggcgcattaaatttggattttactccgatttggacctgacctggattcggaactcggaccacgatgatgatgcgaccggagctgacgctggccggcctcctgctgctctgcgccactggcgccagcgcctggcactcggaggaactggagatctttgacttggtcgaggaggtaaaccgcaacttctacgagttcatgggcatcaaccaaacggcaacgggcgccgaggtgaagcgcgccttccgcaccctgtccattgtcctgcatccggacaagaatccggccgaggatgccaacatccagttccgcaacctcgtttccatctacgaggttctcaaagatccgtcgcgccgagagaagtacgaccgggtactgaaggagggcatgcccaactggaagtctgccctctactattaccgacgtatgcgcaagatcgggctctatgagggcgcctttatcctcttcctgataaccaccgtgggccagtatctattcgcctgggcggcctacctcgagaagaagtacaccgccgaacaggtctttggcaccaagctgaagaagctgcagaagaagaacaagaacatcgacatggacgtgatccttagcgagataccgatgccctcgctactcaacaccctgcccatccagatccccttggccctgtggaacctgccgcgcaccatcaagaacggattcagcaaggccaacgagctaaaggaactcgccctggagaagcgcaggcaggaactggaggccgtccgtcgtcaggaggaactggaacgggaggccgaggagcaggcgcgccttcgcaaggagcacaaggagaatctgcggaagcgcaagcagaacagcaaggctccagagaagaccgaggaagaattgcgcggctattcgcagattcagactcgcgaattgacagatgacgatgcagttcgtccagcttcccagaagagcacggtgagcggcggcttctggactgacgaggatcttaccgagctgattcgcttggtaaaaaagtatcctggcggagctggcagccgctggaacactatcgccgagtcgatgaaccgcagcgttcaggaggtgacctttatggcggccaagatgaaggagaatggctaccgcattcccggccaaactgacagcgtggccgaggctctcgtccaggagtcccagcaggcgcagcgtaaggaaaaagtgaagaaggcagccgcaaatgcaggagcttcagccgagaagagcatgctaattccggagaccaactggacgcaagagcagcagcgcgccctggaggcggcgatagtcaagtaccggaagacggccggcggagaccgttggcagaagatcgccaacagtgtgccggagaagaccaaggaggagtgcctggtgcgctacaagtatctctgcgagctggtcaagacgcagaagcgggccgaggaggaggccaacgagccggacgaggatgcggccgccatcgaggaagagctccccgaggaggagccccttgcgccgccagaaccggaagtggcgccagccgccaagaagctcagcaagcgggagcagcgtcgccgtaagcgggacttatccagcggcgaggactcggacgatgcatatcagtacgagatcagttagtcggaaacccggctcccgctctgtcctcctgctgcggcatctcctcgcgtggctcacaactagatgtaattgaatttttttatactttgcattaaagactctctggcatagcattttggaccttgccaatcctaatccgcggcccgatcctctgccccttccctgaccttctgtttccatcaccgtgtgtagcgcttatcttatgttttgtacataattctatattgtaaacatctaaatgtcgattaattcctttgctaagtaaacgaaatgtaagaggaagtg

SEQ ID NO: 16791 - protein, 522 aa, DROSOPHILA
MMMRPELTLAGLLLLCATGASAWHSEELEIFDLVEEVNRNFYEFMGINQTATGAEVKRAFRTLSIVLHPDKNPAEDANIQFRNLVSIYEVLKDPSRREKYDRVLKEGMPNWKSALYYYRRMRKIGLYEGAFILFLITTVGQYLFAWAAYLEKKYTAEQVFGTKLKKLQKKNKNIDMDVILSEIPMPSLLNTLPIQIPLALWNLPRTIKNGFSKANELKELALEKRRQELEAVRRQEELEREAEEQARLRKEHKENLRKRKQNSKAPEKTEEELRGYSQIQTRELTDDDAVRPASQKSTVSGGFWTDEDLTELIRLVKKYPGGAGSRWNTIAESMNRSVQEVTFMAAKMKENGYRIPGQTDSVAEALVQESQQAQRKEKVKKAAANAGASAEKSMLIPETNWTQEQQRALEAAIVKYRKTAGGDRWQKIANSVPEKTKEECLVRYKYLCELVKTQKRAEEEANEPDEDAAAIEEELPEEEPLAPPEPEVAPAAKKLSKREQRRRKRDLSSGEDSDDAYQYEIS

SEQ ID NO: 16792 - DNA, 4437 bp, DROSOPHILA
ttgtattttgcatctccggactgtccaagtgctggtcagcagatatatctgggatattgccggtcattgtgggcattgttttaaatgccccaaccataatgattgttgcaaaatgggagcgagaaacagaaagtggcatttccagagtattgaatgggatgcactctgcaggccggagataaaagtattaaatgcttcaattaataaatactcgttagctttggaatgcttgaaaaatgggcaacttcatttaagtgttccgacaaagggaaaatcttaactgaagaaaatctgtacaagcatttttgcgatattcgggtaaatggcaagatttacttggcattgatactaatttacagagcattcgtacttcagattgagttgcaccaaaaaatccttggcatagtcttttgtagctcgttgaatgtgttgagctgcgatggcaatttgcatttttcatgagtgccaggcaacgtaatggattccctgggcaacagattaaagctgcattacggtgtcaagaccttttaaattttcaatttcccaccttcagtgttggccagaaggatattgcaagtttaattgcatttatggctgcattcgcattcgcaaaacgcattaacacaccgacaaaggccgtagccggacagttgggtgcgcgccatagattgagatgcacatgcgtttgatgcaccgggacagatagccaaatggcatgttaattggcctaattcgatagccaattgaattaaacaccacacatgcacacatgcttaagaccgtggagtggcttaaatcacggaaattttcggtccacacaaaatgattcagcagacactttgattttgcggcagcgacatcgatatgattatcgaacaaatcagttagtacctcggcgctaattgttaattacccatgcatttcaggtcgcatcgcccaccacaggaggctgccacgccccacgccccctctccaggaagcaggacgcacggcacaccacacccccattcccaacatgggcagcggacactatttctgggcgatcttatactttgccagcctgtgcagtgcttcactacaatgttctagatccaagagaatcgatgttatatcgcggatcaccttcccgctggtcttcgccctgttcaacctggtctactggagcacatatctcttcagggaggaggaggatgagtaaatgccgttacctattgccaaacaccaattactttatagaagggttggcgctattggccaacacgaatgtactaacctatttctttcattcttttccatttcggttgtcttcatttcatgctttgtgttgcttatggctttgttggcttcatttccgatttggttgatttcttgattgacaccttgattgaatggttcaaaccactaaaggaccttctaaggcgcgtctctgaaatgcggtggctatgtagaatctaatacgaaattaactaattataccgagggatacgttgcgatatcgctgtatgctaccggctatgtgccgcatgctacatttatggttatgtctcggaacagtgcagataagttaagaacggtatccggcaaggctccatggcacttccactaaacaaataaagaataatgtttgatgaatgacgaaattctagttaattgtaagttaaattgatcaagagtgactgcatagtagataatgttatgaataattatactaaactatacacaaactgacacacaccgcaacacttgtttgacttgatttgtttagaggatgctccaaattgttacaaattgattaattattttagctggttatcgacgataaccgagttttgttccggactctagattagttctaaacgaaattgcaattgatttgtacttaaatgcgttaagttagataagccgcaaacagcgagaggaggtcgtagagaattcgacttttgtaaatatgtcatacaataagttttaagcgaactagtttatatgaattctaattgtaaaaatcgtgtagataaatttaagtttagtcgataaacaaaccactaaccgaagcgagatacctaggtaaaatcaatttaattatgttcaccatcgaagcaaaataaaaatcgaatcgaaaatatcaaagaatccttcaaaacacacagaaacaaatacagaactttctttttgcattttttgcccaaactactcttaaatgataagttcaactgaaactggtgggtatctgcaaggtatttttacccaaactttattagaaactttcttcattatttatatacatacggcttgcttttcgttttagagttgaatttttatagtagttgaattgttctggtactcacgggaagtaaaaccctcgaattccgattagtttttcatttgaattcttagaatattataataaatttacatttacctaattatgtattgggcccaagtgccgcttagctagttaatttccttaattagagttacaatataaaaatatacaacatgcaaaccataaaccaattaacagacaatacaaaatattttatcatgtagtcaaagtccctaaacaacttaatggatactacacataaattgattaaaatcagtattataagacaaaaataagatcaagatatatacggttctttttatatccaaaaatatctttggttatttaagtgccttttgtatgccaaggagatttctccccactttcttcccttctctaactctctctctctctctctctctcttcctaacttttgaatgactccgatcctttcacgctaatatcctttcctaaactcaattagagaaatgcactaaccgacaccataaactatgcagctctaattttagaattataactaaagtgaattctacatagcaacaacagaaacagaatcagttccagaaccacaataaccaactaacagataaatcgaataaaatatttccgtagttttttaatatttttattaactttagcctgttttattcacatgttttcttaaactttttctttgattttggaaatgcctttcgtttgctatcatttataatctaaaggtaagaaactaaacgtaaaaggaaatcaaaaatcaattgaaacttattctaatatatagacactacacaaggcaccctgcataataattgttgtcattaaacaagcgtcataagtacgatcagaacatatagaaaaaccgaaaatggaaatatttatagatactttcatgttgtaaaagttgtgccaagcaaagacgaaaccaaaaactagtcaaagaaagaaaatcgaatgaaatcgcgaattataactataactctagctatagttgtattgtatatgaagctattgaacatacagggtttttaaatgtgagcatatagttgatgaaccagatgaaggtcgggaaaatcgaacaaaattgatggcagtcggagacgggctgattgattgaaatccgttgattgatgtactagatgaaaaataatcacgacgttggaaaaacaattaaactaggtcatacacaatgggcgggcgaaacaccgttttcggcatttatatttagtgaaaaaaaaaaggaaacatacttaggttgtgtgctgctcttcatttgccgttctccaattcggtcaattatcattttttccggcaaatcgtttagcagcagcagtccagttcagtgtaaatagtttgggtcagaacatgtaaatgtcatttaaaaggttaggttaacgagaaacacaacaactacgggaaatcgtaacacgaaatgtgcacaactttatatatatatataatatagatgcgttccaaaaaagacttacaggttttgattaacagacgagcatagagattaaatcatttaccaatgcgatgtaaacacgaaaaagaaagaactatgcgaacgagtagatcctaagttaacgtatgtgtagatcgtaagaggcagttcgaaaccaaactagctaaagcatgcacataactaagctactaagcgccacggcaaattgcattcaccacccactatctgaactcacttgatccactcactcacttaccactcgcgtacaccactcactcgatgtttaatctttgctaaccacacgaaagaaatcaaaaagcgacatccaaatcgaaaatgaatcttatctttgcacagtttgtcggggacagatgacgagtttgagtattgcaagtaaaaatttagatagatcataacacatatcttccaaaatgggggcggctcatggcccattgataacaatcaagcaactcaaactataatttctagaaaagagaacaagtgtaaatatatgaacgacaaacagccgaatcattcgaatcgaagttacgatcgatcgttggcgatcgaagagcgaatcaataaacactgcaaatcaccttactttatagagctaagtcaggacatgcacacc

SEQ ID NO: 16793 - DNA, 3619 bp, DROSOPHILA
acccccattcccaacatgggcagcggacactatttctgggcgatcttatactttgccagcctgtgcagtgcttcactagcaaataatgccaaaataaatttccgagaaaaggagaaaaaagtcttagatcaaattttaggtgcaggcaaatacgacgcccgaatacgaccatctggaataaatggcacagatggtcccgccatagtcagaatcaatctattcgttcgcagtattatgacgattagtgatattaaaatggagtacagtgtgcagttaaccttccgtgaacagtggacggatgaacgcctcaagttcgacgatatccagggtcgcctaaagtatctgaccctgacggaggcgaaccgcgtgtggatgcccgatcttttcttctcgaacgagaaggagggacacttccacaacatcatcatgcccaatgtgtatattcgcatcttccccaacggatctgtgctatatagtatacgtatctcgctgacattggcctgcccaatgaacctaaagctgtatccgctggatagacagatctgctcactacggatggccagctatggctggaccaccaacgacttggtcttcctgtggaaggagggcgatcccgtacaggtggtaaagaacttacacctacctcgcttcacactggagaagtttctgactgattactgtaacagtaaaaccaacaccggtacttgcctcaaagtcgatctactattcaagcgagaattctcatattacttaatacaaatttatataccatgctgtatgttggtcattgtatcatgggtatcattctggctggatcaaggagcagtaccggcgcgagtgtcactgggtgtcaccaccctgctgaccatggccacccagacgtcgggcataaacgcctccctgccgcccgtttcctatacgaaggccatcgatgtgtggacaggcgtgtgtctgacgttcgtgttcggggccctgctcgagttcgccctggtgaactatgcatcccgatcaggttcgaataaagctaacatgcataaggagaatatgaaaaagaagcgccgcgatctggagcaggccagtttagatgccgcttcagatctgctagatacagatagcaatgcaacgttcgcaatgaaaccgttagtacgccatccgggcgatccgctggccctggaaaagcggctccaatgcgaggtgcacatgcaggccccgaagcgaccaaactgctgcaagacctggctgtccaagttccccacaagacaatgttctagatccaagagaatcgatgttatatcgcggatcaccttcccgctggtcttcgccctgttcaacctggtctactggagcacatatctcttcagggaggaggaggatgagtaaatgccgttacctattgccaaacaccaattactttatagaagggttggcgctattggccaacacgaatgtactaacctatttctttcattcttttccatttcggttgtcttcatttcatgctttgtgttgcttatggctttgttggcttcatttccgatttggttgatttcttgattgacaccttgattgaatggttcaaaccactaaaggaccttctaaggcgcgtctctgaaatgcggtggctatgtagaatctaatacgaaattaactaattataccgagggatacgttgcgatatcgctgtatgctaccggctatgtgccgcatgctacatttatggttatgtctcggaacagtgcagataagttaagaacggtatccggcaaggctccatggcacttccactaaacaaataaagaataatgtttgatgaatgacgaaattctagttaattgtaagttaaattgatcaagagtgactgcatagtagataatgttatgaataattatactaaactatacacaaactgacacacaccgcaacacttgtttgacttgatttgtttagaggatgctccaaattgttacaaattgattaattattttagctggttatcgacgataaccgagttttgttccggactctagattagttctaaacgaaattgcaattgatttgtacttaaatgcgttaagttagataagccgcaaacagcgagaggaggtcgtagagaattcgacttttgtaaatatgtcatacaataagttttaagcgaactagtttatatgaattctaattgtaaaaatcgtgtagataaatttaagtttagtcgataaacaaaccactaaccgaagcgagatacctaggtaaaatcaatttaattatgttcaccatcgaagcaaaataaaaatcgaatcgaaaatatcaaagaatccttcaaaacacacagaaacaaatacagaactttctttttgcattttttgcccaaactactcttaaatgataagttcaactgaaactggtgggtatctgcaaggtatttttacccaaactttattagaaactttcttcattatttatatacatacggcttgcttttcgttttagagttgaatttttatagtagttgaattgttctggtactcacgggaagtaaaaccctcgaattccgattagtttttcatttgaattcttagaatattataataaatttacatttacctaattatgtattgggcccaagtgccgcttagctagttaatttccttaattagagttacaatataaaaatatacaacatgcaaaccataaaccaattaacagacaatacaaaatattttatcatgtagtcaaagtccctaaacaacttaatggatactacacataaattgattaaaatcagtattataagacaaaaataagatcaagatatatacggttctttttatatccaaaaatatctttggttatttaagtgccttttgtatgccaaggagatttctccccactttcttcccttctctaactctctctctctctctctctctcttcctaacttttgaatgactccgatcctttcacgctaatatcctttcctaaactcaattagagaaatgcactaaccgacaccataaactatgcagctctaattttagaattataactaaagtgaattctacatagcaacaacagaaacagaatcagttccagaaccacaataaccaactaacagataaatcgaataaaatatttccgtagttttttaatatttttattaactttagcctgttttattcacatgttttcttaaactttttctttgattttggaaatgcctttcgtttgctatcatttataatctaaaggtaagaaactaaacgtaaaaggaaatcaaaaatcaattgaaacttattctaatatatagacactacacaaggcaccctgcataataattgttgtcattaaacaagcgtcataagtacgatcagaacatatagaaaaaccgaaaatggaaatatttatagatactttcatgttgtaaaagttgtgccaagcaaagacgaaaccaaaaactagtcaaagaaagaaaatcgaatgaaatcgcgaattataactataactctagctatagttgtattgtatatgaagctattgaacatacagggtttttaaatgtgagcatatagttgatgaaccagatgaaggtcgggaaaatcgaacaaaattgatggcagtcgga

SEQ ID NO: 16794 - protein, 454 aa, DROSOPHILA
MGSGHYFWAILYFASLCSASLANNAKINFREKEKKVLDQILGAGKYDARIRPSGINGTDGPAIVRINLFVRSIMTISDIKMEYSVQLTFREQWTDERLKFDDIQGRLKYLTLTEANRVWMPDLFFSNEKEGHFHNIIMPNVYIRIFPNGSVLYSIRISLTLACPMNLKLYPLDRQICSLRMASYGWTTNDLVFLWKEGDPVQVVKNLHLPRFTLEKFLTDYCNSKTNTGTCLKVDLLFKREFSYYLIQIYIPCCMLVIVSWVSFWLDQGAVPARVSLGVTTLLTMATQTSGINASLPPVSYTKAIDVWTGVCLTFVFGALLEFALVNYASRSGSNKANMHKENMKKKRRDLEQASLDAASDLLDTDSNATFAMKPLVRHPGDPLALEKRLQCEVHMQAPKRPNCCKTWLSKFPTRQCSRSKRIDVISRITFPLVFALFNLVYWSTYLFREEEDE

SEQ ID NO: 16795 - DNA, 4400 bp, DROSOPHILA
tgaatttttaacgcttcatttgtgaagcgacataaacagtgactaagtgtttacttagatccacaaatcaaatggcacgccaattagcaatgcgtattgattagaaggagaaacttgcaaatcagaattcgctgttgaatggaaagcatttggcttataggtcaactatctgaattggtttaaaatcgtttccggtcgtttagtcaattaaatatagttcaggttcaatattctttttgggtttcttctttagatttcaaaaactatcctaaatttaaattgttttcatatttgctgactgcactttgaaatgctctttacttttaatattataaagctactacttttaagtatcccctataacataacatacaaccacatcaagtgtcgttacacttttttccaaatgggaacacttttaaaattcaccaatctgtggttgtcaaatccaaatgtcattgtaattcgggacacttcagtatttgagtcaaaaatatgggagcagagcaatcggcattgttggcctgcactcagacgggcatccatgaggatcgcctggaaatggataactcaaagttgttctttcaattgtactttgataggatgccccagcctgtgacgggtcccgtgacagaagcgctgctccacttggtggataaagtgaatgtggctggggctaataatggtaatatccgatacctttataccaattgtccttaaaatgtgtactcttgaagctgatgaaacccaatcgatcaaggacgaatgtaatagcggggaaagcgacaccatatcggtgctcagtaatgacagtgaagtctcgacaccaagtttggatgtggaaatagagcccatacagatagccgaatttgagccgatagatcaatacaatatgcctattgaggaaaccgatcagacatatacgctaccattgttaaaataaatatgtagattaatttaacatatgaatttatgtacagaactaattgcaattgttcgtctacttaaaattaactttctttagtctcagcgacttaatgggtctgacaatgctccttcgctcctcgcgatgctttttcatctccgcctcgcgcttcttggcatggaactgtgacttcttctgcttgttcacttcgaatgtcatctgacgattgcccagggagcgacccacattggtgacctggccctccagctgggacatgacccttacgcgatcctgcaagctcgcttttttgatgcgctgctgcagtagactgctgccttgatgttgatccaagggggtcatggtgaaacggttgccattggtggtgggttgttggctgtgtccattcgtctgcggtctttttgcggtatccgaaatttcatccggctgctgctcgtcatcttctagctcctcctcttcctcacgttgtcgcttcacctgtttgtacgcctgcttcatttccttgacatactcccttcggtcatcatcgtcagatgaggcctcatctccgctgtcatccttcgtttcgccatcgctcttctcgaagccaaataggtcctcgtcattatcgctttcctcgcgctgctgtgcctcgtccgcgtgcaactccgccacatgagccacctccacgcgcttcttgagttccttggccttggatttatccagacggttcagaacaggagccagcagacgatactcctcggcagacttgttaacttcaaagtcggcattctcaaacatggccttgaaacgcgagtcctccagcaggctgggcacatttcgctgcttggcactgttggaaggattggcttgctcgtccataatcttgagagccaactctttgttgactttgggcagcttggattcgatttgcaggcgggacttgcgctcactttcgatttcttggcggatcttatctttgcggaagcggtcgaaggcgaagggttccacaactgccttggctttgttgtacaatcttgcgtccataaagtatctgtagaatttttaggtattagacaagatctttacctcttccaatctttttcaaacttacccgtgcatataacccttaagaagattgctgccaacgagatgctccattcccaattcagccagctccttcgctgtgacgaactgatagtcatcgtacacattctccacgacctccgattcgatctcctcggtgaggttatccaagaacgagcaccatcggggtgctggacccattgcaggcacataataggtcatcatcttaacatcctcctgggctacgaagaacatgcccgtgtcgggaatggtgcaaaaatcgttgaatgacgaagtcgactcaacgtaggcgatctgcttgcctgtctgctcgtcccacagcttcagtgtagcctcgtccaaactatagacggcattctgagccggattaaaggccagacgcttgatgggcagtcgattcagatgattcttcaccagcaacggttgcttggcgcgaatgtcgtagatcagcacgtgtcccgaagcagttcccactcccatgtgcaagccgttccggaatttgagggccgtgaccgatggaaactccttgacgcccggcaacttcatggctacatccaaagttgaacatcgttgcttggtacgtggatcccaggcttctacggtgccttctttggtaccggctaccagaagatggtgctctggattcacttcacaggcgttcaggcagctgccatccgtttcaaagggttgcaggaactgaccgcgctccaaattgagtcggaaaatgtcctgaaatcaaatctttagaataaactagacattagatagacctcagttcttaccctgcccactcccacgatgaacatgtcgcagctgggcttgtggtacttcatgtcgcgtccaaagcgcggtatccttagtctgtagtgccgcccgtgggccgcatggatctccacatagcgatcgcattgcaggaacaccatcttgctgtagtcgtcgctaatcacctcaaaggtggtcacctcggcgtcgaagcagcgctcgaatttgatagacaggttggacacctcgaagcacttgacgcgcggcttgtaagtgccggtggccaggatgtactgttggtcgggactcatgcggatgctggtgcagacgccgggcatatcgaagtcctggatgagctcgatctgtctccgggagtccacttttttcatgagctgtgaccgctttcgccgatccgtcagccactgtgaaggagatactcatgagttaactgcttggcaacgggtttatcttgctactcacatctggcaccgacttgccggcgctcaggttgtagatcttcacatcgttaacttcgtttacgaacatcttgagggacgatttttgctcaaaattaaaacataaacaaacgaagtccgcaacacgtgcgccctctatcgatagacacgattgtcgatagcatctggctgcgataagcacctatcgcggcagtgtgacccttggcttgccaattgctcagtgtgaccgcaggaaaccaagcaaaacaagagaacgcaaaagcagtgaaaaaagactactgatttgcatcgacctaccaattgaaaataatcgcaataattgcctctcggtgcagccccgcaaccccgcgaagccagtgtgcgtgctagcacgaaagtgaactgcattttgcatcgccaaattgcccaaaaattgcaatcgaattccgcacagccaaacaacaatacgcacacatacacacagtaccccccgctctgcgtaaccgccctacgttacacattccgttcgctccctaaggtggactaaaactaaagtgatctaaaacggtgagtaatattcgttgtttttccttaagccaattaaacactgattaaattatgcgaaatggaaaaccgtctgcgaaggggtgacgcagtgcagctgtgggtgctccgcaactttcccttgtgctctcgctctctcttgtttttgtcgttaggcagcagcactccattgttgttgtatacaccccctgattgctttgataccctgcaatggggagttactgttttgtgaccaagttaagaaaataaatatgatttacaaaaatcgattaattctggggatgtttcaggtttttatggtgtataatttattttttgaatttttaggggatggtggggcaaaaacggccgccactctacttaaaaatcggtaggtgaggagtttgtttagtatacgctataaataaatactctaaattagtttttataagatggattattatatgagtgtatgagttatcatagaaatatttacctgtgcttatatattaatttattatatgaattatgcaaacaaggttttttcaaaatgtaggcgagcatgaataaaaaattataataaatcagaagttttcttagtagttgttatc

SEQ ID NO: 16796 - DNA, 2229 bp, DROSOPHILA
ggcgcacgtgttgcggacttcgtttgtttatgttttaattttgagcaaaaatcgtccctcaagatgttcgtaaacgaagttaacgatgtgaagatctacaacctgagcgccggcaagtcggtgccagattggctgacggatcggcgaaagcggtcacagctcatgaaaaaagtggactcccggagacagatcgagctcatccaggacttcgatatgcccggcgtctgcaccagcatccgcatgagtcccgaccaacagtacatcctggccaccggcacttacaagccgcgcgtcaagtgcttcgaggtgtccaacctgtctatcaaattcgagcgctgcttcgacgccgaggtgaccacctttgaggtgattagcgacgactacagcaagatggtgttcctgcaatgcgatcgctatgtggagatccatgcggcccacgggcggcactacagactaaggataccgcgctttggacgcgacatgaagtaccacaagcccagctgcgacatgttcatcgtgggagtgggcagggacattttccgactcaatttggagcgcggtcagttcctgcaaccctttgaaacggatggcagctgcctgaacgcctgtgaagtgaatccagagcaccatcttctggtagccggtaccaaagaaggcaccgtagaagcctgggatccacgtaccaagcaacgatgttcaactttggatgtagccatgaagttgccgggcgtcaaggagtttccatcggtcacggccctcaaattccggaacggcttgcacatgggagtgggaactgcttcgggacacgtgctgatctacgacattcgcgccaagcaaccgttgctggtgaagaatcatctgaatcgactgcccatcaagcgtctggcctttaatccggctcagaatgccgtctatagtttggacgaggctacactgaagctgtgggacgagcagacaggcaagcagatcgcctacgttgagtcgacttcgtcattcaacgatttttgcaccattcccgacacgggcatgttcttcgtagcccaggaggatgttaagatgatgacctattatgtgcctgcaatgggtccagcaccccgatggtgctcgttcttggataacctcaccgaggagatcgaatcggaggtcgtggagaatgtgtacgatgactatcagttcgtcacagcgaaggagctggctgaattgggaatggagcatctcgttggcagcaatcttcttaagggttatatgcacggatactttatggacgcaagattgtacaacaaagccaaggcagttgtggaacccttcgccttcgaccgcttccgcaaagataagatccgccaagaaatcgaaagtgagcgcaagtcccgcctgcaaatcgaatccaagctgcccaaagtcaacaaagagttggctctcaagattatggacgagcaagccaatccttccaacagtgccaagcagcgaaatgtgcccagcctgctggaggactcgcgtttcaaggccatgtttgagaatgccgactttgaagttaacaagtctgccgaggagtatcgtctgctggctcctgttctgaaccgtctggataaatccaaggccaaggaactcaagaagcgcgtggaggtggctcatgtggcggagttgcacgcggacgaggcacagcagcgcgaggaaagcgataatgacgaggacctatttggcttcgagaagagcgatggcgaaacgaaggatgacagcggagatgaggcctcatctgacgatgatgaccgaagggagtatgtcaaggaaatgaagcaggcgtacaaacaggtgaagcgacaacgtgaggaagaggaggagctagaagatgacgagcagcagccggatgaaatttcggataccgcaaaaagaccgcagacgaatggacacagccaacaacccaccaccaatggcaaccgtttcaccatgacccccttggatcaacatcaaggcagcagtctactgcagcagcgcatcaaaaaagcgagcttgcaggatcgcgtaagggtcatgtcccagctggagggccaggtcaccaatgtgggtcgctccctgggcaatcgtcagatgacattcgaagtgaacaagcagaagaagtcacagttccatgccaagaagcgcgaggcggagatgaaaaagcatcgcgaggagcgaaggagcattgtcagacccattaagtcgctgagactaaagaaagttaattttaagtag

SEQ ID NO: 16797 - protein, 721 aa, DROSOPHILA
MFVNEVNDVKIYNLSAGKSVPDWLTDRRKRSQLMKKVDSRRQIELIQDFDMPGVCTSIRMSPDQQYILATGTYKPRVKCFEVSNLSIKFERCFDAEVTTFEVISDDYSKMVFLQCDRYVEIHAAHGRHYRLRIPRFGRDMKYHKPSCDMFIVGVGRDIFRLNLERGQFLQPFETDGSCLNACEVNPEHHLLVAGTKEGTVEAWDPRTKQRCSTLDVAMKLPGVKEFPSVTALKFRNGLHMGVGTASGHVLIYDIRAKQPLLVKNHLNRLPIKRLAFNPAQNAVYSLDEATLKLWDEQTGKQIAYVESTSSFNDFCTIPDTGMFFVAQEDVKMMTYYVPAMGPAPRWCSFLDNLTEEIESEVVENVYDDYQFVTAKELAELGMEHLVGSNLLKGYMHGYFMDARLYNKAKAVVEPFAFDRFRKDKIRQEIESERKSRLQIESKLPKVNKELALKIMDEQANPSNSAKQRNVPSLLEDSRFKAMFENADFEVNKSAEEYRLLAPVLNRLDKSKAKELKKRVEVAHVAELHADEAQQREESDNDEDLFGFEKSDGETKDDSGDEASSDDDDRREYVKEMKQAYKQVKRQREEEEELEDDEQQPDEISDTAKRPQTNGHSQQPTTNGNRFTMTPLDQHQGSSLLQQRIKKASLQDRVRVMSQLEGQVTNVGRSLGNRQMTFEVNKQKKSQFHAKKREAEMKKHREERRSIVRPIKSLRLKKVNFK

SEQ ID NO: 16798 - DNA, 4497 bp, DROSOPHILA
tggcgtgttttgttgccaaatagcttggttgataaggaggcattatcacccagcaataacaaaaaaagtccaagccagaaagggagtctggtcatggtaatggtttcggctctgggttcttggcccagtgcttccctaattggcgtagtccatctaattggatttgctggtcataatggcgctatattgcaacacagcaggtgggtggttgggtggcaggcaggctggctggctagtggtgtgttttgtgtttgttattggattttctccaggagagagctctctcttctttctcccacctgcttgtgcgtcagagaataacaaaaacacatagccacacacatttgttggtatacacacattggcttttctatgctccaagaattatgcaaattggtgtccggaacagctgccgctcggctgctccacatacaagtcattgctacttacatggtccgaggagtcggcggcggagttgcgcttattggctgcgtcagatccggagatggccgtgtcctccagtggctcatcctcgcccttcctgcgtcgcacttcggccattattcgatgttcgccagatctattcacaatgtattgattcctattgattccgcttgagcagttctcgtccgtgttccgctctccgcgtttgccgtttgccgtgacccgtgctgcgtgatccgtatgtcgacttcgtccgaattaaaatgcttttctctatttctgattagcccagcatgcagtgtgcccagcttgcgcaaagtgggctggtggagcaaaagtgttggcaagtatgctcaattgctgttaggttttacaagttgacttttcggacagaaaatgtttgatgtcttttaaaagaactttctttttctgtgcaattaacggtgacttttgtcgtaatatgtaaaataaaatatattaataatactagaaaagttaatttaagtgataataagagtcacccatatcagccatccctggtagagaatatccgtagctttatacgtttcccaacacctgcaccggcggcgtcacttttctcggcttttccgtatcgcaattttgcaattttctcgccaaaaataagaaaaaggaaaacgtaaattcagaaaatggcagcagctatcaatggtgttttcccacccacattgcaggagctggtaaagaagtccaaggtgctggtcgtgggcgccggcggaatcggctgcgaggtgctcaaaaaccttgtgcttagcggctttacagacatcgaaattgtaagttttttcgaaaaaagtattccatattattaatttataaacgttacccagatcgatctggacacaattgatcttagcaacttgaaccgacagttcctattccatcgcgagcacgttggaaaatctaaggcacgggtggctagggaaagcgcactgagcttcaatccggacgctaagataaccgcttaccacgacagtgtaacatcgtaagttgggatagctttgcctttacatcttgctaacaacacataccttttagtactgattatggcgtcaacttctttaagaagttcgatttggtgctcagcgccttggacaacagggccgccaggaatcatgtaaatcgcatgtgcctcaatgcggatgtcccgctgatcgagagcggcaccgccggctacaatggccaggtggaactgatcaagcgtggactcacccagtgctacgagtgcactccaaaagacaaacagcgaagcttcccgggctgcaccatacgcaatacgccctccgaaccgattcactgcattgtctgggccaagcatctctttaagtgagtatacctaataattagtctaaattgcagcaaatctattgatttatttgcagtcaactgtttggtgagtccttggaagatgaggatatttctcctgatgctgctgatcccgatgcaaaagaaaaagacggcggcgatggaaatggcgagcccaaaggcgatgggaaggaaaaaggcgaagagtcaaaagaggaaaaggaggccaaggaggatactgccaacggcaacataatgcgcattaatactcgccaatgggccaaggactgcaactatgatgcgggcaagctgttcaacaagttctttaacgaggacattacctatttgttgcgtatgtcgaatttgtggaagacccgcaaggcacccgtgcccgtgcagtgggataccctgctgcccgaaggatcctccggtgatcagaaggatgtggccaagcagcatcacaaggtgtggtccatcgaggagtgcgctcaggtctttgccaattcattaaaagagttgagcgctaacttcctgaaactcgaaggcgacgatactctggcttgggacaaggacgaccagccagccatggatttcgtggcggcctgcgccaacgtgcgatcccacattttcgacattgagcgaaagtcaaggttcgagattaagtcaatggcgggaaacattattcctgctattgccaccacaaatgcgattacggcgggaatttccgtgatgcgggctttcaaagtgctggaggccaagtgggagcagtgcaaggccgtctatgcccgacttagaccaaatgcacgaaatcacttccttgtaccggacgcttctcttcctggccccaatcccaattgccatgtatgcgccagcgatccggccattactctcaagatcgatacgaagcgcatgcgtataaaggagctgcgtgacgaggtcctggttaagacgctcaacatgttgaatccggatgtgactgtgcagagcaatggctccattttaatctcctcagaggagggcgagaccgaatgcaatgacggcaagctcctaagcgaattaaacattgtggatggtgtgatcctcaagtgcgacgacttcttccagaactacgagttgagtattatcatttcccacttcgatgcggagcgcgatgaaaacttgttcgaagtcgtagcagatgcctcacagctgaagccaaaggatgaggatcagaaggaggccgtgaaagacaaggaggatgaaccgaaatcggctaagaagcgttctaccaacggggaaggagactcaaaggacgatggaccctccacttcgaagcgcagccggcccaacgaagtggttgaggaagatgacgatgactgtctggtaatcgaggaagacgaagaccaagcagatgttgttgtcgtggccacagacaagctctctgtgcagagtcccccaaaatcgggctccaagcgcaagccatgtgaagtaatcgaggatgaggatatcaccgagattttggagtcgtctgacgacgaacccgcgggaccaaccaagtgcaaacgttcccgcctggacgattcgaaccccgtggcagtcatcagtatcgattaataaaaaaaagaagtttttattcgaataagttctcaactgcgcactaaattatgctcttgattccctgtaatttcattctgatttaaaataaaaacacatttttgtggatgataaaatttttaaatttttgtgctttgaacgggtttggttttgctctactcgattaaattcaaataatccagtgcgagaaatgtaattttattaaataaaagaaatataaaataacatttaaaattagtcaaatttttaattcgataactttttaacgccaaccagtgctgcgaagcactggaagtcattgtgcctgttatcggtttctgaccagttcaatccaaaacagaaaaaggtgagctgttctacaaattttcattgtaaatctcaatgaaaatgcaaatttcagatgtccctggctagtagaatactgcaacaaggttcccgcttgtggaatggtctcagtgccgcgcgtggtttccaccttctcacccggccggcggctcctgcaattgtatcaattcaaagctcgcaacttgtggccgccacaactggaatctgtcagacgtcgggtctgctgacgcctggctccactttggtccagcaggtggcgggattcaaggtcaagggacgcctgaagcgacgctgcaaggactgctacatcgtggtgcgccaggagcgcggttatgtcatctgccccacgcatccacgccacaagcagatgtcgatgaagaagcgcgactacaagtcgtggatcctgacgcacgccacccaatccaaggagcgcggctattagacctaattaggcattaataaaagcatttctttaaatatgttcataaataaataaaagaaaaataatccaagtagtccgtgatacgtttcctaacactgtatcagctgattgtttgtttatatcgcagtcgtttcttgcctgttttgctttttactgtatccgaccggagttcagtacacctggccgaaaaagatgacgacgcacttcagcaatgtactgcggcaggcattcaaaacgttcgaccgggcaaatcacgccagcttcaatgcgaatttgcagcatctgcgtcaattgacggatgagctgacctaccgggatctgcacctccg

SEQ ID NO: 16799 - DNA, 2334 bp, DROSOPHILA
ctttatacgtttcccaacacctgcaccggcggcgtcacttttctcggcttttccgtatcgcaattttgcaattttctcgccaaaaataagaaaaaggaaaacgtaaattcagaaaatggcagcagctatcaatggtgttttcccacccacattgcaggagctggtaaagaagtccaaggtgctggtcgtgggcgccggcggaatcggctgcgaggtgctcaaaaaccttgtgcttagcggctttacagacatcgaaattatcgatctggacacaattgatcttagcaacttgaaccgacagttcctattccatcgcgagcacgttggaaaatctaaggcacgggtggctagggaaagcgcactgagcttcaatccggacgctaagataaccgcttaccacgacagtgtaacatctactgattatggcgtcaacttctttaagaagttcgatttggtgctcagcgccttggacaacagggccgccaggaatcatgtaaatcgcatgtgcctcaatgcggatgtcccgctgatcgagagcggcaccgccggctacaatggccaggtggaactgatcaagcgtggactcacccagtgctacgagtgcactccaaaagacaaacagcgaagcttcccgggctgcaccatacgcaatacgccctccgaaccgattcactgcattgtctgggccaagcatctctttaatcaactgtttggtgagtccttggaagatgaggatatttctcctgatgctgctgatcccgatgcaaaagaaaaagacggcggcgatggaaatggcgagcccaaaggcgatgggaaggaaaaaggcgaagagtcaaaagaggaaaaggaggccaaggaggatactgccaacggcaacataatgcgcattaatactcgccaatgggccaaggactgcaactatgatgcgggcaagctgttcaacaagttctttaacgaggacattacctatttgttgcgtatgtcgaatttgtggaagacccgcaaggcacccgtgcccgtgcagtgggataccctgctgcccgaaggatcctccggtgatcagaaggatgtggccaagcagcatcacaaggtgtggtccatcgaggagtgcgctcaggtctttgccaattcattaaaagagttgagcgctaacttcctgaaactcgaaggcgacgatactctggcttgggacaaggacgaccagccagccatggatttcgtggcggcctgcgccaacgtgcgatcccacattttcgacattgagcgaaagtcaaggttcgagattaagtcaatggcgggaaacattattcctgctattgccaccacaaatgcgattacggcgggaatttccgtgatgcgggctttcaaagtgctggaggccaagtgggagcagtgcaaggccgtctatgcccgacttagaccaaatgcacgaaatcacttccttgtaccggacgcttctcttcctggccccaatcccaattgccatgtatgcgccagcgatccggccattactctcaagatcgatacgaagcgcatgcgtataaaggagctgcgtgacgaggtcctggttaagacgctcaacatgttgaatccggatgtgactgtgcagagcaatggctccattttaatctcctcagaggagggcgagaccgaatgcaatgacggcaagctcctaagcgaattaaacattgtggatggtgtgatcctcaagtgcgacgacttcttccagaactacgagttgagtattatcatttcccacttcgatgcggagcgcgatgaaaacttgttcgaagtcgtagcagatgcctcacagctgaagccaaaggatgaggatcagaaggaggccgtgaaagacaaggaggatgaaccgaaatcggctaagaagcgttctaccaacggggaaggagactcaaaggacgatggaccctccacttcgaagcgcagccggcccaacgaagtggttgaggaagatgacgatgactgtctggtaatcgaggaagacgaagaccaagcagatgttgttgtcgtggccacagacaagctctctgtgcagagtcccccaaaatcgggctccaagcgcaagccatgtgaagtaatcgaggatgaggatatcaccgagattttggagtcgtctgacgacgaacccgcgggaccaaccaagtgcaaacgttcccgcctggacgattcgaaccccgtggcagtcatcagtatcgattaataaaaaaaagaagtttttattcgaataagttctcaactgcgcactaaattatgctcttgattccctgtaatttcattctgatttaaaataaaaacacatttttgtggatgataaaa

SEQ ID NO: 16800 - protein, 700 aa, DROSOPHILA
MAAAINGVFPPTLQELVKKSKVLVVGAGGIGCEVLKNLVLSGFTDIEIIDLDTIDLSNLNRQFLFHREHVGKSKARVARESALSFNPDAKITAYHDSVTSTDYGVNFFKKFDLVLSALDNRAARNHVNRMCLNADVPLIESGTAGYNGQVELIKRGLTQCYECTPKDKQRSFPGCTIRNTPSEPIHCIVWAKHLFNQLFGESLEDEDISPDAADPDAKEKDGGDGNGEPKGDGKEKGEESKEEKEAKEDTANGNIMRINTRQWAKDCNYDAGKLFNKFFNEDITYLLRMSNLWKTRKAPVPVQWDTLLPEGSSGDQKDVAKQHHKVWSIEECAQVFANSLKELSANFLKLEGDDTLAWDKDDQPAMDFVAACANVRSHIFDIERKSRFEIKSMAGNIIPAIATTNAITAGISVMRAFKVLEAKWEQCKAVYARLRPNARNHFLVPDASLPGPNPNCHVCASDPAITLKIDTKRMRIKELRDEVLVKTLNMLNPDVTVQSNGSILISSEEGETECNDGKLLSELNIVDGVILKCDDFFQNYELSIIISHFDAERDENLFEVVADASQLKPKDEDQKEAVKDKEDEPKSAKKRSTNGEGDSKDDGPSTSKRSRPNEVVEEDDDDCLVIEEDEDQADVVVVATDKLSVQSPPKSGSKRKPCEVIEDEDITEILESSDDEPAGPTKCKRSRLDDSNPVAVISID

SEQ ID NO: 16801 - DNA, 2717 bp, DROSOPHILA
gctctgtacaagtgaataaaaggcaaaaggtaaataacaactttgtgaaaaactttaagggtcgataagtatttggaacaccaaattacatcaacttttctaggtatctacgttcagtcggacggaaagacggacatggccagatcactggcaagtgatcttaagaaagattaatacatatacttaatgtctgatatctatttcatatgttaaatcaaatctcgaataccctttaataccacaaataacgattaaaataatatagacattaacttctaatgtatccggctttaaaaggatcacttttaagagtgattaaaaaatcataagtgtagtgttggattcaaccaccatttcttcacttaactcaaaacaacaatggacatcctcacctgtgtataattcgactcggaaatcagaggagagccgcgtctggacctggacgaagtgctggaagcagagaacggcccaggccacgaaggccaaggcagccaggaacaagaaacttatgcattcgaacatgattcccgaaattttgttgtgtgctgataacgtgtgtagttataaaaacagctttcgaacaagtcgggcctcgtgtggaaaataaagaaatatcggacactaaaatcaaagcgaataagattgtaaaaggactctgtttctttcggtttctttttaatttcttgaaatcttaaaaaagctattagaatttcaacttatttattttaaagaaatttctttttttttttgatgttttaagatatttgatttgaaacaattttattccaaattaattttcgactgtttggtacaacaatgcatatcaattacttaaatttatttatttaattttgaattcaatattgtcttcggtatttgtacgacattgtacgttattcatcccgacttgcggctggtcacactgcgctaaacaaagtacgaaacgtgatttttcgtttcaataatttttaaagtaaataagcaaccttgtccaaataaaatggagatgatggtatgtagtggctaaaagaaattaaccgattctgattaatggacttgttagcatggagcgtcgctgctgtcgcggccagcggaggaatttggcaacgacaccctggtggaggaaatgtgggccgcaaaagctctggaacacgccgaggtgcactttaatgtgagtacactttgaacgatgttaaggaatggtagttgacactgcttcatcgtattcccggcagctcatcaccagcgtccatccctcccagctgaagctcacgccctacgacgaccagatatacgccactttccggcaggattttcccgatcttcacgttggccggcttaccgatgatattctcaaatccgccacggcgaagctcaagtggcgccagttcgccgagaagtttaacaagttggacgattactcgtatggcaccctgatgcgcgccgatgccagcagggaattctccccggacaactctatcttcgtgtttcgcgtccagtttctggccatcgagattgcccggaatcgggagggactcaacgatgaggcttacgagaagcacaagcccgccagaaaggtacccgaagaggaacagtaatccctcgctctagcttagattaagttgtaaagactggatgcatatttagctgcagttcgtctatctactttagtaaacaatcaaattatttttatacaaaaaataaaaatataacgaccgcctttaaattgttccctacacgttgccatttcttgactttgtattctgctttctgccaatctgtgggatgagatccacatctttaataaaaattagattaacatttgatcaaagttgtgttgtaataatctaatgtatacatctcaaagttctgatgcaaacattctgtttaaaaacatattcgcttttattgggaaatcgattccattttatctgtgaacaacaataaacccatggttttatgttagaatattgtatcctaaactatatattgtatatattaaatatataattaatgggatttgcctagttgctacatgtattgcccgcacttggtccatcttcagtcttgcttttgggcagtctagcgaatctgcttgcgccctgttcttctcaattccgcctacagtccactggtgttgctggtcatcagtatgaacggaataagagcatccatctgcatctgccccaccaagttggcgaagaacagctcctccatggcctctgcgtccaggctgctgagcggaagaaggcgagccaccagaacattaaagcgctcctcgccgccgccgatgccaccctgccttctcaaacttgacagagcgtagagttggactctgcggacgtagcctcgcaacgaccgctccttgcgctgctgcaagagcgttggattgaagagcaagatcagacgcagcaagccaaactccatatcagtaacatccagtgactggagctcctggacaaagtcgtgcagggtcctggtgagatttgccatcttcgagatcttcaacggttcgatcttatcgatatccgctagctggcgagtgctttgaataaactgcccgataatggtgggcaccgaaagctgaccctgacactgcgccaaagctatagccattaatgctggccacactcctctcaggagtttcacctgtgtatgggcttccaattgttcgaaaactggaacctttcgaagggtatggatggtgagaaaaatga

SEQ ID NO: 16802 - DNA, 602 bp, DROSOPHILA
atggagatgatgcatggagcgtcgctgctgtcgcggccagcggaggaatttggcaacgacaccctggtggaggaaatgtgggccgcaaaagctctggaacacgccgaggtgcactttaatctcatcaccagcgtccatccctcccagctgaagctcacgccctacgacgaccagatatacgccactttccggcaggattttcccgatcttcacgttggccggcttaccgatgatattctcaaatccgccacggcgaagctcaagtggcgccagttcgccgagaagtttaacaagttggacgattactcgtatggcaccctgatgcgcgccgatgccagcagggaattctccccggacaactctatcttcgtgtttcgcgtccagtttctggccatcgagattgcccggaatcgggagggactcaacgatgaggcttacgagaagcacaagcccgccagaaaggtacccgaagaggaacagtaatccctcgctctagcttagattaagttgtaaagactggatgcatatttagctgcagttcgtctatctactttagtaaacaatcaaattatttttatacaaaaaataaaaatataacgacc

SEQ ID NO: 16803 - protein, 160 aa, DROSOPHILA
MEMMHGASLLSRPAEEFGNDTLVEEMWAAKALEHAEVHFNLITSVHPSQLKLTPYDDQIYATFRQDFPDLHVGRLTDDILKSATAKLKWRQFAEKFNKLDDYSYGTLMRADASREFSPDNSIFVFRVQFLAIEIARNREGLNDEAYEKHKPARKVPEEEQ

SEQ ID NO: 16804 - DNA, 3457 bp, DROSOPHILA
atatgtaattatgtatgtaatatgtaaatatgtatgtaatattaaaaaacggatccagaaaattaaccaaaactcacaatttgcagacgaacaaggtggtggaaaagcctttggtatcaaccggccaatccatcattgcgatcaaggccaccaaggaaggtgtgcggaaaatccttgtgctgggctgcaaaggaaactttgtccaaatgcatgatgcgggcaacggattgctgctacgtcacgtatttattgcagagggtttaaatatctacagtctgcttctagatgaaggacacatttattgcggaacgcagaaaaacgagttatatcaattggagtttgttgtaagtggttagaatatgactttcagttggccgaacattgaatcctgctgttttccgttttagtctggaaacttggtcaccaagttcagctgtggaaatggcgctgttgctgttgcggcctacggtgagcgttatttgctagtcggctgctacgacggctatatttacgtcctgaacaagattaccggaactcaaactggtcgtttcgctggcgctggtcgcatggttttagccctttcggttgtaggcgataaggtaagttattgtataatatttccaaagtcggtattcaaatgttttactccaatcttatagatcgtcacatcttcgaaagataactcgctggcgattctggaggtgccccccgcattggtaaatggctattaagacgcgtatcatcattgatataaatctgctttaatttaatcatttttacacacagacttgtttgcataatacaatttaatggtcatagtccttgattgcggatttataattcgttctctgtatttacaattgaatattacattttttgcatttttgcaattgatctacttgaagaatatttcttcgccatgaacaaagtataaacgaataaaaagagaacatccagtaaaattatgatacgtaaaattatatagttatttgatttgtctttaaggaatttgtggtgccctcactggtcgcacgttggtctgcatttgatgcagtttctggttgagcttgtgtgtatggtcacgcagataggcgataaggtcggcctgcttctccagaagctcttctgtgtcgcctcctggttgcatgaggcccagggaaccgccggcgcggtccgcaccacgcaaaacatccggagccagcttggcgctgttgaacttacgcaccttgtctgaaatgggtaacgaatttttagccatgtctatgacaacttttatacctgaaattacttggttcttaatcaaaaatctttcgctttggaaccataagaaagaacgaacttaattagtggctgtactgaatcacttcaattttaaatacctggattatttaagcggctctgactcattttttgcgtattacaattgcttgcaagtcacttaatcagtttaaaaaaaatacctagccatcccgactactatattatgtcattatataaactatttgaataaaatgttgcccatcgtcatttcaatatatatacacacagatatattaaaaaaatgatgatagctcgatctgtcataaaataaaataaaaataaaagtcataccatgacactaagtagattccctcactatcgctgactagatactatgttacttcattaccaatatataagctgtgggaaacggccagcaccagattctcggccacggtgaaggcggtcacatagctgaccggcgacagccacccggcggcgcaatgttcccaaaagttctccgcatagaagtggtggattagggcctggacagcaagcagcatggagttccacagggataccagctgaaggggaatccccttctgcatgttagtctcgcggtgaaagtcgtgatagccctgcatgcgtagattgtcgtgttgcttctttacgaagtgatcgaagagctgtaaaaaccgttgacattgaggcaggtcgggattgacagactgctgattggtatatttacatatgtgatgacccagaaggtggcccgtaggtagagcattataaagtatgcatcgcagcgccgatcggttggaaacgaggctgcaagtacgatccccacaatggagattgcagtggagataaccagatgaaggctacgggtggacagagaatggattaaattatgtgcattatcggtcgtttgaaagctccatggatgattcactgccgccggctgaggtctctcccccgtacaccgcataaaatctcacctaaatgcgggcactgtatttagcttgtagcttccattgtcgttggagaagaggacggggtccaggagctgatccgtgtcgtggatgtgcgctggggacacgcccggttggacagcggcgcctccagttgctggttgctccatttgctctgctctagaatgcgtagttttcgaactattgctgctttgtttatttgtcggcaggaaaacaacacttattttccttggatgtggcagcactgccaaaatattgcttttttcagggtggcagctctgtgatgaccatgaaaaacaagacaaccctaaaatgtaaacaataaacttactgttagaatttgaatatctaatttatttatttaagccattcttacttttaaatcattttgatgtattttatacatcactctccctcactcaaagagtgtgcttttatatttgcttgttgtcaacactaaattataatttaggtagttttcaatatttcttaatttaaaatattaaacatttatttaaatcctcattttcgtttaattattttaaaacttagccttcggctacttaagttttattaactattaaaggcttcattcagcgcgctttggatgttttaaattttgaactttggtcacacttgaataaaaaataaatttaaaccccgcatttgatttgcaattggatatttaactatttgtcgggcagaataaatcgggttgcaagatgaccacgcctgtgccccgccgcaccaaggacatgatggcactgggactggactccgactccgaggacgactttaacacgccataccgaccacgacaagcggcggcgggagaacgaaaacagcagccggtggcgtctttccaagtccaaacgaggggcaaggagaacgaaccgcatcccctgcccataaatatgctgtaagaactgggacagcaatgtccagtatcgcatgacatctcctgttctccatacataagtcctcctgagtctgcaaggatctaattttccatgaattctttcaggaatcctagatcttttctttccaaattggtctgtccatcgaaactaacctgtatcttctaggcttagtatataccctaaaagttaatctatattaacccacaagtcgagggatttttgttacaagatcacctagaaatgttcattacttctacatacaacgtttttatcgattctagacct

SEQ ID NO: 16805 - DNA, 839 bp, DROSOPHILA
cgacaaataaacaaagcagcaatagttcgaaaactacgcattctagagcagagcaaatggagcaaccagcaactggaggcgccgctgtccaaccgggcgtgtccccagcgcacatccacgacacggatcagctcctggaccccgtcctcttctccaacgacaatggaagctacaagctaaatacagtgcccgcatttagccttcatctggttatctccactgcaatctccattgtggggatcgtacttgcagcctcgtttccaaccgatcggcgctgcgatgcatactttataatgctctacctacgggccaccttctgggtcatcacatatctcttcgatcacttcgtaaagaagcaacacgacaatctacgcatgcagggctatcacgactttcaccgcgagactaacatgcagaaggggattccccttcagctggtatccctgtggaactccatgctgcttgctgtccaggccctaatccaccacttctatgcggagaacttttgggaacattgcgccgccgggtggctgtcgccggtcagctatgtgaccgccttcaccgtggccgagaatctggtgctggccgtttcccacagcttatatattgacaaggtgcgtaagttcaacagcgccaagctggctccggatgttttgcgtggtgcggaccgcgccggcggttccctgggcctcatgcaaccaggaggcgacacagaagagcttctggagaagcaggccgaccttatcgcctatctgcgtgaccatacacacaagctcaaccagaaactgcatcaaatgcagaccaacgtgcgaccagtgagggcaccacaaattccttaa

SEQ ID NO: 16806 - protein, 260 aa, DROSOPHILA
MEQPATGGAAVQPGVSPAHIHDTDQLLDPVLFSNDNGSYKLNTVPAFSLHLVISTAISIVGIVLAASFPTDRRCDAYFIMLYLRATFWVITYLFDHFVKKQHDNLRMQGYHDFHRETNMQKGIPLQLVSLWNSMLLAVQALIHHFYAENFWEHCAAGWLSPVSYVTAFTVAENLVLAVSHSLYIDKVRKFNSAKLAPDVLRGADRAGGSLGLMQPGGDTEELLEKQADLIAYLRDHTHKLNQKLHQMQTNVRPVRAPQIP

SEQ ID NO: 16807 - DNA, 8154 bp, DROSOPHILA
agacccagcagagatccggtgtcctctccaccacgggccattcgacgaacttcatcttggccgtccttttgcggagccacaacgatccggaattttggattatgcggggtacagctctggtttccgctgtgctcgaaaatatttgctaggtctagatacaaattggaacttattgttttactttttatgctgcatacttaaagccgtctttatttcgtttcatgttaattctcggatactttctgctaaggtgtacaatatatattttatgtgtgtgtatgtgggtgtgtgtgttcggggtttattatataatttaatttgtggattgaagctctaattgcgagctgtattttgaaaatccctagagaaggcactgaaatatttacatgcctgcttgagaaatcgtttatcgcataaatagttgcgatttgcgtatcaaaagcgctattacacataggaataatttatttttgaaagcaatcaatagctcaaaattcgagcctactacttatggcaaaatttgacaaagtcttcattaatatctgacgagttgttcttaagcctacgtgtatatagttatgtagacgtctgtactgttcgtatatgcatcatacaacattgcacttttgaagtctgttgatcaaattcactttgaaattctagaccttgcacactcacacacacacacacacacgcagagcgaaaagaacacacacaggcactagcatacgtatactatgtacaattccgttcgggatcagctctagtttaagttctttaaactttatttgttttatgtttcggtttaatttagtttaagtttcgatttggtcacagtctatgtcgtatatcaatcaacaggtggacagacagataacagataaggcagatctaactaatggactaacgataaacatacactgattggattgataaaggaatgtggtggctgcagtttcatttttttttttctcatttctagttattttgttcgccttttctaagtactaatactgccgttctctactccaatttctgtggaaggtatggattacgaattggatttggaaacgtggaaatgtggcttaggaactaaaggttacgggttacggattacgggttatgggtaaatgtataggtaataggtataggtttggtctttttcgttagttaaccgcatacgtggaatgctaaattagttagaaatcttatgcactaattattgctggacattgtctctcctcaattttaagtacttagtcactaaatatacaaattagctaaacaacgcaaaaaaaaaaatgacgaaaaaaaagtacgtaaattgaattacggataaactttcgtataagacgttccgcaaaaccgttgattaggaagcacaattcggtgggcggccatcgttgcctacaattttttactgtccatatcgatcctgagatcgggcagcgatccgcgtgtctgcagcaggctccgcttctccggatccttaaccttcttgggcttaggtcggttcgccttcgtgtagcgattgatcacaccgtcagcctcgtccatcaggcgcaggatgagcgcctggtcggaggagtccagcggcgctatcgagatgtcacgaacggctcggaacttaccgcagttgttcagatgctcgttctccaaccggaaaaagttccacacaaagcgactgcaagcgagtgctcttcgtaaataatttgaacatattttgatttaggaagctatactcaccggaatacctccagaatgcctgtgacggaggtcattatgtctgagctaacgattttcatctcggtgaggtagaaagacagcgcccaaataaagcgcagcgccagatcctccaaaatggcaaagtagtaaaaaccctgcaatttaagaatatatagttgattccaatttatacttattcgctgttattcaactcaccgtcgatgagtagacaacctcctcgcgcaggaaagtattctcgccggcgttcttgtcgaacagaccccaatccattttgatatcccacgtgtaggcgtagcaagaggacacaatcgaggcgataatccacaaccaggtatagggattatcgaatgtgctggcatagttcgctgaaggaacagatccattaagaaatgaatatacttctgaaggagatgcaaaacttacgactgtgaaagctcttgagcgtggcgaagatcaccaccatgaaggttgtggagtatttgccagcattcaccaaatgaggaaatgcctcccgcgagtcgcgatatcgacgcaggcattgtgcaaatcgaaaccaggcgggcaggcaattaacaatcggccggatgataaagtccttctccatgcaaatggaggcatccctcgcctccgtccagttgccatttgtgaaatagaagcatatgagatactcgaaatctaggatagccgtggccagcgaattgagttgatcgccgagccagaaatccgcgaagcccacgtgaaagaacggtgccgacacacatcgtcccgtaatccgccacagccagaatcgtgcgtcgtgatagagcacatgaaacggatttgccaaaaacagcaccataatcagcgtaagcgtaagtggattgatgaaagccggaatggccaagctagcgctgtacagaaagctcagcatgctgagtgtccagatcacgccgaagatcgccgccagttccatgagatgctgctcggatagatgatttcgcggatccagctcgaagatcaggacatgattaacgccagacgaccgccagccgtagatgttcactccgatgaggaagatgaactcgatgattagcaggggaccgcggtagagtcggaacgtaaccttgaggttctcgccgctaatctcgtggaagatggccgacaccacgaccacaatgaccagcactataaagctgccggagaagaggccaaccttgaacgtggtccatggactctgctgttcgcccagcggtggtactcgcaatctcttcatcgctcgctgccgatcgccgccttccagttcgccggtgaccgtcgtctccgtctcattgataatgttgtcgatgtccttgttggtgaagaagtgtgaggcctccacatactcctgcctccatttggcaccggtgtccacacgcaaaagctgtcacccaaaaaagagatttaaacttttagaacagactatatagactatatatctaacccattattatcttagtattatgcacattattcactcactcacattgtttatggctacccccaaattctagcttgtgcaatccgcatacattcattttcggtgataacagtgactatttttaagcgactttttccccaaaaaccctactataaattcgtattatttatttctcacacgaaatgtgtttttttgttcgtgttctgcgccgcagactacaggcaatctccaaagatcttgactaggtcaaggctgtgcaatgatgtctctgcggttgccgtaaatcagacttactttatcgtgcttcttgagtattttacgaaagccggtgtgattcagattctgatagttctgcaggaggatcagactcaggtagaactcactgaaggccaacttcagctcgcgcgccttgcgatccggcaaggcggcatgtcgtttgtgtcccttggacttcttggcacttcgctccgactcctcgatggaggtcttcagttcggcattcagggtggcaaactttcgcgtggcctccgccagcttctccgagtagaacgtattgatcttctttagctccttgtcgcagtagtgaaagaagttctcatcgaaattggcgaagtgccgcttcagcacgtcgtcctcgacgctctccaccgatggcgcctcctccacggccaaatacagcatggccttcatttcctgtggcacaaaaattgtgctatcagttggtttcttcgtttacttgggcgaattcccatgttgaaccaaaaactcacctcatagttaatgtattgtttgcgccactcgggcgttatgtgcgccgacaggtgctcggcgaatttcatggctagcgctttttcgacctggctattctagggctattcagtctagtccagatcggatccgttccgttgatcggcgctgcagtgaagcgcgtctgaaacgatggcattgaagagttgttaagggcacttccgtataacgtatgcgtacttaaagctagccaagtgcatttaaattatgcttgtactacgtacacttcaagattaggaaagatgtattttggagtgagtgattcaccgcccaaatagagctgttttcgcgacggatgagtaatgtggtggggttgagactcaagtcagtacatatgtagaaccaatcgcccagctttctccgccgctaatttaacggacgagcgagcgaactaatggataatggctcaaatcagtgcagcagctaatcgggcgtattaactaaagcacgttatatgcgactaccggctatcgtaaattgaacggtgggtgggttggacggttgtgtgttcttcacaactgataagcacccgagccccgaaaaaatatgtgtacatataagcaataatatatataaacaattattggggtctgtgccactcgactctttacagaatacacatatgtatatgattgttgatatacatatgtatgtacatagctatatcattaacgtggcccgcataacgagttaagcaaattggaaaattttgtcgccagttcaaacagcaaacgtataagatacagatagagatctggatgggacactgttttaatcaattgcacaaatatttgcgtcgccaactgttgctgtcgtatttttcttgccatttaagcctctcatataacggctgcccttcctcgatttctggccggaacttatgttcacataataccctacacagcaaaaaaaaaataattcttaaaattatatctcatcttgataataagtacaactttgttatctaaatctaattatcaacattatgcagatattcaagctttataaatatagcctcttttgtttccgtttaattttgatatttatttataattatcaattgaattagctgctcagtagatattaaattatcgtaaatagtcattgttcatgtcgaaaaataattaaggcacttaaatttatcactaagaagtctaaaatatgagtatcaatggcccgatccctaggtgagttatggaaacaagttgattgattaaaccgtttaagttcttgttgtaaatctcaacaaaatgctgattaaatgggaattacaacatttcttatcagctatgtatatatctaattgaatttaatgcggttttgatgcactgatacgttgatacggatacgctgataatgttttcccctcacttagttgattatcattcccagctgagcaaccgatggtcaatactacctgggcgataattgatgagggggagggagggcgtggcactggctggcggtcaattaacgtcaacagtggagtctaaaattagatgggctcgctgattgattggccatctagcttatggccaacaatggtcataatcgtaatggatggtaggagctgcgctctgatcgatcgacatagccggtgggtgcatcgctgaagctatccccgatcatctcagggctgcgaccttatcgccactatcgccggtggttacagatttctcttctccggtttaattggcactgataacgagccgactggcctgcgactgggcttataaaacatgtgctagtgccgttttcaaacaacagctgacacacaaaagccccataatcgctgagacatcgccggaacggaacacatcgacgacgacgacgacacacgtagacgcaaatatttgatcaataaaacaagagcggagggtttgttcaggttttggcggcactgcaaatacccttacccgcccgcggttattgttcgacatattgttctagatattatgtgcaatccacgatgggattatctcgcaaaacaaacgtgtttgtgtgtacactatcctttctatgacgagatataaattcaaattagctacgattttcagttgttctatctaccagatgatattcacattgccaagattgcaaatagcaaaaacaaagaattaactaaagaaacaaagaactatatagactgatgatcactttttacttgagataatagatgggggaagcttgtatttatctttgtattgaagaacaaacaaaagaaactcgaaacgaatatatcacttctctttaatgtacacatcttatggaatacaaaacatgaaaccaagcttaaataaaacacttttgtccgctgttcatttatattaaattgttttcactgtttattttaggatctttagaaccgaaactctcggggatcgaattttaacttaaacaatacacttcgcactttttgattgtaaaatagacaagtcgaagttaagttaattggcgtagaacgaaaataaaaaacttttgcagttcggtgatagatcatagcttaaaggtggcattgcaaacctcttctgatagcgaaaatgcccagttgggaaagtgtagtcaaatcgaagggaaacagcgttttgaagctgggatatttgtgcatatgtcggcacgactgaacccaactaaaccgaactgaatcgctggatgttggcttttgattttcgttgattcccgcccgcggggagggggggtgtggtcgtgagcagcgaagggggcgtggcggctgagcgtcaattcgacttgtcttgtgatttgcgcctcacaattggacaaacgaggcgcaattggaggcaaccagtccgagattatcggatgcttcgatgttttgggtgcttggatgttcaaatgtttggatgtgtttgcatgctttgtgggattttgggggggtggggtttgggaaatgggtgttcaattacataaaattacatacatacactgcagtttgcacttgcagttcgtctgcggaagggggggaatgggtctactctaacatcgcaagctgctcccactggccattacaaattgtcaacagtcgctgatttgttaagtacactgcttatcaccgaaatagcgcgcatatcactaaaaaattcagacgacgacgggcgaaatgcgaacgccaaacaacaacaaagaactgaacaaaaaagcaaagtattggtaagcacgcgcgctacgcggccaccagtgttgcacagcgctggagcagctctgttgtgcacgatcactgttatagttgcagagagtatttttcactattttgtggataaaatcaagtggtatgaaaatgtatccatgcgataatgttccgttatcttcaattgctgaaataaagtcaaataaacagtttcaattactgctaaagttaattaatgaaatgctagttaagtatgtcttaaattataaatatttagctactcatgagaattttttttgtttggcccactgtgcataacccgcgcgtgtagcccattccagtattttaccatcttgtacattagtatttacccgtcttccgctacggtcacactgccatatcgacgcaaaacaaattgcgattttcacaacacaagaaaagcaggaaaaacagcaaatatatccgcaatctagctaacacacaggtccccaaccagtcgcagtcgcgttccatgagtgcgaacctgaagaatatcaaactggcccacttcagtggttcgctcggttccggtggctttggcatctctgcgtcatccggaggagctggaaaactgcccacaaatggcacaggtggcggcaaatccgccccaacgagcaccttcctggactccgaggtgctggccacgcccggcggcgtcgttataccaataattcgcactcgggacgtgcccaaattgctgcccaccattgcagcggcactgcagcgtccggcggatgatcatttggcggccgaggatctggatgcagtgcaactggagctggaacagatgctctccaatgtggcgctgcgcacgcgcgtcctgaaagcggagtatgatagcctcgacaaggatgagaagcgccaggatcgaagaaagctcgaccgtgtgcctggatcgccaccttgtccggctagcatgctcaacggcttgctgggcatcggcagcaactcgtcgacgagt

SEQ ID NO: 16808 - DNA, 2341 bp, DROSOPHILA
ttctttgttgttgtttggcgttcgcatttcgcccgtcgtcgtctgaattttttagtgatatgcgcgctatttcggtgataagcagtgtacttaacaaatcagcgactgttgacaatttgtaatggccagtgggagcagcttgcgatgttagagtagacccattcccccccttccgcagacgaactgcaagtgcaaactgcagtacgcgcttcactgcagcgccgatcaacggaacggatccgatctggactagactgaatagccctagaatagccaggtcgaaaaagcgctagccatgaaattcgccgagcacctgtcggcgcacataacgcccgagtggcgcaaacaatacattaactatgaggaaatgaaggccatgctgtatttggccgtggaggaggcgccatcggtggagagcgtcgaggacgacgtgctgaagcggcacttcgccaatttcgatgagaacttctttcactactgcgacaaggagctaaagaagatcaatacgttctactcggagaagctggcggaggccacgcgaaagtttgccaccctgaatgccgaactgaagacctccatcgaggagtcggagcgaagtgccaagaagtccaagggacacaaacgacatgccgccttgccggatcgcaaggcgcgcgagctgaagttggccttcagtgagttctacctgagtctgatcctcctgcagaactatcagaatctgaatcacaccggctttcgtaaaatactcaagaagcacgataaacttttgcgtgtggacaccggtgccaaatggaggcaggagtatgtggaggcctcacacttcttcaccaacaaggacatcgacaacattatcaatgagacggagacgacggtcaccggcgaactggaaggcggcgatcggcagcgagcgatgaagagattgcgagtaccaccgctgggcgaacagcagagtccatggaccacgttcaaggttggcctcttctccggcagctttatagtgctggtcattgtggtcgtggtgtcggccatcttccacgagattagcggcgagaacctcaaggttacgttccgactctaccgcggtcccctgctaatcatcgagttcatcttcctcatcggagtgaacatctacggctggcggtcgtctggcgttaatcatgtcctgatcttcgagctggatccgcgaaatcatctatccgagcagcatctcatggaactggcggcgatcttcggcgtgatctggacactcagcatgctgagctttctgtacagcgctagcttggccattccggctttcatcaatccacttacgcttacgctgattatggtgctgtttttggcaaatccgtttcatgtgctctatcacgacgcacgattctggctgtggcggattacgggacgatgtgtgtcggcaccgttctttcacgtgggcttcgcggatttctggctcggcgatcaactcaattcgctggccacggctatcctagatttcgagtatctcatatgcttctatttcacaaatggcaactggacggaggcgagggatgcctccatttgcatggagaaggactttatcatccggccgattgttaattgcctgcccgcctggtttcgatttgcacaatgcctgcgtcgatatcgcgactcgcgggaggcatttcctcatttggtgaatgctggcaaatactccacaaccttcatggtggtgatcttcgccacgctcaagagctttcacagtccgaactatgccagcacattcgataatccctatacctggttgtggattatcgcctcgattgtgtcctcttgctacgcctacacgtgggatatcaaaatggattggggtctgttcgacaagaacgccggcgagaatactttcctgcgcgaggaggttgtctactcatcgacgggtttttactactttgccattttggaggatctggcgctgcgctttatttgggcgctgtctttctacctcaccgagatgaaaatcgttagctcagacataatgacctccgtcacaggcattctggaggtattccgtcgctttgtgtggaactttttccggttggagaacgagcatctgaacaactgcggtaagttccgagccgttcgtgacatctcgatagcgccgctggactcctccgaccaggcgctcatcctgcgcctgatggacgaggctgacggtgtgatcaatcgctacacgaaggcgaaccgacctaagcccaagaaggttaaggatccggagaagcggagcctgctgcagacacgcggatcgctgcccgatctcaggatcgatatggacaaaattggagtagagaacggcagtattagtacttag

SEQ ID NO: 16809 - protein, 681 aa, DROSOPHILA
MKFAEHLSAHITPEWRKQYINYEEMKAMLYLAVEEAPSVESVEDDVLKRHFANFDENFFHYCDKELKKINTFYSEKLAEATRKFATLNAELKTSIEESERSAKKSKGHKRHAALPDRKARELKLAFSEFYLSLILLQNYQNLNHTGFRKILKKHDKLLRVDTGAKWRQEYVEASHFFTNKDIDNIINETETTVTGELEGGDRQRAMKRLRVPPLGEQQSPWTTFKVGLFSGSFIVLVIVVVVSAIFHEISGENLKVTFRLYRGPLLIIEFIFLIGVNIYGWRSSGVNHVLIFELDPRNHLSEQHLMELAAIFGVIWTLSMLSFLYSASLAIPAFINPLTLTLIMVLFLANPFHVLYHDARFWLWRITGRCVSAPFFHVGFADFWLGDQLNSLATAILDFEYLICFYFTNGNWTEARDASICMEKDFIIRPIVNCLPAWFRFAQCLRRYRDSREAFPHLVNAGKYSTTFMVVIFATLKSFHSPNYASTFDNPYTWLWIIASIVSSCYAYTWDIKMDWGLFDKNAGENTFLREEVVYSSTGFYYFAILEDLALRFIWALSFYLTEMKIVSSDIMTSVTGILEVFRRFVWNFFRLENEHLNNCGKFRAVRDISIAPLDSSDQALILRLMDEADGVINRYTKANRPKPKKVKDPEKRSLLQTRGSLPDLRIDMDKIGVENGSIST

SEQ ID NO: 16810 - DNA, 4274 bp, DROSOPHILA
gttctgaatagataaacaaataaccgatgatttaatcacataaaggatataaagcaaatgagcttactattgtccagcgacagtagccaaggatactccacgaagctgcgcctgctaacgccctctagctgcagtgtgtccatgaccagagtcagtgatctaccgcggtagcagcggtgcaccagctcgtcgctgattatcttttggagctcagcgtccgtgaagcgaaaacgttcccgcagagcttcgaggagcacccgcgtcttggttccagtctcccgatcctggcgataaggcacataatcgttttccgcctcgttgctacctaaagtgccactggaggtcagtctgctcggactggcgcggttttcgtactgcgagaagagtaggcgcctgctgcagtgcattgggtgcatatttaagccggcatgcagcttgagtgccgtctcaaagctgcgcagaaggcttctaatcatcccgaatttgcttaatttacagaatcaagacagaaaataaagttcttcaacttataaaacaagcggaaaacagctgatatgttgcggcgataaacagctgaccaagtgggccaactgaaagctggagtatacgacactcaaacaattatcgttatcggttttgaaaataatgaccgttattcggaacagcaatttaataaatttagcatttgttttctaggaaaatataataacttttctaggtgcaattgatttcataatatgtttaggaagtgtgctggttcatacacaataacatacacatacactttttaaatataagtgtgaaacacttccaatatttattttcaaatctactaagcattcttagacagagagtcccacaattgaaatcactcccattttatcaacgaactttttgattttattttcaaaaatactacgctccaaagctaatcggaacattaacgctaaacaaagacttgtaggattttgaacaaatcatgaaaacatctatcacaagcactactccacatcgatgtcttttgtgacgcgacccacccagtaaacgaatccggtctgcaccacggtggccatgaacttgacgttgcccttgtagcctgctggcggaatccagtcgaaggtgatgccggtcagcggcttgcccttttgcgcactcagatgggtgatggtgtcgtccttgccggagcagtccaaggtctgcgagtgcacggagtccaccacctggaactggccgacgacgcggttctggccatcgcgtgcctggatcatgaagccaaggaactcatcgccgcccagcgtcagggtcagcttttgatccgagcgcacatgggagggtccggagatgctgtacggcggcttggtcacctgcagcttggctccgtgctggggcgtcaggtcacgacaggcggcctttgggataatgaagatgggaatataaggaatctatccgtcatgtatttcgatggggcaggttcatacctttggagcaccatcggagtaggcgtggacactgatggccaggcaggccgcaagaaccaacaaacggaacatatctgtttaagggaaaattaaaaataatatcacatgagttggaaacatcgctttagtaacgattaaaatccagttggttggcttaattatgctacatcactgtgaagaacagtccacgtagtgacgaagcgcaccaagtgagtgtgcgaaatccttccattttccataaccgaatatgcttaagcagaacaagttttaatgacacaagtacttgtcaatgtttctactttcaacttctagtgctttcaagttgaatccaattacatattaaaatatatttactgccggtcattgtttaacatttttagattcgtgcatgctgcttaattgcgttaactagtttttcataaattaattaattaacatttccactcaagtgagacttttttcactggccttggccagtttgactttgcttaagttttttatttatttagttttttttttttccttttcaaagtttacacttgtatacgtgggcaggcgcaaatatattgaaaactagctccaattatgcagtttgtcaacgccaacgtttattatgcagtttgttcggtcccagttgtcgccataatgggtatatttctctgcagccttgactgttgacagtctgtgattctacaagatttgtggattaggctgcagtgttactgtctgatttgtaataaccagtattagtgccgaaaaaaaatgtcaatcaaaacattttaattatttacgggaaaccactcgaagtgaacttaacatttcaatcacgatcggctcgtaaatcttcagattcgcagaattaagaaggcgcagacaaaagctttgttcaatattgaaattggccaagatgcatgttgattaaaccaatttttaaaaaatcatcaaactggtttttcggacgtaaacgaaaactgtttaaagccaaaccagtttgcagtacatttccatagaagagtaactcttttttttaccgtgcgataaaaatcgcctagaaatgacaagtgacaattgaagacaacagcctaagtacttcctcaaatcgaattctcaggttcaaggtggattggaggcttgtggagttcgaagtaccgatctgattgatcgtcggcctcctccacttgggtcgccatggattcgaaaagaccttgtcaagaccggcccgtaagccaagtttccatttgtcttgcaatatgctaaagttcaatattggacatgttagtgtcggagccaagttttgcttctttatttctttccctctgcgacttttagccgtatatttatgtatttatgggcctttgtccaaccggttgggcgatttgtttagataaaatctcaatacatggttgtttaatgtcattacgctgagctatggccataggcctcaattagccaacatttataatggcttggaaaatattattattatcaagttggtgggacagaactgctgaagcttgaaattcgcattcataccgaaactatctatgtcatttccgaaaaggttttttttttaatgatcatattagaatatgtattctaaattaagcttagtcactttaaaacccgaaaaaaaggaagagtacaaatcctttaagtttttaaacctttacaactgtttcacaaaaaatcaactgaactttgaaaatcgtttaggccaagtaaactaattgcttaatcatttaaacctaccgatcagaaatacacacacacaagcggcagaaaagaaaaacttgaaatgagctgaaaattctaaaacaacttcctatttataccaaaaaactgatcaaaagtagtgaagtagcttttgcaaagacaactttgtaagccgagcttatactgccataccagcaagttggccaaattcgaaagctccgaaagctgagcttgcaaattgaatttttaacgcttcatttgtgaagcgacataaacagtgactaagtgtttacttagatccacaaatcaaatggcacgccaattagcaatgcgtattgattagaaggagaaacttgcaaatcagaattcgctgttgaatggaaagcatttggcttataggtcaactatctgaattggtttaaaatcgtttccggtcgtttagtcaattaaatatagttcaggttcaatattctttttgggtttcttctttagatttcaaaaactatcctaaatttaaattgttttcatatttgctgactgcactttgaaatgctctttacttttaatattataaagctactacttttaagtatcccctataacataacatacaaccacatcaagtgtcgttacacttttttccaaatgggaacacttttaaaattcaccaatctgtggttgtcaaatccaaatgtcattgtaattcgggacacttcagtatttgagtcaaaaatatgggagcagagcaatcggcattgttggcctgcactcagacgggcatccatgaggatcgcctggaaatggataactcaaagttgttctttcaattgtactttgataggatgccccagcctgtgacgggtcccgtgacagaagcgctgctccacttggtggataaagtgaatgtggctggggctaataatggtaatatccgatacctttataccaattgtccttaaaatgtgtactcttgaagctgatgaaacccaatcgatcaaggacgaatgtaatagcggggaaagcgacaccatatcggtgctcagtaatgacagtgaagtctcgacaccaagtttggatgtggaa

SEQ ID NO: 16811 - DNA, 530 bp, DROSOPHILA
tttcaagtttttcttttctgccgcttgtgtgtgtgtatttctgatcgatatgttccgtttgttggttcttgcggcctgcctggccatcagtgtccacgcctactccgatggtgctccaaaggccgcctgtcgtgacctgacgccccagcacggagccaagctgcaggtgaccaagccgccgtacagcatctccggaccctcccatgtgcgctcggatcaaaagctgaccctgacgctgggcggcgatgagttccttggcttcatgatccaggcacgcgatggccagaaccgcgtcgtcggccagttccaggtggtggactccgtgcactcgcagaccttggactgctccggcaaggacgacaccatcacccatctgagtgcgcaaaagggcaagccgctgaccggcatcaccttcgactggattccgccagcaggctacaagggcaacgtcaagttcatggccaccgtggtgcagaccggattcgtttactgggtgggtcgcgtcacaaaagacatcgatgtggagtagt

SEQ ID NO: 16812 - protein, 159 aa, DROSOPHILA
MFRLLVLAACLAISVHAYSDGAPKAACRDLTPQHGAKLQVTKPPYSISGPSHVRSDQKLTLTLGGDEFLGFMIQARDGQNRVVGQFQVVDSVHSQTLDCSGKDDTITHLSAQKGKPLTGITFDWIPPAGYKGNVKFMATVVQTGFVYWVGRVTKDIDVE

SEQ ID NO: 16813 - DNA, 3317 bp, DROSOPHILA
acgccatgccaaacgatattcacacaagtccatgatgttactaacattgatttatggtagttatcaaataatgtaaatgtaaatgtaataatgtaaaattatgtgaaaatatgcacccagtttgccaggaaacagttttcccttagcaacaaaatcgtttatatatatattttatcccatgaaaatgggtcactaaacttgcccagcacggctgcaatgtaatcaacaaggttaaggttacgaaatatgtacatatgtccatatttttatcgcattcttcgcacaaacggaaatgtaaacactgatgtacatacatatacacgatgtgtttttgatataaatgaacttgcttatatgcccatgacaagtatgatttattggctaattggccaatggttttttatggatttcacagttgttcacgtgggtcatcttagtttaatgatacagtttccaagcaaggttttactctttactgcacgcacattaatacgaaaagtcgtgtattaaaacaaattagttatcaaaatgagttgatcttcaagctaagcgatctgaaggacgccgagatgcgccagtggaaaatggattttcactttcggacccaacggaactctttcggaacccgttccggtctcactttcactgggaatgcaaatttcattccgaaccctccaatgaaagaccgctaacggaccgtaaacgggtttaaattcatgggccagggaaatcctatggatcgccgataaataaagctgatacacggattatcagtcgaagatcagtagttgcagctttttcggggaaattcaatctcggctctattagggcctccccattcacatttatatggacttttaaagaggtattaccagtgattagcatttttggatctctctaaggtagctggatgtgtcatacaaagtgatcaaataaataaattacgaaatatcagttttcgtacatcacataggcttaaaagttaatgattgatttaaagtcaactaggatggactttcttggctgattctcctctttgatggatgtcttgatggatgggtctggttaatgccatttttgaaaggcgtttgctactccccacaaattgatgcatgtttctaggtgagattggacttaccctcaagccgttctgatggcgatggttggaggtcagatccagcatggaactggcccttagcttctggttttgatccgcactggcagctggaaccggcactgctggcacttcgggagtcagggcttgaccttttgccaactccatgtcctggccatgatacggatctgggtttccacactcgctgcaggatatattctccgccgatcgcgctgatctgctagccagtggcgacaaggatgcggtggatgatcccgccgatgcggacgcagttgtgcacgtggagattgtgggcgatgtcgacgtccatgtggctgtgggtggtgttatgctggtgagcgtaactgttagttggccgattccctcgttgttgttctcgatggtgttgttgttgtagttgatgatattattgttgttgttactgctgctgctgttcgtattactcgagttttttgcattggcgtagaacacctgggatatgctgcgaaatatggtgcgatagccccttttgttctccgtatcgccggccatgatcacactgtgcaaaaaaaaactaataaaaaaaaacaaaacagatatcacacactcgaaatctgcacgattctgctctttcctaattcttcactctttcactttaaactcattggtttatggttgcgttttgttaactcttttgtttttatggcgtttttgtgttgtgtgggagggattcactgaaaagaaattgggttggttgtgggcgtcacgtttttgggtttgtacaaattaggtttttttttgcatttttagtggaacaaatcgtttataggtaagtctcgtcacagtttatttcatattcatgtacgagcaagtgtgtaggatccagtgaaagagtgtacatatattaaatgccttgtcaaagattgcactttttttgctcagtgcacttaaacgaaacgtgaaaacgtcggaagaaagccaaaagcatgagcaacgcgtccacttcttatcacttttctgcgcgggggagtgtttctggggccacacaaatcaataattttaatcgtaacaccctggaaaatatcataattacacgaggccagtggaaatggaaatggaatggcatggaatggggactagaccatggcgaccattcgtatcgaaaactgagaattgaagcacacgggagacgcgttcgggcagcggcggccaactaaatcgtttcgcagcgttaccgccttcaagcgccaccgttaccttaccgccaacgccgacgccgactgcgacgtcgactgaagcagcagcggctgttggcgtaatcgtttttcttgccgctttggctgttgcttcttttttttgcagactttgttggtctttttcggtttttgttttgtttatggggctcttctaggcgcacagtggttgtggatccattttatggctggcaaaatactgtgaaatcggaactatatcctgttacgtccatatggtccttcaggcgggataagaaaaaaccctttaatcaccatttgtggacaattcctttcattttttgtctcgttcttgatgtttttatactagttatgctatcgaacatattattgatatttatggaaattaatatcccccacatacgacatacatttcgttataaacaagttttaggtaagctattaatggttatagaaattttaatttattgatttgtcggaacatgttttgaaaacctcagaaccccagacttgacagtggaatattgattttttccagcgaccactgtagcccattatgagtgttaactttttttttttatttatttaccccgcttcgagagctttcttcgcctagtctgcatgcaaatcgaaaaacaacaatgtgcggcattttgtatagatcgaaaactcgtatccagatgccagatggagaacaatagtgacacaaattggacaacgaaacaacaacaaaaaaatgatcagaaagggaacttatcaatcacaactttcaccgaaaatagccattcggaaacaaataaggcaataatccgcggccagatgatgcaattccactgtgcgcttaaatgttttacacacttgtcgcggagtgtttatcactgcccaccgttgtgttgttgcttttattgccatggttgttttcgctgtcgcttatcacgcgctaaaatttgtgtgtgcgatgtgtgtgtgtg

SEQ ID NO: 16814 - DNA, 1317 bp, DROSOPHILA
ctgcccgaacgcgtctcccgtgtgcttcaattctcagttttcgatacgaatggtcgccatggtctagtccccattccatgccattccatttccatttccactggcctcgtgtaattatgatattttccagggtgttacgattaaaattattgatttgtgtggccccagaaacactcccccgcgcagaaaagtgataagaagtggacgcgttgctcatgcttttggctttcttccgacgttttcacgtttcgtttaagtgcactgagcaaaaaaagtgcaatctttgacaaggcatttaatatatgtacactctttcactggatcctacacacttgctcgtacatgaatatgaaataaactgtgacgagacttacctataaacgatttgttccactaaaaatgcaaaaaaaaacctaatttgtacaaacccaaaaacgtgacgcccacaaccaacccaatttcttttcagtgaatccctcccacacaacacaaaaacgccataaaaacaaaagagttaacaaaacgcaaccataaaccaatgagtttaaagtgaaagagtgaagaattaggaaagagcagaatcgtgcagatttcgagtgtgtgatatctgttttgtttttttttattagtttttttttgcacagtgtgatcatggccggcgatacggagaacaaaaggggctatcgcaccatatttcgcagcatatcccaggtgttctacgccaatgcaaaaaactcgagtaatacgaacagcagcagcagtaacaacaacaataatatcatcaactacaacaacaacaccatcgagaacaacaacgagggaatcggccaactaacagttacgctcaccagcataacaccacccacagccacatggacgtcgacatcgcccacaatctccacgtgcacaactgcgtccgcatcggcgggatcatccaccgcatccttgtcgccactggctagcagatcagcgcgatcggcggagaatatatcctgcagcgagtgtggaaacccagatccgtatcatggccaggacatggagttggcaaaaggtcaagccctgactcccgaagtgccagcagtgccggttccagctgccagtgcggatcaaaaccagaagctaagggccagttccatgctggatctgacctccaaccatcgccatcagaacggcttgagggtaagtccaatctcacctagaaacatgcatcaatttgtggggagtagcaaacgcctttcaaaaatggcattaaccagacccatccatcaagacatccatcaaagaggagaatcagccaagaaagtccatcctagttga

SEQ ID NO: 16815 - protein, 221 aa, DROSOPHILA
MAGDTENKRGYRTIFRSISQVFYANAKNSSNTNSSSSNNNNNIINYNNNTIENNNEGIGQLTVTLTSITPPTATWTSTSPTISTCTTASASAGSSTASLSPLASRSARSAENISCSECGNPDPYHGQDMELAKGQALTPEVPAVPVPAASADQNQKLRASSMLDLTSNHRHQNGLRVSPISPRNMHQFVGSSKRLSKMALTRPIHQDIHQRGESAKKVHPS

SEQ ID NO: 16816 - DNA, 4401 bp, DROSOPHILA
ctagtgtctttggcctggcgacgcccttggatgctaagaataactatcaactttctgttcaatggggaactaactaatatgtcgtatattattttaactcactgcgtccattgccagctgccactttggaacagtatctcagcagatcgaccgtgcacgccgtttcaagaatgggatcaacgtgaatgtctgccttggcttcggcgatcagagtggccacctccatctggcactgccggttgatgatctgcttctgcaggaaggccgtcttcaagcactccgccagctggccgtgctcgtcggaatccacatttgccttgcacagttcctggatctccgacttgcagaacacctgcagcagggggtttaacttgtagttgagagcctgctcctgcaggatcttgatcatctccttcgcacatggttcgtccagcgcagattggcggaacttgtcttttagacagtgaatcacctaaaaaacattgaagcaaaataaataattgaaaaaataaaagatcaatttttgtcaaataaattaataaattaaaatctatgaaatctataagttgacaatagacatttgtgtgtattgtgggcgtgagagctttccacgatctgggggcactagagtgggcgtggcgacgtcctaaaataaacttctgcattcataatctacttttatagattccgagatcacagcgttcaaacttgttttatactttttaacaagtccagtataccaaagaccctagaataattcttctagtgtctttgagtatacctttataatatacgagtaacaggtatcagaatgttttgactcgttaaattatattcaattgaaaggttttcagcggagataaggaagcacatgtgattagagattacaaaagtaaaaagaaaacaactaaaatctcactgcctttcatattagccggcaattcgttagcctccagcgacgtttcattctcgatccagtcctcgttcgaagtcgaatcagtcaggtctgatgcgtagacgcggcgtatacgtgatgctgacgctgtgcggggttttaaccgctgggctaaccgcctttcttgtgatattcctcaccggcggccagggtgccgatgcgtccgaaacagctacggtgacagtggaactgtataatggccaggggacggttcttggcaactatgcctacacagcctggacggatcgagcctttatgcagtttcggggcatcccctttgccgaaccaccaatagaggaactacgttttcgggtaaacgatctcatttgtgtaaaaatgacactgcaaaaactaaagtattacttcaaggtcacaattattctagctcaaaccaaattaatccattagttcgtactcgatcaaaaatatgcttgcgggggagaatgttattcattgtcaaatgaaggtttgaactatataagttcaagagcagtcaaatcaaaatactactaaaagtctagaaacaggttttaaataaaaacaatgcaaggtttaaatgcccttaccctgtacaatgtatagattcatcaataagatgaagctagaaaaaattgtctaagcaatgttactgtggtgagggtatacctctttggaagccaacttatctttctaaataatcgaattatattgacttttactgataagctggtgtatgacgaagtgcaaatgctttcttttctctatttcgcgtatagccacctgtggcgcgctcaccatggacaggcaccctcaacgcactgaactttggacaacgctgcccggtgataacaaatctagatagtcagatgtctgatgcggaactcgaagattgcctcactctgtcggtatacactaaaaatgtgagtcaaaaatagtcgtactaatcataatgatccaaaatcagatggacaaagggctaattgggttccaattgatattagagctttccaattgattcgttgtgaaatggtcataatggtacgaaaagagtctaatgaaatatatccattgtagctttctgctagccagcctgtaatgttttatatctacggcggcggcttttacaatggctcctccgaggaccacccaccgaactaccttctggaaaaggatgttgtcctagttgtacctcagtaccgagtcggagccctcggctggctatcgacctacacggaagagctgcccggcaatgcgcccatagccgatatccttatggccctcgactgggtgcaaatgcacataagtagctttggcggtgaccctcagaaggttaccatttttgggcagagtgccggcgctggagtagccagttccttgctgctgagtcccaaaaccggcgacaatatgttcaagagagcgattgtgcagtcaggttcgatcttcgccagctgggcaatcaacaaggatccgaaggcacaatctagacgtatctgtattcagttgggatgttctggctgtgagcaacacgatcagcttgtgaagtgtattcaaaaagcgaaagttatagacattctaaaggccacggcctcagaatccttttcgccgattgttggagaccttcacggcatcctcccacaacagcccagtgagctggtgaaaagctatcgcagacagattcctattctgacaggattcactcaacacgatggttcctttgtgctagcaagtgagtaaaaccattaaaaaggtcttcaaaatataataaatttaataaatgttctaggctattatgatgcgctggctgcaaaggtggccaatgtgagttcattaagtgtccgtcagttttcccagggtatcaatgatctggtcaatgacacatcgggactcacggataacatattaaatcggttgctctttaagcctcaggcgcttaacagtcatgatcatagtgcagcagtgtcctcgtacttcgatgtaagttcgagaaaagctcagcaaaaacagaaagtttaaatttgtaaatttcctacagctcactacgaacatcttcatgaagtccccggtaataactctggctaccaaaatgtacacccagcaacggtccacgccagtttacgtctacagttttgagtacgagggaacatacactcgatttggatatgagttcggcaactcgcactatcccttcaatggaggagtgcatcactcgaacgacaacatctacctcttcgccacgcatcccctggaggggcaggacactcagatgtctcagaaaatggtcgatgtgtggacttcatttgccatcgaaggtgttcccagaaatcttagtccgctaagtagcgcaagtggtccgtataacaaacttaatttggaagtaactaagggcgacgatttgttggacactttaactgccgctattgacgatcctgacaatggaagactacagcgagaagacatggagttttaatagccaccattcgacatacaatcaaggaagtgtaaattattgtttcaataacaaattaatgttacattttaaattaaagcaaacgttttttagcttagtaaacaaaatagaataccagtagacatttcactcacctttccgtttagttcctcattaggcaaagcgctggccacaatgttggagcaataccgatcgatgttctttccacaggcgctttgcagtgagggattgaatcgaaagtcggtgttttgctcgatcatgcgattaacaaccaccaggtgacaccgctggtcgaactgcgtgtcatccttgtacgtcttgaggcagtccagtagttttgacgaatccgtgctggggcagaacttgtagatcatttccttgcacgtggtgagaagcgtatagtcggtgccactgtcgcccaactcagacttctttaccatgaagatcgcatgatgacacggcttccccaaactatgggtctttcttataaggcactccagagcctgcaaggatagtaaacatagaagttggtatgtaatattgattaaattttgtttgtgatgtgaacttcgagtgcctgaagctaattttcatcgccacatatttcccatttcattctttcactaagttaacatcggttttgtttaagcgtattagtggttaaggatgagttagaaaaacttgctttttcattcacctgaccgggccccttttcctcctcgcagaattgctccagttcacgcttacaggcgttggccagcttggggtccagttgaatgctctcgcgctgctggtagagttgtgccttcacctggtggcggcactccttggggatctggtgacgctgcgccttgattgtgtcgttgcgcatgacctcactgaggcaagctaccacttcgtttttggtggcactggaggagcaaaagcgctggacatacggacggcacgcctccttgaactttgtagtgaagtggaagctctttagcgaaatgatctggaa

SEQ ID NO: 16817 - DNA, 1689 bp, DROSOPHILA
tcaggtctgatgcgtagacgcggcgtatacgtgatgctgacgctgtgcggggttttaaccgctgggctaaccgcctttcttgtgatattcctcaccggcggccagggtgccgatgcgtccgaaacagctacggtgacagtggaactgtataatggccaggggacggttcttggcaactatgcctacacagcctggacggatcgagcctttatgcagtttcggggcatcccctttgccgaaccaccaatagaggaactacgttttcggccacctgtggcgcgctcaccatggacaggcaccctcaacgcactgaactttggacaacgctgcccggtgataacaaatctagatagtcagatgtctgatgcggaactcgaagattgcctcactctgtcggtatacactaaaaatctttctgctagccagcctgtaatgttttatatctacggcggcggcttttacaatggctcctccgaggaccacccaccgaactaccttctggaaaaggatgttgtcctagttgtacctcagtaccgagtcggagccctcggctggctatcgacctacacggaagagctgcccggcaatgcgcccatagccgatatccttatggccctcgactgggtgcaaatgcacataagtagctttggcggtgaccctcagaaggttaccatttttgggcagagtgccggcgctggagtagccagttccttgctgctgagtcccaaaaccggcgacaatatgttcaagagagcgattgtgcagtcaggttcgatcttcgccagctgggcaatcaacaaggatccgaaggcacaatctagacgtatctgtattcagttgggatgttctggctgtgagcaacacgatcagcttgtgaagtgtattcaaaaagcgaaagttatagacattctaaaggccacggcctcagaatccttttcgccgattgttggagaccttcacggcatcctcccacaacagcccagtgagctggtgaaaagctatcgcagacagattcctattctgacaggattcactcaacacgatggttcctttgtgctagcaagctattatgatgcgctggctgcaaaggtggccaatgtgagttcattaagtgtccgtcagttttcccagggtatcaatgatctggtcaatgacacatcgggactcacggataacatattaaatcggttgctctttaagcctcaggcgcttaacagtcatgatcatagtgcagcagtgtcctcgtacttcgatctcactacgaacatcttcatgaagtccccggtaataactctggctaccaaaatgtacacccagcaacggtccacgccagtttacgtctacagttttgagtacgagggaacatacactcgatttggatatgagttcggcaactcgcactatcccttcaatggaggagtgcatcactcgaacgacaacatctacctcttcgccacgcatcccctggaggggcaggacactcagatgtctcagaaaatggtcgatgtgtggacttcatttgccatcgaaggtgttcccagaaatcttagtccgctaagtagcgcaagtggtccgtataacaaacttaatttggaagtaactaagggcgacgatttgttggacactttaactgccgctattgacgatcctgacaatggaagactacagcgagaagacatggagttttaa

SEQ ID NO: 16818 - protein, 559 aa, DROSOPHILA
MRRRGVYVMLTLCGVLTAGLTAFLVIFLTGGQGADASETATVTVELYNGQGTVLGNYAYTAWTDRAFMQFRGIPFAEPPIEELRFRPPVARSPWTGTLNALNFGQRCPVITNLDSQMSDAELEDCLTLSVYTKNLSASQPVMFYIYGGGFYNGSSEDHPPNYLLEKDVVLVVPQYRVGALGWLSTYTEELPGNAPIADILMALDWVQMHISSFGGDPQKVTIFGQSAGAGVASSLLLSPKTGDNMFKRAIVQSGSIFASWAINKDPKAQSRRICIQLGCSGCEQHDQLVKCIQKAKVIDILKATASESFSPIVGDLHGILPQQPSELVKSYRRQIPILTGFTQHDGSFVLASYYDALAAKVANVSSLSVRQFSQGINDLVNDTSGLTDNILNRLLFKPQALNSHDHSAAVSSYFDLTTNIFMKSPVITLATKMYTQQRSTPVYVYSFEYEGTYTRFGYEFGNSHYPFNGGVHHSNDNIYLFATHPLEGQDTQMSQKMVDVWTSFAIEGVPRNLSPLSSASGPYNKLNLEVTKGDDLLDTLTAAIDDPDNGRLQREDMEF

SEQ ID NO: 16819 - DNA, 4846 bp, DROSOPHILA
gctccgtccttgcctaccagtgaggtcacatatttatctagctggacaatggtgaactcctctaattctccattgtgctgcatcacgttcagctgactggccagcatcgcatagctgttaaagtacttgccgtcggagattaggatgcgatagcgctctgagtccgctgcgctgttaatcttcttgattgccaggatctggagaaccggggcatccacaacctcgccatgcataatgcgctgtggccggtagtacgatgtgttactataccaatccattattttaagctggcatacttacagcaatcacaccagtggacaaagatgccaggaccattttgattataaaaataagttgggcaatttcacaagcaaatataattcatgcgtcgagggctgggtacaaagtgaagctagaagaggcgggaagggcttctgtgtaattttgaatcagttgttgcggaactagttcaatttgctttccagttagagctgtatttcagggcagtaaagttttggttgcttaagagaaaacatttattttactttattattactatttcctacagcaacatattgagaataattgtctattattttgacacatagctttaagcttgacttacattgtttgtgttaatgctcacaactagttattgtaagcatttctatttcaatggaattataaatatttaataactgtgtgatattttattgacacattctttgtattaaagcctacattcagtgccttgtaaactttttaaattgaatggtgtaatatatatatttaaaattttttgtaagctctttaaactcggtgatattttattgacacaaggaaagttgttacagtcgggtgttcttataaacatgtatgcagaagcgggtgtccactgtatgacccagacgttaacagcactgcttatcggaactagaccgcagccctgagttggctcgattagcaaacattttcccgcgcattttcgcacgcgtcgtcacaacaagatcggcggtacaaaacaaaacatattacagataaacgctaagcacaacagacgcacgtaatggacaatcccagttcaccaccgccaaatacgcccagcgatgccgccgaacgccgcgatctgcgggcagcaatgacgtcgccggttggcgactttgagccgttcgagaacgaggacgagatcctgggagatcagaccgttcgcgatgaggccgaggaggaggatggcgaggagctgttcggggacaacatggagaacgattaccggcccatgcctgagctggatcactacgatccggcgctgctggacgacgaggatgacttctcggagatgtcccagggcgatcgctttgccgccgagtcggagatgcgtcgacgcgaccgggccgccggaatccaccgcgacgatcgtgatctgggtttcggtcagtccgatgatgaggacgacgttggaccccgggccaagagacgagctggcgagaaggcagctgttggcgaggtagaggacaccgagatggtggagtctattgaaaacctggaggataccaagggacactcaactaaagagtgggtcagtatgctaggaccacgcacggaaatcgccaatcgctttcaatcctttttgagaacttttgtggatgaaaggggcgcatacacctatcgtgatcgcatacgtcggatgtgcgagcagaacatgtcttcgttcgtcgtctcctacactgatctggccaacaaggaacacgtattggcctatttcctgcccgaggctccctttcaaatgctcgagattttcgataaagtggctaaggacatggtgctctccattttccccacttacgaacgtgtcaccacagagattcacgtgcgcatctcggagctgccgctgatcgaggagctgcgcacattcagaaaactgcatctgaaccagttggttcgcactttgggcgtggtaactgccaccaccggagttcttccccagctatccgtgatcaagtacgactgcgttaagtgcggctatgtgctgggtcccttcgttcagtcgcaaaatacggagataaagcccggttcctgcccagagtgccagagcactggacccttctcaatcaacatggagcagacgttgtatcgaaattatcaaaagatcacgttgcaggagtcgccaggcaggattccagccggacgcattcctcgcagcaaggatgtcattttgctcgctgatttgtgtgatcaatgcaagcctggagatgaacttgaggtcacaggtatatataccaataactacgatggctccttgaacaccgaccaaggatttcccgtgtttgccaccgtgattattgccaatcatgtggttgtaaaggactccaagcaggtagtgcagtcgcttacggacgaggacattgccaccattcagaagttgagcaaggatccgcgtatcgtagagcgtgtagtagcatccatggcgccttctatatacggacatgattatatcaagagggcgctggccttagctctctttgggggtgagtcaaagaatcccggtgagaaacacaaggttagaggtgatataaacctactcatctgtggagatcccggaacggcaaagtcgcagttcctcaagtacaccgaaaaggttgcgccacgtgcggttttcacgactgggcagggagccagtgccgtgggtctcacggcttatgtgcgccgcaatccagtatctcgggagtggacattggaagcgggtgctctggttctggctgatcagggagtttgtctaatcgacgagttcgacaaaatgaacgaccaggatcgtacctctattcacgaagccatggagcagcagtctatttcgatttccaaggctggtattgtcacctctcttcaagctcgttgcaccgtgattgctgctgccaatcccattggcggtcgctatgatccgtcgatgaccttctcggagaacgtgaatctctcggagcccatcctgtcccgtttcgatgtgctgtgcgtggtgaaggacgaatttgaccccatgcaggatcagcagctcgccaaattcgtggtacactcgcatatgaagcatcacccgagtgaggaggagcagccggagttggaggaaccacagctgaagaccgttgatgagatcccgcaggacttgttgcgacaatacattgtatacgctaaggagaacattcggcccaagctaacggtaagcgaacttattgaaatcacaggaaaagtgtaacaacatttccgtttcatacagaacatcgacgaggacaagatcgccaagatgtacgcccagctgcgacaggagtcttttgccacgggctcactgcccattacggtgcgtcacattgagagtgtcatccgaatgtccgaagcgcacgcgcggatgcatctgcgcgaaaacgtaatggaggcagatgtcagcatggccatccgcatgatgttggagagctttatcgaggcgcagaagttcagcgttatgaagaagatgcgcagcacattccagaagtacctgtccttccaaaaggaccattccgagctgctgttctttattctgcgacagctgacgctcgaccagctcgcctacattcgctgcaaggacgggcctggcgccacacatgtggagattatggagcgggatttgatcgaacgggctaagcagctggatattgtaaacctgaagccgttctacgaatcagatctgtttcgcacaaatggcttctcttacgatcccaagcgacgcatcatccttcaaattgtggtcgacggcaacacagcttaagtttcagccatttacttcatctcatttagttatagtattcatgttttgttacccccattttcggtctaataaagtttgatatacttatgtatgtatttatactaaaataggtatttgaattgaaatttatacttccgtaaatattttttattgtgcatacaaatcagccccagagtatgtcaatcgttgttcccttcgatgcccatggctttgtcgaaatcttcctcgctaatcttgttctttttcagccgcttgaagagccgaatatcgctggccagttcatcgaggtcctcctggctgaactgctgcctcttttttcccttcccggacctgctcgcctccgcctctgccgctttctttcgctgcttcttcgccttgcgcagctccttcttagacttggcatccagttttgccttctttgtctgatcccaggactcaacacgctttttgtgctgcttttggcccggccagcttcccgtttgctcgtaagtttccattttcttttgccggacttgttctttctgggcgtttttgtaggtaagtttggataaatccacttcaaaagcaggcgccacatagccgccgccctggtagttctttagctccggcatgcgtggcagttgcaggagaccgtaagcagtggccatcttgcccaggtccagatcctttagtcgcagaatagcgctgcattcgtgtttggtgtatgctctaacatgggaaacaaaagcgcgcatgcctttgtcatagacgcccttgtcggccgcctgcagccgatggagttgatctaagacggctggtagcttctttttttcacgatctgcatcctcagcctcctcggttagcagtttagttagctccactttctggttgatcttcaggaagtgcacataggcatcctcgctgggcaggagaaacaccagagcgttgccctcgtttccctgccgagccgtgcgacctacacggtgtacaaagctggaggcagttgatggtggatcccactgcactacccactcgatctcaggtacatccaaaccacgtgcgaggacatctgtgcagagg

SEQ ID NO: 16820 - DNA, 2789 bp, DROSOPHILA
caacaagatcggcggtacaaaacaaaacatattacagataaacgctaagcacaacagacgcacgtaatggacaatcccagttcaccaccgccaaatacgcccagcgatgccgccgaacgccgcgatctgcgggcagcaatgacgtcgccggttggcgactttgagccgttcgagaacgaggacgagatcctgggagatcagaccgttcgcgatgaggccgaggaggaggatggcgaggagctgttcggggacaacatggagaacgattaccggcccatgcctgagctggatcactacgatccggcgctgctggacgacgaggatgacttctcggagatgtcccagggcgatcgctttgccgccgagtcggagatgcgtcgacgcgaccgggccgccggaatccaccgcgacgatcgtgatctgggtttcggtcagtccgatgatgaggacgacgttggaccccgggccaagagacgagctggcgagaaggcagctgttggcgaggtagaggacaccgagatggtggagtctattgaaaacctggaggataccaagggacactcaactaaagagtgggtcagtatgctaggaccacgcacggaaatcgccaatcgctttcaatcctttttgagaacttttgtggatgaaaggggcgcatacacctatcgtgatcgcatacgtcggatgtgcgagcagaacatgtcttcgttcgtcgtctcctacactgatctggccaacaaggaacacgtattggcctatttcctgcccgaggctccctttcaaatgctcgagattttcgataaagtggctaaggacatggtgctctccattttccccacttacgaacgtgtcaccacagagattcacgtgcgcatctcggagctgccgctgatcgaggagctgcgcacattcagaaaactgcatctgaaccagttggttcgcactttgggcgtggtaactgccaccaccggagttcttccccagctatccgtgatcaagtacgactgcgttaagtgcggctatgtgctgggtcccttcgttcagtcgcaaaatacggagataaagcccggttcctgcccagagtgccagagcactggacccttctcaatcaacatggagcagacgttgtatcgaaattatcaaaagatcacgttgcaggagtcgccaggcaggattccagccggacgcattcctcgcagcaaggatgtcattttgctcgctgatttgtgtgatcaatgcaagcctggagatgaacttgaggtcacaggtatatataccaataactacgatggctccttgaacaccgaccaaggatttcccgtgtttgccaccgtgattattgccaatcatgtggttgtaaaggactccaagcaggtagtgcagtcgcttacggacgaggacattgccaccattcagaagttgagcaaggatccgcgtatcgtagagcgtgtagtagcatccatggcgccttctatatacggacatgattatatcaagagggcgctggccttagctctctttgggggtgagtcaaagaatcccggtgagaaacacaaggttagaggtgatataaacctactcatctgtggagatcccggaacggcaaagtcgcagttcctcaagtacaccgaaaaggttgcgccacgtgcggttttcacgactgggcagggagccagtgccgtgggtctcacggcttatgtgcgccgcaatccagtatctcgggagtggacattggaagcgggtgctctggttctggctgatcagggagtttgtctaatcgacgagttcgacaaaatgaacgaccaggatcgtacctctattcacgaagccatggagcagcagtctatttcgatttccaaggctggtattgtcacctctcttcaagctcgttgcaccgtgattgctgctgccaatcccattggcggtcgctatgatccgtcgatgaccttctcggagaacgtgaatctctcggagcccatcctgtcccgtttcgatgtgctgtgcgtggtgaaggacgaatttgaccccatgcaggatcagcagctcgccaaattcgtggtacactcgcatatgaagcatcacccgagtgaggaggagcagccggagttggaggaaccacagctgaagaccgttgatgagatcccgcaggacttgttgcgacaatacattgtatacgctaaggagaacattcggcccaagctaacgaacatcgacgaggacaagatcgccaagatgtacgcccagctgcgacaggagtcttttgccacgggctcactgcccattacggtgcgtcacattgagagtgtcatccgaatgtccgaagcgcacgcgcggatgcatctgcgcgaaaacgtaatggaggcagatgtcagcatggccatccgcatgatgttggagagctttatcgaggcgcagaagttcagcgttatgaagaagatgcgcagcacattccagaagtacctgtccttccaaaaggaccattccgagctgctgttctttattctgcgacagctgacgctcgaccagctcgcctacattcgctgcaaggacgggcctggcgccacacatgtggagattatggagcgggatttgatcgaacgggctaagcagctggatattgtaaacctgaagccgttctacgaatcagatctgtttcgcacaaatggcttctcttacgatcccaagcgacgcatcatccttcaaattgtggtcgacggcaacacagcttaagtttcagccatttacttcatctcatttagttatagtattcatgttttgttacccccatt

SEQ ID NO: 16821 - protein, 887 aa, DROSOPHILA
MDNPSSPPPNTPSDAAERRDLRAAMTSPVGDFEPFENEDEILGDQTVRDEAEEEDGEELFGDNMENDYRPMPELDHYDPALLDDEDDFSEMSQGDRFAAESEMRRRDRAAGIHRDDRDLGFGQSDDEDDVGPRAKRRAGEKAAVGEVEDTEMVESIENLEDTKGHSTKEWVSMLGPRTEIANRFQSFLRTFVDERGAYTYRDRIRRMCEQNMSSFVVSYTDLANKEHVLAYFLPEAPFQMLEIFDKVAKDMVLSIFPTYERVTTEIHVRISELPLIEELRTFRKLHLNQLVRTLGVVTATTGVLPQLSVIKYDCVKCGYVLGPFVQSQNTEIKPGSCPECQSTGPFSINMEQTLYRNYQKITLQESPGRIPAGRIPRSKDVILLADLCDQCKPGDELEVTGIYTNNYDGSLNTDQGFPVFATVIIANHVVVKDSKQVVQSLTDEDIATIQKLSKDPRIVERVVASMAPSIYGHDYIKRALALALFGGESKNPGEKHKVRGDINLLICGDPGTAKSQFLKYTEKVAPRAVFTTGQGASAVGLTAYVRRNPVSREWTLEAGALVLADQGVCLIDEFDKMNDQDRTSIHEAMEQQSISISKAGIVTSLQARCTVIAAANPIGGRYDPSMTFSENVNLSEPILSRFDVLCVVKDEFDPMQDQQLAKFVVHSHMKHHPSEEEQPELEEPQLKTVDEIPQDLLRQYIVYAKENIRPKLTNIDEDKIAKMYAQLRQESFATGSLPITVRHIESVIRMSEAHARMHLRENVMEADVSMAIRMMLESFIEAQKFSVMKKMRSTFQKYLSFQKDHSELLFFILRQLTLDQLAYIRCKDGPGATHVEIMERDLIERAKQLDIVNLKPFYESDLFRTNGFSYDPKRRIILQIVVDGNTA

SEQ ID NO: 16822 - DNA, 8979 bp, DROSOPHILA
gataaacacacagctacgcacatcgaatgaaatcggctggattttagtttagtttcgcttgttgttgttttcgttttgcttgtttaatattaaaatcttacattagaaacacatcaaatattagaaatatttttcatatatatctatatatgtatatattgtattcagccactcggctacaatttctccgcaaagtttggaactctgcacaaaaacaagaaattaattataatcaattaaaataataatacagagcttaatcataaataggtggaaatattttgagaattgtttgaatctattttaatagcaataattttgtgttttctgtaagattactgggcaccgacttgacaaatgtcggaattaaaaacaaaatttcgaaataatttccatggtattcaaattttctgcaattgatttctttatgtatgtgagtgtattcgtgagtgtgtatgcgtttatcaatattcataattattatataatatcacatcaactttgtttttatatttgttattattaactttcctctttctgcctcgattgatcgattccgattcttattgtttgctctcatatatatagaaaatttgttggatttctgtttctcaaatacacggtatatagatgtatgtatgtttgcatgcatttagaagtaatagcctaattgaatcgtgacaaacgacatgtgccatatattatgcactgaagttatacataatatattagctacatttgattcctggattatgttgatgatacaaggtgatggtgtacacacatccatacatacaaattgggataatactctatacttccatccgggggttttgacttttgtattcaatttaaaacggatcaccgacaaccgttcactgagtgaagttttcttctgcttgtctgtctgccttaacgttttacaatattttgaatattccttatggttttttgtgttctcctcactctatcctcgttttcaatacttctttttttgcgattttttttcgtttttcaaaaagtaccttttttgtttaagccaaaaagtcagtccaataagagttttgagttgcctgcaactgcagttgatttgtttttgttttcgttttggtttttttggttttgttttagagcttaggttccaaaataattgtttttgctttagcgttgagttgatttgttatttgcaggagtaagttgatagtttgtggtccaaaagtttgcctctagggttaaacatcatctctctatattccataatgaagatcatgaatcttggctattgcgacgaaggaggcacaaccaatagatgttcgtattgcgattgctgctgttactgttgttgttcggagggattgagttctgagcagcccagcgattctggttcgcactccatgccgctcctccgtcgagcgactcactcggatgagtagagctttttcttggtcagcgtgaagtcgggactgatgttgatggtattgctacgagtaaggtttcttgccggagattttaaatttagtaatgctgttttacagaactttagtggcacacactcactttataaactgcggcaccaaggagctccagccgctcttgtcctgcctcaatgtcaagtacagctcgaagatggacaccgtgtccggatccactttaaagtatgcaatgcgcctgtaagcaaaagacaataaatacactttaataaaaaggttcccatacgtgaattggttaacaagcaataagttagaataagttgtcattctacactcatcaccaccactcacttgactttgttgggctcgctctcgaactcaatgaagagcgtgcaggcccgctcgccgcatggttcccgctccgacatccggatgatctcggcggcgatgcgctgcgtgaggtcgttgggcagcgtgacctcggtacaggccaggtggcgacgcttggcatcccgtagctgagcctgcagttgctgcgacagttcccgcactgcgctggcgctcacatcgtccaagttgtcggcggccccaaaccgagcgcaggcggtcgactgcagcggcgatgcgggcagtgggtggtgctgctgggcggtgctggacagcacgttggtcatgtaggcgtgatgataggcggctgcactgccaccgctaaggggcgcctcaaaactggccgcggccaccggcgacgtggcctgtttgggagtggtcataccgacggatcctccgcccgccaacggaccaccgccccctgccgatggaggcgtggccgatgggcgggtgttgagcgcctggtgctgtcgcatgtggagcacagaggctggatggccatctaccacgtcgacgtccagaatgccctcgccggcggctgtgttcccgttcacgcctgcggtcagctcctcctcctcctccagcggcgccgtagaagcttgccagtctaaaaaaagaaattgaaaagtgttagcttacattcaagtggaacatttatgtatattaatttaattactttaataaatacattatttcttgatattcaagtacctaagattgcgaatcaccagaattcgtacagtaaatgtttgattcggataagcaaaagaaagcaaacaaaaaaacttataaaattagcactgatgcaaattcgtttccatcactgtatgtggaaaccggctgggaaagttcgagttacggaagttcaactgtagtttggatggcccatcgaccggcaaaagagttccatgtgggaatggaagcgaaaaaaaatcagctgatgtctgcaaatcgggatccacacttacgttccacgcatgggggaaccggaaagagtgatgtgcgcagactccgcttccagagagcggcggagggtcgtggcggggtcgggggaaatcacctggcaacaacagctggaaaatcagccgtttcccatttccagctgacgctcactctctctgtctttctctctgttcctgcctctctctttctgtgtcccaagtcagcagttcatttccccctcagttcacccgtcaaacagctaccgctctgcgctattggcttttatatcttttgctgttactttattacccgacagaacggacgataaaaagcggagctaaactcctctcaaaaactcaactctaccgagctgggaattaaatggtactgtggggcaaattgtgtgagacatatttttaatataaatgaaattgtacatttctaagcaataaattatttaatatgtacaaacatgtaaaataagtaggcaattcattttactgctttgaggatttacatgcacaggcaagtgtgctctgttcatacgttgtacgtttcatatagaaagtcaatattactaagaaaatcagtggaagatgtaatgattttttatataatctacaaaaagttaattagtttctattctttctaataaaacattctttaaataacccaatttatttcgatcacatcttgaatatttgatttccttcgaggagatcttttgcctagcaacaacttcctactcatttcgtgaaactttgtgcgcataatgtgcgagaggcagtgcagcgagtacaaattaactacttggcttgtctcgacagcgtcttgtaattagcgcgaaaactcttgaaagggggtatccctccccctctcccacaccatcatacaccctattcaaccatgtctcccatgccacccactgtataatcattgcaacgtcgctgaatggacaatttgctctcgttagctttgcatgtctctctctgtctccccttctcttgctgttttgttaccccttgaatcttcttgtgttttccatctcgctctggctccctggcacacccgcgtaattaagaaattaacggcacatgtttgcggctctgcatgtgtccacatatgtgtgtctcccttttctcaatatccccatctcgcttccactgcgtatgtgttattggattttgtcaagtgccgttgtctccacaaaagggtttgtgcaaagtcaaaaaagcgaaagccaaaaagaacccaatgaataataataaaaaacagacaacgaccacacactttattacaaggcacacaaacaactgcgagcgctgtatttatggatgcatggatacacttttgccacagcggcgagcaaattagtagctgtaaaaactcgactcattaatgaataaaatcttgttatcttaacgaaccaataaaaacagttctataaatcgcaccaatgtttccacatacatatgtatgtaaatacatgtatgtatgtatgtacaggtaagtttaccattaggtatttaaacataataatttgttttaaatcatacgaactacatttatgaacatatgcatgtacttacatatgtttatatgtaaatgcatacatatgtaaatatgtacaaaagagagtgcaaattgtttttgtaaccgccgccgtatgtatgtacataaattgtatgtaaattgaacctatacattctgaatattctgaacattcatacaaatgtagaagtatgcatcttgtgggtggtgtatttgcatttgtatgcatatttgcattcggacgagagatgggcatattgatgaacagacatccccctgctcacactttctgctacccgcaaccttcatcattgtatgcatgtacatacatacatatgtatgtatgtatctctgtcttacttgccgcagcaatctgaagcctttgcggttgtgtatttggtgcattcggaatcaacaacgaacacaagaatgtataacaatacctgcggaaagaagaagcagcaacgcagcatcacccccatacaagttaacggtacaccgcaaacatgaccgttcatattctcttgtttcccagttgctgctcagctggggcgagtgaatgagacgcacaaagctggcgaagtagtagtgggaaagggaaagggtgggtgtgggtgaatttcgggcttattacttggctctcttaatgcgtgacgtcgcttggccttgagattcaattttcgtgcacttcggtatggcaatcatgttcctacagtgcgcactgcctagcaggaatcaatattcttttaaattcaagtcttgaaacaccttatattgttaagaaaaacaaaaaatgttaacagcttttaaaacaatgtagagttaagcatgttcattgttacacagaaaagtgattactgtagctcatatttactgtaaaccatgagaattgataattctgacgcttttatctttagatctttcacttaattaccgaagtaaaccgcctgtactcttatcaatgttgattgttcagttccattctattttggatcttcaataaaacgtcgctaatcgagttaaattggttgtaagacagtccatgaaccgagtttcatacatatgtatgtatgtatgtatgtatttatttatgtatgattgttgctatctccatatgtacatgtggttgttagtttttttttgaatcaataagcaggttataaataattcattgcgaccaattttggaagtcattcgcatttggcccctaacggaaatctttagaaattgcttcgaatataaaatcgacgaacccacgcatggggttaataaatattatatcaacttcttgacaaccccttcttgcaacgcccaacaggaaaatcattttaaaaggaattatggctatacggaacgattgacataatataaacgtgttattattatcaccaaaactcatattatcttgattctcaactttgttaagaggcacaatatttcagcctttttacttgaaatggtagcatatttaagggcttattaaaaaaaagtaacctctcaaaagttttttcttggaaaataactatgtacacatgtaagtatggaagttgatgtagctgatttgagaaccattagatgtaaaagatacgataacaaaacgtgaacaaatttgttatcatttgatgtatttatgtacatatgtgttttattcagtaattgtaaaaaaaagtgccttgtagacaactgatattatttttaacacagcagtaaatattcttgatggaaaatgaataatggccatgtgagtgttggtgaggctggctggtcgtatgtccttcgaaaataaaattgcatgcgctcagtcagtcatgaaattaaattgactgcaaatacatacgttgccaggggcgtggaaggggtgtggagcaggggcggaggtttggtggggtctgcagagctttttcagcgcgatgcaagcagaacaacacggtggaaatgtaaccaatacggacccctcagcttttttcacgccaaatctgtccattccaggccattaagtcttttgattggaaaaagtgtttcgtattttagctatttttaataaaaaaaaaaaaaaaaaacgtagcactaaaacatgtagtgatctgataaaagctgactgagcaacaattttcttagtcaatgaatatttattgtttagaaactacgttaattcagatggaatacccctttaactacacatttatggtaaataactactttgaaaaacttgttctcaacaaactttttgatttccattaagatgcacaattaaattttcattcacgctaaagtaggcaacagtgcggctaacggtatatctgcgacagtatgtatgcgaggcgacatgttgttgcatgtcgctaccaccgccgcttgttgtgttcgcctccgggtgattttacatatttcgctgtttttttttttggcttacgtgctacgtggctatatggccgtatgcacatggaatcccatcctgctgcccagacggaggtcccccgtctaatttgcccaactcaactgcttcttggtgccgccgcggtgcaaagtttaaagtgacaggattaacaggatgttgcataatccgcccgccagacacatgaacaggatacgctggcctggcttcggacaggaacagagtgcacaatgcataatgcgaactttacatatttgcaacccccgaatgtggcaccataatcaggatgcaaaaatgcaggcaattttcggggcagaatatgttgtactcattttatcagtcggtgctagtgattaaaatcaaaactcactcaaaaacacgcgaagcactttgaaatgcatagaaaactgtatagaaattttccattggttgggcaaaacttgaataaatgaattttataatccctggaaaatttgctaaagacatcaaatgaaatgttaccgtacgctataaaattaattgaatcaaaaaagaagagcgaacaaaataatgggccataaacatgaaatataaaaatgttcgtggcacattaaaatatccgaaatgtgccttaattgagaattcttgcaagaaacgacccgagtagatttgtaagttcacaaggtgaacagcgaccttaaatttagttttaatgtatggcagggctctaaaattaatcaggcggaataacaacgaaatgtaggtacatatttaaatcatttgggtttttacggttgtgctgcacttcatatttatatttctcaatcaaaaacgttcttttatttggcaatttttgggcaaacacaaactgaattttttctttaaacaatttgggtacttttctttatgtggattctgttaataaacacttaaacagcacactgtttataatattgcaataattttatattcttcagaaattttcctgtaaattttcagcatgtagctaaaagtagctaaacattgaactcgttgcttgaaaactttagtaaatcaacattagaaacgaacttttttagctcacacaaaaagttgtaaaaccacgatttttgttatattttcttattaaaaccagaagaaagacaaatatcagaaaagttcaagtttgcttttctcttcaaatcttgttctatttaaaaatctagattattttgctatgtgaacttacctttaattttattaacaccgaattttccctgaatgtgattttgtactgagagcacttccatcttcatagagccgccgttgcaactgctattttgtgtgttttcagccgattgttggatttataatgaaagtctgccgcctgctgctgccaccgaatgcgaatgcgattatataggctataggcgtttgatctcgaccgactttcgatgcgtttaatatattgcgtgggtgtgaatagttgtagtttaacgtacgtatagaaatgcactttaatcacaagaatttgattttacttcgcgtgtggttaggtgttttattgtgtgtttactttgttgtgtgtgtgtatgtggtggagagttcgattttccagcgacagcgttttaacaaacaattggaaaagtatcaacaactaaatttgttattctagttaaacatttcaattcaatacattctaaaaaatcaacgcaaattgccgccccgttcagctctctctcgctattttcttcctctgggctttcgcttcccctttttgtctcgctctgtctggtttcctttttaaatttaagcacagcacatggttttgatttaattcatgacgttcttgttgtttggacagagattttaatttcgtatttatctttgctttgctttcctacatatggcggagtttcaagtgctgatggctgcgtttcgtttgtagaagtattcttttctggttttccgattttctggctctaattcttctcgttctgccccttatgtgccgatgtgctatgtttggcggccgcgtttcgactgcggtttttttcagaagttcgtgtgaagcgtactacaaaattttcactcagcgctcgctcagctgtttctgtttctgtctctgtgttggtgcgagcgagagagcttggaaatagctgaatcagaagaagaagaggaggacgatgaaaaactggaactgcggcaacggcaacaacttcgataacgggacacgctggagagctgagctgagcggagcggagcagttttccaaacagttttccaaagctactatccggccggctcgcgtgctgc

SEQ ID NO: 16823 - DNA, 1317 bp, DROSOPHILA
atgaagatggaagtgctctcagtacaaaatcacattcagggaaaattcggtgttaataaaattaaagactggcaagcttctacggcgccgctggaggaggaggaggagctgaccgcaggcgtgaacgggaacacagccgccggcgagggcattctggacgtcgacgtggtagatggccatccagcctctgtgctccacatgcgacagcaccaggcgctcaacacccgcccatcggccacgcctccatcggcagggggcggtggtccgttggcgggcggaggatccgtcggtatgaccactcccaaacaggccacgtcgccggtggccgcggccagttttgaggcgccccttagcggtggcagtgcagccgcctatcatcacgcctacatgaccaacgtgctgtccagcaccgcccagcagcaccacccactgcccgcatcgccgctgcagtcgaccgcctgcgctcggtttggggccgccgacaacttggacgatgtgagcgccagcgcagtgcgggaactgtcgcagcaactgcaggctcagctacgggatgccaagcgtcgccacctggcctgtaccgaggtcacgctgcccaacgacctcacgcagcgcatcgccgccgagatcatccggatgtcggagcgggaaccatgcggcgagcgggcctgcacgctcttcattgagttcgagagcgagcccaacaaagtcaagcgcattgcatactttaaagtggatccggacacggtgtccatcttcgagctgtacttgacattgaggcaggacaagagcggctggagctccttggtgccgcagtttataaaaaaccttactcgtagcaataccatcaacatcagtcccgacttcacgctgaccaagaaaaagctctactcatccgagtgagtcgctcgacggaggagcggcatggagtgcgaaccagaatcgctgggctgctcagaactcaatccctccgaacaacaacagtaacagcagcaatcgcaatacgaacatctattggttgtgcctccttcgtcgcaatagccaagattcatgatcttcattatggaatatagagagatgatgtttaaccctagaggcaaacttttggaccacaaactatcaacttactcctgcaaataacaaatcaactcaacgctaaagcaaaaacaattattttggaacctaagctctaaaacaaaaccaaaaaaaccaaaacgaaaacaaaaacaaatcaactgcagttgcaggcaactcaaaactcttattggactgactttttggcttaaacaaaaaaggtactttttgaaaaacgaaaaaaaa

SEQ ID NO: 16824 - protein, 299 aa, DROSOPHILA
MKMEVLSVQNHIQGKFGVNKIKDWQASTAPLEEEEELTAGVNGNTAAGEGILDVDVVDGHPASVLHMRQHQALNTRPSATPPSAGGGGPLAGGGSVGMTTPKQATSPVAAASFEAPLSGGSAAAYHHAYMTNVLSSTAQQHHPLPASPLQSTACARFGAADNLDDVSASAVRELSQQLQAQLRDAKRRHLACTEVTLPNDLTQRIAAEIIRMSEREPCGERACTLFIEFESEPNKVKRIAYFKVDPDTVSIFELYLTLRQDKSGWSSLVPQFIKNLTRSNTINISPDFTLTKKKLYSSE

SEQ ID NO: 16825 - DNA, 5813 bp, DROSOPHILA
atggctcttctgtctgtctggacgaccaatcttctggacagcggtctcagtgaccgatcatcgaaaccaactccaccggcgaattgcgtatgtaaagaagcagctacttgtgcagtcgtcacagcgattcggtgctctttttttgaccagaaaacatatgtatattccgtcgggtctcaatgtgcagtgccgagcaacaacaacaagtacgtggaaaatggtgggccggttcgccggtctcacgtcctggtcatctcttgtacggcttttctggctgcttaatatgtgatccaagtactggcacagcctggaatgctgctaatgcggcatctatagtgctagcttagtttctattcgcaataaattcaccgacgaccaacaggcgatagaagatggctagaactatcggctgcaccgagatctatcgatagccgaagattaagctggagatagattttcgactagacagggtcggagcaaaaggggttggtaagtacctagttcgaattatatatttagatatattccacagaaggtctcccataacaatatcaactttttaacttgttgctacctgattttgatcgctgtagaattagtttgtattttaattcacaaaaaataacgtaagaatttagtaaattcaattgaattgtgaccagttttaaaataatataccgaaacatcgatagtaccaccgataaatgtatcttcagcacttcgatacgctcgttattgtgtagatactatttgtttttgagcgaattcagttggctgcttcgctggcctaggataataattgcgtgctggcggacaaaattaagctgaattagttaaccacctgtggttttgtcttcgatcgcaattgaatagcatctaagtgcaaatagaacggcttaagcgcgagtttaatttcccctcctccactgtcaagctcacaccttgaaacttgtttcgagtttaccaagtagagcgaggtatttgtgtgtttgtgtatacatacaagcatatgcaaaaggctttagaaattccaacgcaactaacaaattgcagtgcagagccacttgcattgccagttggaaacacttaaatgatataacttcatttcggagactggtaaccattcacaatgggtaagttggccaacaccttctggctacgagtggttcaaagtttagatttacattttgactaagctgtaagccactggggattgattatctattttatatttccctttttccaattggacacacatctatgttacgtgtgaaagttattcaaataagtattgtttttgacgtactcttgtgctctaacgatggcagtcattgttttggttagaaatttgaagaggctactgaaaaaagtatgaatgggttttgggttttacatatgtgtagatttagtatatacaaaaacgaaacttttcgcgcccattttccatttgatggagccttgcactccagacagcattttgcataacaaacggctgcttacatttctgttacacatcaagtaaaataacattattttccaaaatataagtgacactagtaagtttatttttttatgacaaaactctttcctaactattatatttacgctccggcagccgctcacttaattcgcaaagagtcattgcacgcagccggaattcatgttttgctccaatgccgagcgtgggcctctgtcttggtgtcattggcaccccgcatttggcatctggagtaaggcatgtggtccaaagccccggtggcagtctacactcgaattgcattccgtctggcacagacaccgcgggacttccggtaagaatctctcaaaggcggatgcatttaaaaggcgcaggctcttcactcgcttctctggcaggatgtaattcggatgcttcttttgaggtcgttgtcccgcctgtcttagtccgacattaagttgccactaagcacataattagcttagttacaatcaaaagaaacgggttcgaaaatatgaagtgcggttttatatctgctactttatggtagatgggtattcttaattgaatcaaccacaaaggaaggtttactataaatggtaaagaaggcgttttacaaggatgggtcttcagattggcataaatgtataggtgtgtggtgaagtatgcctataaggttatcgcatttcccttgttagtgtgactttttgacctaaccgaagcagtgaacttttacccacaagttcgaaccaattgtctcgttaattacagcaacaggcactcgtgcacagaaataaatatggtgcaattgtgggcttgctagttttttgctagtttcttttggaatatcaatagaaattgacaggacaaataattaaattaaaacctatttcaaaagtgtgcgctacaggcgcaacaagaatctgcttgagtaatcttaacttaaccattcattttctaaattgatcagtttatttatctaaaaatgggatatacattgtacattgttccttaaaccttaaaatagctcaaatagatcaaagttaaatttcattcgcaatgctacgaatttttagagcgcgaaatatccaccttatactcatgccacggctacatgttttctgtcagtgtaacaagattttgcaagagagcgctgcgctcttcgtggttatatccgtaactctcttttggaaaagtgagaaccccccactcaacatcgacattgtgagtttttggatttcagtcttctttcttttctactagagtgtcattcgttgctcggtggttattgctataaaccctaattataattattgggaggcctcttgattgggtgacgtcgtcggtgtgcgtgtgattcactgtgtgccgtttagcttgggctagcccaacttcagctccagctacgttccgtaactaaggtctttgtataaattccgacttcgactccataaagcgttgtgcagtatgccgggcaaggggaacaaccgcgatcgcatccgggatccccgcgaggagatcctgctcgagacgaactttgaggacgacggcggagtcctgacgcgcgcctacaacggaaatccgtataacccgaccatccagaaccgtcggcgcaactcgtaccgctcggatcactccttggacaggtacacggagcgcggaggcgaaggtacgacccggaatccgggacacctcggagcccgcagggcaattaattgatcccaccctcaccgaattccaattgtgtgtacaccttgtgcttgtttccccttacgtgattcactggacagcctgaaagcaccagtcgcgggttcacctgttatcttatcactgtctttttcagtttgtgtgtattcatctttagtgtaccatgcacatatgtttataactcgctttcccactcttttcataacgcattctatgctcgtaactctttagctctattataacactccctaggcttaattgcatagttacaacatttttcaaagttaaatgaaaacacaatgctgaaagaaaacgtcagccttttatagttcttccggtttgataattaaactgataataatattttagattactgtgatcgataattttataaaggtatcccattatcatgtctttatcaagtcttgaatcaaattgttacgaagcgatggcttccgcttatttatttttgaattagccaaaccaaaatttgtattctgaagtcttccatagctttatagaacttttaatgacttgaagagagatattaaaatacaaaggctttcattggtaatgtaattaagaatgtcttcaaacgaagtctttgtatttttcaattttcacatatgtatatatgtatatatgtacattagtagtatttcacctcacctttcatttggaaattaacatttctttacttcgtagacacacaactactttaacattgcattcaaaagtttattgatattatttttcctaaaaatgtttttaggagaatgctgccaatcctgcatggcgcgtattccctacgccaccctgatagccactctgatgtgtctcctgggagtaggaatcttctgcttcaccatgtaccgaggagcctctctcaccgttataatggttgaccaggttttccacctacgcctgatatggtaagtactttatcaggactaacaaacgcgatttactctaaccatctgatccctttaggatcgaagctgtgcaaatgattttcgtaataattggagcgggcatggccgccctcggatttatgatcctgttcgtcggatttctggccaccggagccaccagatacaaggtttaccgggcgtggcggtcgcgagtgggtgggcgaatctcgtgcgccgtccttatggggataacctacctgctaaactttgtgtggagtctgatcctttgtttcctggtagtggttaccttcatctacaccatgttctggaacatgtgcaccagtgttgagcactctcaaagctgcattgatctgacgcaattccgtaagcccttgaatatacataaagataagccatctaatactacttcgatcccacagattttatgttcccgccaaacacgaaactggaggacatgaaggtctgcgaaaagtacgagataaaggcattctgcaaagacggtgttgagaacgccgaggtgatgtttatattggccactctgtccacccttttggtgctgctcagtctggtccactacctgatgtgcctgtctgctaactacgcccacattcgggaccacgaaaagttccaggagctacaggagatccagaacctgaacgagctggagtacagtgccacctcgaaggatcgcttctaggacatatttcagaagattcagtttgagcttaaggacaagtctagcgctctttgagcgatttacgcacaatacaacgaacagtgaaccaccttccaacgaaacccaacatgctatagtttagatttttcatttagacctaagatttatgttgagttttcagttttgctagttcatttaatgagttggtcgctttgactgtttatcgttttattagttgagcagttgcaccatgtttaaactgccaaatcaaatgttacactgaaattatgcttcttatctactgtactgttccactgacttttttcttccgtccattgacttaagttagtttacatttattatttttgcgttttttattacattgcaatcaataaatccatgccaacacaatagtcaggtgcttatgctcaaattgattcttctgaattgccgaatgcattttattaatatacggatagttaatcgccacttattattattacatagtgtaatccatccgtgcatgattgtctttaaaatctgtacaagaaattacttttaatgtgtatatttcactattgcatctacaactttgaagcaatacgaatcctgccgtagtaatttgtaaatgcggtagcatcagtttagtaaggcaatgttagtctaaagattttactaagtataaaagtataaatttatttatctcgtatttaatatataaacgtacgtaacaataatatattttatactaaaattttctaacctcacacttatacaaaaagtataaacttttgaaaatcaaataaagaacttgaggtaaagcaaatatcatagctgtgtgtgttcgaaactggaattgaaatttgaacgtaggcccatactcattaattttacttgcaaatggacaaggattcgcaaattattgaattacaaatacaaagaaaccaatcagtttttgttttcttcctttatactcttttaaaacttacaaaagaaagcatagttacattgaataattttt

SEQ ID NO: 16826 - DNA, 1079 bp, DROSOPHILA
tacaagcatatgcaaaaggctttagaaattccaacgcaactaacaaattgcagtgcagagccacttgcattgccagttggaaacacttaaatgatataacttcatttcggagactggtaaccattcacaatggtatgccgggcaaggggaacaaccgcgatcgcatccgggatccccgcgaggagatcctgctcgagacgaactttgaggacgacggcggagtcctgacgcgcgcctacaacggaaatccgtataacccgaccatccagaaccgtcggcgcaactcgtaccgctcggatcactccttggacaggtacacggagcgcggaggcgaaggagaatgctgccaatcctgcatggcgcgtattccctacgccaccctgatagccactctgatgtgtctcctgggagtaggaatcttctgcttcaccatgtaccgaggagcctctctcaccgttataatggttgaccaggttttccacctacgcctgatatggatcgaagctgtgcaaatgattttcgtaataattggagcgggcatggccgccctcggatttatgatcctgttcgtcggatttctggccaccggagccaccagatacaaggtttaccgggcgtggcggtcgcgagtgggtgggcgaatctcgtgcgccgtccttatggggataacctacctgctaaactttgtgtggagtctgatcctttgtttcctggtagtggttaccttcatctacaccatgttctggaacatgtgcaccagtgttgagcactctcaaagctgcattgatctgacgcaattccattttatgttcccgccaaacacgaaactggaggacatgaaggtctgcgaaaagtacgagataaaggcattctgcaaagacggtgttgagaacgccgaggtgatgtttatattggccactctgtccacccttttggtgctgctcagtctggtccactacctgatgtgcctgtctgctaactacgcccacattcgggaccacgaaaagttccaggagctacaggagatccagaacctgaacgagctggagtacagtgccacctcgaaggatcgcttctag

SEQ ID NO: 16827 - protein, 314 aa, DROSOPHILA
MPGKGNNRDRIRDPREEILLETNFEDDGGVLTRAYNGNPYNPTIQNRRRNSYRSDHSLDRYTERGGEGECCQSCMARIPYATLIATLMCLLGVGIFCFTMYRGASLTVIMVDQVFHLRLIWIEAVQMIFVIIGAGMAALGFMILFVGFLATGATRYKVYRAWRSRVGGRISCAVLMGITYLLNFVWSLILCFLVVVTFIYTMFWNMCTSVEHSQSCIDLTQFHFMFPPNTKLEDMKVCEKYEIKAFCKDGVENAEVMFILATLSTLLVLLSLVHYLMCLSANYAHIRDHEKFQELQEIQNLNELEYSATSKDRF

SEQ ID NO: 16828 - DNA, 2813 bp, DROSOPHILA
aaggctaaacgaggagaaacaaaagttaggcatatagaaatctaggcatgatctatatattcgaggcgaaaatgagaatgaaatgaaattttatgtaattttcgactaaggcaaaggttaagcgaacgttgcgcgtttttcaaaactattcgtactcgtatattcgtattcgatttctctactactgcattaagctgcaagcatatatagctctaaacacaccacacatccattcacacaccatccatcccatgcagtcgagaaacgtattctttaagttgggaacccgagaaacccgtttttataatcgatcgaaagaatgcgcaatttgcgtctaagatttggatttccctttatatacttattcttggccccttttaccacactccccgcccacgcccatccccacccctcgcccctcctaacttaagtttttgtacatacttggaaagcaaatggaaaacccgccgctcgggtggcgggcaagtgtcgggtttcattgggattgtttggttgtgcgttcgaatatgaattcactcgtcacttgcacgcccccacgagggcacaaataaaaatcttcaaaaccccgcaaaattctaaacaaaaaactataaaaatgcaaaaaataaacaacaaaaaaatcaggaaaattaaatgatatgtgtttttcttgcggtgcttgggggaacttcttgttcaactttctgagcgaaacttcagattcttgaaaacggtccaaatattaattaattttgtacttaaaattttaactaaatttattctaaatatctcatttgtttcgttagcaaataactcttaaataatttaaataaatatcttaactaaaataggattctaatttggaagagagaatttgtaatttagatgcattttaatggagtcataatgtactttaccgctctttagagtgttttaattatccagtttatttaaatcattgcaagtagatctttcttaggaagaacagtttagtcttagcttattctttattatgggcgatgatatggttaaggatccagtccaagtagctgctgatgcgggtgaacacggccgggaatcccacttgacatcccatagaggttccaaaagaggtggatccgatcaggtagctggagttgccctgcttgtagaccagcggaccgccagagtcaccatggcaggtggacttgccgctggtggtgctcatgcagatcatcttctccgacacagctccactccagtacatccggcacagggagtgaggcataatgggcatctccacgtatctcagcacgggggaaaccgagtcggaggcatcgctttcccgcccccagccggaggcgaaggcccggatggactcgtacgtgggaaactggccattcaagcgacggggcaaactggcggcccggatgcgatcagtgaaacccacaaaggcgggcaatcgaataagcgagatgtcgttgaccaccgtgctggccatatagttcgagtgcactataatacccgacttctccaccatgatcctttcttgaccctcctcggactcatcaccgatgtttatggcccccaaatagaccgttacggactccgccccatccatgcagtgtgctgctgtgattatccagtagtgtgagatcaaggtgccgccgcaccaagtgctccagttcccgaaggagacgttcagaccggcctggtagggaaactgacccacctccgccggttctccattcgtaatatagggttccacatcggtaaggaggggaacagccgtacaggatcctaccagcaggacgcaaaccaaaagtttcatcattttctaggttcaaaataactgaggcagcgagactgcttcatggttatataggaacgggttaagcctgcagcttgttatctcatgataaggacctcttaaatttcgagcaccctagaccaatgggattattataccatgatcacacaacaaacaattcacttgacttgggatccacccaatgaatcactgcaaattgaaaacctacggcacgtgagatggctaatcaggtattttcaatttaagtagtgcactaaatttaaaatctagttgaacttcgattagcaaatgaggtcacgtaattacttacttattcccagtccttagttgatttgatatcagtacttacaatatacgattgatagcttcacttatatcgcctgtcaacgcgacatccatttttaagttagcaaagaaattgtaacatacttttaattgccggccacttaaaacaagctttcatttcaagttaagagtaagaacctcttcaaaaatacgctcaggtgttttgactattctttgaataaatgctgctatcggaaacccgcgattaatgaaaacatatgtactttaaattgtttcggtaatcaagtggcgttcagatgagtccaaagtgataatgcataatcaggcattacttcttatagattaaccaatttaggggccataaatccgcattcatgtggatggactgcgtcagtggtgcgaatagttgactctgaaaagcatgcaaatcagtacgattttagttttcctgcttatcttggttcagggaaggtcgatctcttgcctggatatgggtcatgggattggagggcgaatcgctggcggggagttggcccgagccaatcagtttccctatcaagtgggtctgagcatcgaggagcccaacgatatgtattgctggtgtggcgctagtttgatctccgaccgatatctgctaacggctgcacactgcgttgaaaagtgagtatttagtgaagcatttagttaatatagtact

SEQ ID NO: 16829 - DNA, 813 bp, DROSOPHILA
atgatgaaacttttggtttgcgtcctgctggtaggatcctgtacggctgttcccctccttaccgatgtggaaccctatattacgaatggagaaccggcggaggtgggtcagtttccctaccaggccggtctgaacgtctccttcgggaactggagcacttggtgcggcggcaccttgatctcacactactggataatcacagcagcacactgcatggatggggcggagtccgtaacggtctatttgggggccataaacatcggtgatgagtccgaggagggtcaagaaaggatcatggtggagaagtcgggtattatagtgcactcgaactatatggccagcacggtggtcaacgacatctcgcttattcgattgcccgcctttgtgggtttcactgatcgcatccgggccgccagtttgccccgtcgcttgaatggccagtttcccacgtacgagtccatccgggccttcgcctccggctgggggcgggaaagcgatgcctccgactcggtttcccccgtgctgagatacgtggagatgcccattatgcctcactccctgtgccggatgtactggagtggagctgtgtcggagaagatgatctgcatgagcaccaccagcggcaagtccacctgccatggtgactctggcggtccgctggtctacaagcagggcaactccagctacctgatcggatccacctcttttggaacctctatgggatgtcaagtgggattcccggccgtgttcacccgcatcagcagctacttggactggatccttaaccatatcatcgcccataataaagaataa

SEQ ID NO: 16830 - protein, 269 aa, DROSOPHILA
MKLLVCVLLVGSCTAVPLLTDVEPYITNGEPAEVGQFPYQAGLNVSFGNWSTWCGGTLISHYWIITAAHCMDGAESVTVYLGAINIGDESEEGQERIMVEKSGIIVHSNYMASTVVNDISLIRLPAFVGFTDRIRAASLPRRLNGQFPTYESIRAFASGWGRESDASDSVSPVLRYVEMPIMPHSLCRMYWSGAVSEKMICMSTTSGKSTCHGDSGGPLVYKQGNSSYLIGSTSFGTSMGCQVGFPAVFTRISSYLDWILNHIIAHNKE

SEQ ID NO: 16831 - DNA, 2932 bp, DROSOPHILA
tttgcaattgtttatgggcaaagcaacagacagagatggcgagtggggcggcagcgaggggcgcgagcgagatggaagacaaaaaatgtgagcgaacggcaaactaaaatgtatctatgagatacatggcctgatcgccagcgctctcgctcgctctcctttggctctctcgcactcattacgtatgagtttgttggttttgttttccttttattttacagatcattcgccgagctttatttaacttttgctctctctcactcgaatttttgttgttgtatttccctggctttacaatccattttttgtttgttgccactctctgttcagttcagttatattcggagtcttaatcatcgcatcggaatgtttactccaagtttttcccccgttccgttgcgttttgttttgcctgctgccgctgctgtcttgtttaaaatatgtaatttattttgctgctgcctctttattttattttccttttatttttcttttttttttttgcttcatttcgcctccaccgatcgcattcctttacacacacagctgcagcacgcaccttttctttccggttcaagagcgcttcggaatcggaatttatatgggttttttttttagctcgtttgccggagcttcctgaatgagtgaactgctgatctctcacctgcgttttatgccttcttaagccactaacaacttgccaagaattttattctattttaatttgattctcaatgagttatctgcttcacttattagccattaagcagcaattggggtttataagcactcttgatagtttgcgatgttaaagcatctataacttatttaaaacacaacctgttggtttggtcattcgttatgtatgcctcatttctgataattgttctagtagttttaataagtttaaactaactttccaaatgcaaatatcttataattatatttcagatcgcccttgtttcaatttcgtttctttaattgaccctttccggaacacttaccaatctctgggatccagccaggtggtcttcttgttgatatgatctatgtaataggtcttgccatcgaaatccttggcgatatcccagccatcgggaagtgggaagtcgctgtggtgttgttgctgctgctgatgatgcgtgtgttgttgttgttgctgttgttgatgatgatgatgatgttgctgttgctgctgttggggtcgcaggtggtggggatgcagatgatgctgcgattgcgatgcggtttgttgcagattcggcattttaactttgtttctcgccgtgtactttggttagtctgagaaaacgtcgttgttgctggatttttcacccgacgcgcgccttttctttcttttcgctattgctatctacgtttgcttcttttttcggggggtttctctttgcgctgtttacattagcaaagacatttcaattccgtttcttttgctccggcgataatggagaccgacccgcacacacacacacacaacacggccacacggtgacgggcgtagaggcacacaccgagccaactcgaatacacacgcgcgcaggggagagagagcgggagagcgcgggcgcgctctcaattatttatttacttttttcgtaactgcattccattccagctcaaacacacgcacacatatgggggacgaacacaagcgcacacgatcactgctcacagttggtgctgcttcttttcatttcttgttgttgcaagcgtttgaactcctttacttattttcttattttcgcctaattgaaactaattaacgacgataatccaaccatccacttggtgttcacaaaaaaatatgtacttcagtttagtgagttcgcgccgtcgccgatctcttcggttccggaattccttgggggagcagcaaaaaacacgagtagcgcgcttgatgaccgtccgattcggattcggaatttgttttggtaacattcgctgctagtggtgtagcagaaaacatcgcattgcatatcgatacactcgcggcgatgttattcgatgtattggttgatatcgatattataggctgtattgacgcggttgcagagatgcgatatttaacaatcatgcacgaaaagtatttattgttatttggcttgtgtagtccccaagcataggtgtaattgttgagggaagaaaataggagttgtacgttcaaagatcggcttggtaacaggaactagttcggttcttcaagcgatgttaatcaaagccagttccgatagatcatgttaactcgctctgttaacaattactgttatcttaatcctaacatttccgttacattttaaaaacagaaaaagaaaaaatttaaaaaaaaagactgtaaactgagttacgcatttcgaaatcaatatgtatcccaaccatagatagaaaaataaattatgtttccgaaacataacttcaataaaaccacaatttcgcttgctttgtacgtttgatattgtatttgcattttatgaattgtaaaaattgagtcaacaagactaacacagcttcagctcaagacacatgcaatttcattgacattgtttaattgtatatattaaaggaaatcaattaggatataaagagagaaacctttttgccgcttatgcgatgccaactatctggatctggattgtctaacacgaaaccctaactaattggtaaattaaacataaattaatcatatcggtcaacaactacaactaaatattagttattagcggataaagagcgccccataaactatttacactaagctttagtctactagagtcccggattccatctccgctcctcggatcttcggatcttaactcagatgttcggatcttcaagttctaggagagaactggtgcagtgcatccgttattcaggcgatactcggcatagaccagtccggtgttgtgccagtgataga

SEQ ID NO: 16832 - DNA, 515 bp, DROSOPHILA
ccgaatcggacggtcatcaagcgcgctactcgtgttttttgctgctcccccaatatcgccggagcaaaagaaacggaattgaaatgtctttgctaatgtaaacagcgcaaagagaaaccccccgaaaaaagaagcaaacgtagatagcaatagcgaaaagaaagaaaaggcgcgcgtcgggtgaaaaatccagcaacaacgacgttttctcagactaaccaaagtacacggcgagaaacaaagttaaaatgccgaatctgcaacaaaccgcatcgcaatcgcagcatcatctgcatccccaccacctgcgaccccaacagcagcaacagcaacatcatcatcatcatcaacaacagcaacaacaacaacacacgcatcatcagcagcagcaacaacaccacagcgacttcccacttcccgatggctgggatatcgccaaggatttcgatggcaagacctattacatagatcatatcaacaagaagaccacctggctggatcccagagattggtaa

SEQ ID NO: 16833 - protein, 88 aa, DROSOPHILA
MPNLQQTASQSQHHLHPHHLRPQQQQQQHHHHHQQQQQQQHTHHQQQQQHHSDFPLPDGWDIAKDFDGKTYYIDHINKKTTWLDPRDW

SEQ ID NO: 16834 - DNA, 2655 bp, DROSOPHILA
gaatgtggtgaaagtatatcccggtggatgtcgcggctatggaggaggtggtttgggtggaggtcttctgtctgatcctcttccacctgtacaacccattccagtgccagtgcgtccgtacgcaccatttgccacctggctatcgctctttgctccaggaattcttaactcggccgtggtgcctggtgttccagtcagagatcctctaagagatccagttcgtcctgctggagatgcgcagagcgatcctgaagtggatcccaactatgcggcacctccgccagtaaggcgacctgttccgaatcgtgtgtactacgattctgcgggagcggtaagttcattaactttaatatattgcgaattttatatttttatttattgttaataacttttttcatgccagcctcctgtgacacctgctcaactagttggaggcgtggccaccacagtaaacggaatcattcagcagttgactggacaagtgcagccagtttaccaaacgggaggctatcggtcaagggatcaacgaagcagctacggataagttactatatatcgaatttgtatgtaaatttgtaaatagttttaagtaataatagtagcgattttatgtacgaaatacgtttacaattatttaacgaagattcctccctcaaataaaagaacgaaagtgtttgtaattatatattgatttcttttagtgtttagcgtagcggtaggtaaagtcttctatgaaaatcataaacaaaaatagcttggtatccgtgtacatttaacctcccagcaagataaacccaaggaattcccagataatttcgaggcaatggattagtcagacttgcgcataaatcttggatctttggccattaaatttatgcacgtcgcgtctgcttcataaaaatcagtgagagaataaccacaaaggcagcgccaaggacaatatttccaataggaaaaccggattttaagtgccttgaattgagcttactaaatctggttatgttttttcgtttattttacaatctacaaagggtcaatcacaagtacttaactatcccggtggcaagatttggcatctttactttccaaagaagccattgcctccatagccaccgcctccatagccaccacctccgtaatatccattcgagtactgtgactgactatagtggccgccataagatccgccctgattgtggtacgatccaccgcccggatagtatcctccgtggtgatgcggcctgtgtccaaagccggagtaacctcctcctggatagtagccacctccgaatccactgcctccgtagccgttatagcctgagtagccaccaccatagccacctgggtagccactcgcatagccaccaggatagccaccgcctccgaaaccgctatacaggccaccacccactccgatgccggcactaagtcctacactgccaccaaatccaccgcccagaaggcccaaggtgctaccttcggtcttcaccggcgccgcctgaccttgaccggcaatcagcaaaagggccagcatctgcaaggtaaccaaatcgattcagtgcatcccaatcggagcggaaatagcagccggacttacacaactcacgcgaaccagagccattgcgataacgagcgcttcttggatgaaactaaattgcaattgtgaagtgcccaccgcttttataccgccgcttcaatctggccaagaagctcaagtacgcgctacgcattgccaagtgattctacgcaaattgcagaacaaacacggcgaaagcgaaaccagtttgtgacgtaactttggaatcccccaagagacactttgcctaccagtgcttcacttggccccagaacgcgttaatttcttgaagtcacaggcccaaaactaaattatcattttttttttgagggttgtctttagttgccggtcgatcaagatcgtggaaaacccaataaaaaaaataatcactgaagcgatcgcatactacaatcacccggtaattttcaagaccaaccagaaaatgttgaaatacgaatataatattccactgtaaccgatagatgactctgcaatttaaaaatataaaattttaaactaagcatatctttaaaaaatttcaatgtaaagaaactaatttcttaaaagtatgagttgataaataataatttacctattaatttagccacttcaaatcagaatgaaaggagtatttaaaggctatataaatattttataaatattaattttgataaaatatttcttttaatgggttacaatagcagggttaaacccaaatgcttgttatgagggtattgaacatcgtcgcaatccactagcatgcaaaacaaatgacttagacaacgaacttcagcgaagaccggcccgcattcgtctggctcattagcacttgttaccttagctattccggcagatctaactaaatgactaacgacgtgtcagcttcgtatgtatgtgcccgacttattttgcttattctgttaaattgacacgccctcactttcgatttcagtttattcacctccagttgacgtaagcgaaccttccaaagtgagaccatcccccaacactactagtcaggaaattatagttagatgcgatgacagcgtagataatatctaacaacgtgcttataaata

SEQ ID NO: 16835 - DNA, 592 bp, DROSOPHILA
atttagtttcatccaagaagcgctcgttatcgcaatggctctggttcgcgtgagttgtatgctggcccttttgctgattgccggtcaaggtcaggcggcgccggtgaagaccgaaggtagcaccttgggccttctgggcggtggatttggtggcagtgtaggacttagtgccggcatcggagtgggtggtggcctgtatagcggtttcggaggcggtggctatcctggtggctatgcgagtggctacccaggtggctatggtggtggctactcaggctataacggctacggaggcagtggattcggaggtggctactatccaggaggaggttactccggctttggacacaggccgcatcaccacggaggatactatccgggcggtggatcgtaccacaatcagggcggatcttatggcggccactatagtcagtcacagtactcgaatggatattacggaggtggtggctatggaggcggtggctatggaggcaatggcttctttggaaagtaaagatgccaaatcttgccaccgggatagttaagtacttgtgattgaccctttgtagattgtaaaataaacgaaaaaaca

SEQ ID NO: 16836 - protein, 159 aa, DROSOPHILA
MALVRVSCMLALLLIAGQGQAAPVKTEGSTLGLLGGGFGGSVGLSAGIGVGGGLYSGFGGGGYPGGYASGYPGGYGGGYSGYNGYGGSGFGGGYYPGGGYSGFGHRPHHHGGYYPGGGSYHNQGGSYGGHYSQSQYSNGYYGGGGYGGGGYGGNGFFGK

SEQ ID NO: 16837 - DNA, 11295 bp, DROSOPHILA
attttatattcttcagaaattttcctgtaaattttcagcatgtagctaaaagtagctaaacattgaactcgttgcttgaaaactttagtaaatcaacattagaaacgaacttttttagctcacacaaaaagttgtaaaaccacgatttttgttatattttcttattaaaaccagaagaaagacaaatatcagaaaagttcaagtttgcttttctcttcaaatcttgttctatttaaaaatctagattattttgctatgtgaacttacctttaattttattaacaccgaattttccctgaatgtgattttgtactgagagcacttccatcttcatagagccgccgttgcaactgctattttgtgtgttttcagccgattgttggatttataatgaaagtctgccgcctgctgctgccaccgaatgcgaatgcgattatataggctataggcgtttgatctcgaccgactttcgatgcgtttaatatattgcgtgggtgtgaatagttgtagtttaacgtacgtatagaaatgcactttaatcacaagaatttgattttacttcgcgtgtggttaggtgttttattgtgtgtttactttgttgtgtgtgtgtatgtggtggagagttcgattttccagcgacagcgttttaacaaacaattggaaaagtatcaacaactaaatttgttattctagttaaacatttcaattcaatacattctaaaaaatcaacgcaaattgccgccccgttcagctctctctcgctattttcttcctctgggctttcgcttcccctttttgtctcgctctgtctggtttcctttttaaatttaagcacagcacatggttttgatttaattcatgacgttcttgttgtttggacagagattttaatttcgtatttatctttgctttgctttcctacatatggcggagtttcaagtgctgatggctgcgtttcgtttgtagaagtattcttttctggttttccgattttctggctctaattcttctcgttctgccccttatgtgccgatgtgctatgtttggcggccgcgtttcgactgcggtttttttcagaagttcgtgtgaagcgtactacaaaattttcactcagcgctcgctcagctgtttctgtttctgtctctgtgttggtgcgagcgagagagcttggaaatagctgaatcagaagaagaagaggaggacgatgaaaaactggaactgcggcaacggcaacaacttcgataacgggacacgctggagagctgagctgagcggagcggagcagttttccaaacagttttccaaagctactatccggccggctcgcgtgctgctgcttttataccaattttccacgccggctgcgctgccggcgtcgcagcttttcattttccttttccttggccgtgaactctctcttgagcgacttggcactcttttgcaaccggtgatcagctgttcttaaagacacttaagagcagttgagcggctcgctctcttgagtgttttagttttgagagttgagcaaaactgtcggtctctttgagtgcattgttttcaaaaataattggtaaagtctataatcccaattgttaattctctttgcttctatctatggatatcatttgcacgtaatataaagtttgttgtttaataacttgtatgttatcttgaagctatttttaacaaaaaatgttttttttttatggaaaaatataatttcagttattcttttaacctaaaatgaaattttcttaatcttaaatgtgttttttattgttagaattaaaaaggtagaatatcaagagaacgaatatgaaatcgaaattataaaaaaaaaaacattgggtttctgcttaagaacccaaatatctaaatattagcatagcgttctgtaaagaaaatcgcaaattgcgagagaaaaaacctggaggcggttttctgtaatttggcattttagtttgttcctttctttttcatttgaatctcgtaacaaaatttatggtgttttggggaatatgccgactgcacagactgatggtattcatatatgtacatatgtatgtatatagtagatacatacataagtacatatgttgatgctcgtatatttggcctttaccggatgacaagacccattgtaccgcctccagttctgttggtaacggaatggaggggagaacaagaaaatggatgaaaatgcttcgccgacacaggacacagggcctgtcactgttttaacaattcatcttaatagaaataaaaaatggcgccgctggcgttggacagtccggctgacaccacccgccccctttctggacaccccatccgcacccctacttatcccttatgccatatcccccttatccgcactccacccactccacccactccccttttcctatttgtcactggctcgttgtgggtgctcctccgctctccattggatcagctttggagaaagcatccgcatttccccttgtctagttgctgctgctgctttttttctgtgtgaagttggggggatttacacatgtcagttaatgctgaaaaaatgtttacacaacacaattgcctggcggagggcgcgggggagtggcacagtgcccagcatggggctactgccgcaccagggtacagagaaaaaaaaagagaaaaatatattccaaaaaaatgaggggattttttcgaagaactcgcctattcagcctacaaaatatgtttccaaactaaacaaaaataatcgcaccatttggcatagatatcaatttagtaaacaaaatcatatcatataaatcacatattttatacaatttttagtaatcttcgctcgcatttttttttcgcgtgcatgccaaaaagttttaaagaccagcgctccctcatcttcttttgaaatttttgttgccacgctgcagcagtgtcgaacaggataaaagtcagtggcatacaattaatcaaatgcatgatttatgtgagtgagttccacacgagtttaacctaaatacgtcccgtcgggaatcagccaaatgagatgttcagggcggcggctaacaaactcacccaccgaactcaagtcagcttaatagacccatccgcatttcaaagacgttcactttacgaaaaattggtaaaaagtatctggaaatgattacggaaatacaactattatagttgctccaagggaatttagctcgttaatcaaaattggattacagcactagtttattttaccaaaatcaactgaggggaatcagcaagtagtttcgtaacaaagaatcaatcaccttgcagtatagttcaaaaaaggttttttctaaatatatactaacgagatgaaatgggttttaaaataaattccagcctaatgcttcttgacttcgtgaagtggggttaagtaataacttaagggctgtattattattatttctcaccccaaaatagctagcagcactaacttttcaaccataaatgctgcgagaacccacatggcatatccatttagttgcgatgttttctcatgatttgaaacttttccacaggtggcaagccgactggaaaaaccgttcacgtttgcagacacacaaatgcacttcgcaaggacaaatgtgatgcggaatgggagccgtaagaattgcttgctaaaagcctcaaccaaagcccggctgccgttggcacttaggctggcaatcctttcttcgcaggatcaaaactcccaattccgaattccgaacggaaccatagaagtttcgctgggattccaaatgggctacaaatgaacgccttttcgtgcaacccaacacccaacgcccaatgccatccaaccattcaaccatctagccatggccattggcatcgccatcgccttcgtcgaatggaccacttagtgagcctttgtggcgcaggaggaaattgtggagccggctcttctaatgcgttgcacgttttcccaataaagtagctacaacaacacgggcggcaatcctttaagttcttcgatacatcgccggggagcaggaaactgaagctgccggagagtggctttttagtttgctcgcccaacgctgcacagagaaaaaaaatggtctcctaattagttgaataatatttaattagctaatttgccataaaaaagttgaaatacaaaactggaaagagccgaaagatatggattttcggaatttagctcaatttatgcgattgttaaattgagcagttgtttatattatttcccttttttttcaattttcaattttccacagtgtagtttttggcgcaaagtcggagaagcggtaactgccatgaacatcgattttcatgtgatttgtgcagacgtgtttgggttttattgattttcacttgattccctccatatgcttgaatatacttaagtcggtacgtgcacatctccatctccatttccatctaccagcatccacagcagctccagctcccttgccatccgcattggcattcggattcgcaacccggaccatttcatcttgccccatccctattccatcccaggtcgctcgttgtcgacagccgccgagcacccgagcagctctaatgtcaggatcatgcgaggttatcaacataatttcgaaaaccacccatccgcaccaggcatcgccatctccgttccacccacaccgcatctttctagtttatgatgtagtagatttctgtttcttttcctgcagcatcaccaagatgatgatgacggcgctagtggtggtggtagtggtagtggaaatgtggtcctgctcctgatgaacaagatgggcgcgtgtgcggtttgataagacgccagcgattcggctccatttcatttgactttcatctgccttacccgggccacgttaaagggaaacagtcccattttaaagggggaacaaaaactttcatttaactttgttaactctgctgcggcagaaagagtttatttttcatcagaaaacagaatcatttgaatttaaattaataatctctttataaaaaaacgaattcttcagcacatcgctcttagcagagaaagacgtaatcagagtgtcacatttggctgtcaatttgtgtttggatggaaatattcaaatttaaagttgattgaacaagatgtgctccaagactccaaaacggaaaccgtcaaaacccgccacaaatattccgaaaggagcagaaagaacaaggcgggcaattgccatcaagtgatggtccccatttatttgtgccagcgctctaaggcaatcaaagggcctgctggcatttctgcatttgtggattcctggactcgttactcatttcgtttcgtttcggctgacatctgacatgattatgtacatttgtcccctgtgtgctggtgacgtcgccccttccaagtcaccgcaaaaactgacgcaatttacatgccatgtagaggatgcactggcagaaattggtagcttaaaggagtgccaactataatatggttattattttcttcgagtttgtaagtttgtaagaaactaagaaatcaagttaattgacaatgcagaaaatgcaagtgactcgactatcagatactccttacaacaattgcttataactttttgatggatgattgggttgcacagatatttgacatgttcgagttaggcgacttaaatgaaattttaatttttcaatgttgatgtgaaacatataattcccaacattttttccagtgcatctcgacgagcccaacgaccagcagcaactctaatctatcagcggtctgtgcgctttgcgcttacctcgaatattttgcacttttccttttggggcgactcctttgagtgctccttagcccggctttctcattcacacttcctgctcgtgttttggtcgcactccacattcgccgggattgcttgccgttgggtggccaggaggacttgcctggcatggcacaagtgtccttacaacattttttactttgtaacgcaaattctgaagtaagcatgaataatgcatgcattgtgtgtaattcttcaagtactttgccgtgccgacgacaagcacacatcagcggaccagttgccacccaaaagccagcgatttcagccaggactaagcccacgaatccttcgaatccggcaaacccacgaatccctcctgtcactacccacaacctatttatatttgactgttttgcagcttgcggcaatggcaattcttgtgctatagctatatgtttgcgggtgtccaaatttattgcaggctttttgcattacaaatttattttaataattccgtatacgagctgggacatttaaataaactactggcgggcgaaaaatggtgatttgtttgcatcgtgtacatatttaagtagcatttctagttcatatctgccatctgtgcaaatttcttgaaagttttatactatgatatttactctttagtacttactgttgattatcataagtattaagtatttctattcaaagtgtaatatatcttaaataataatttaaagcgcctagatatttgggatgtaatcatagttaatatttaaatatattatattgttctattctaaatttgctattcactggtgtttgactaaatcgatattcacttggaaatgcagaacagagcaagaagctaatgacaatgcggtggaataaccgcgacgcccatttaattgagccccatacctttgtacctgaataatgcagaaatcaaacagaaccgacttcgtccactgcattacatattatccattccccatgacgaagacaattggcggcccaaaaccgcaaagcgtttcattatttatcttggccggaaagtaagtgcatatatgtagcattttgccaggttcccacagttgtcaagacatcgcttttgttattgactagttaataatattatgtgcgcctacttagctatgcagttaataccaatcggtggtaatactaaagttgcagaacatctaaaagttcttattaataaaaacccaagcttttattaagccccacttttagccaacttaaaatttcatgtttctttagtttgctggtaaatgctattagttatccctgtgacccgtgctaaattcaaaacctcatcctccttgatggaaattcacttagtcattttcacagccattagcttgggccagaaaatgctgagacgaggaaacgaattccaaattttgttggtccttttgccaattttgttcaggttcgagtcacgtcaagaagtggacaagccccagaacgcgttctgctgaccaaatgagcagctccgagcgctctgcccacaaagtatccaaaaaaaaaaaggagcgaaagcgctgagaattcaaacttttaaaagttttcagcttttcacttgtttcttttcaatttcgacgaagtagctgcgatgggcaagtagctgccgggggaacgctgtggagcgtcgttaatggtttttgcgaaacttatgaaacaaactatacacaggatggctccacagaagtccttcccatcctgtccagccttcagctccagttacccgacctgtgctggccacgtcaacgacatcttttcccaggcgaacgagggtggatacgaaaaatacgaaatcttgaggcaatattttaaattagagcagcttaaggcgttcgcttggtccaattttaaaggagtttttggatatcgaattggcattagaataagtaaatccttttcttagaaatgaaactactaaggatctaaaatatataactttcatgccttgtaatgtatttatttgtagaaataggcatttaaatttctttcgattttaagatgtattgaattgaatcagatatattctaagtgtgattaacaaatttacttatagggcttcccgagtaaccctcgcccaccaagggcagtgtggtgtcacgtactttcacttttccaactccgaccactttccgttcggaaaatggccgaagctcagcgtcaatgcggcgtccttcgaaaacgaacctattcaaagccttcatgcgtttgaattctattagctcaagaaaggattttctgtgctttggctcccagatggagctggaacttaactggactgggttgggttgggtttcttggcttcggttggcttgggttgggtccacagtttgctgtcacaagcactttttcagcgttacgttcgccgtttaccccggggtgtattttcatcatactcattcccatttctggccatggtcggcgaggtcctgctccaagcttccttgttcctatgccaatcccactgcctttgccactcccattcccggtaccgatgattctggtcgtgccatgcacatccaattgacatttcagcttaagtcattgtgtaaggcagcagcaacaaagggagcgccaacaaaacggaaggcaagcaaagtccggacaagtagcaagccggagctgtccgccgttcaaacacccggatccagcgaccagtgatgccgccggcctactggtaaatccgtgtaataccatccggcaaatgagtaagtagactgccgtgtccgaaggaagctacatctatttaatttaagaacgaaaagaactatagatgcatttttctagagactcaagcaaacaattaagatgcagcattaaataaaaatattaagatattcattacaatttactatatataaaaaagagtaactttgttgtttaataatatataaagataacacacatattgaatcttattttgttttattaatgatttttaccacattgctatgatatgatttagacaagcttttcgccgacaggatgggcatctctggacgaaagcccaatcccctccagctgcagaatccgtacacttattctgctcactgtgcgaaaaacaaagccgaaagaaggaagtaaagtgcaaaagctgcaatggcaacaaaggcgcacacaattaccgagcagtgtgtccgcccagcgccacccattgggtcactaaatggaatgagtgggtggctggctggtggggtgggcaaggacgatggagctcttggtcgaactttcgtgtttacacaaaaacatttagactgatcccggcgcatagtggggtgctagaatgtgggttaatggacgaggaaaagggttaagagcgagggaatgcgggatttcataagattgatggggaagaatgcgcaggcgaattctcctgtgtatgcaggataacgccgtagtttccctgaattaacatccgattcgaaagtatgccctttgagcatcaacattctgttcattcacggctcacggtacactcaacaaatctgcttagcaggtattcaacagctgggaaatcaagtttgtgttcatttcatgcttgacttaaatttaataaaaaataatacgttatttcttttgtttctacattaagaaagtcaggacctccaattaagctccggaattttactcacatctttaatgttcgacatttcgttagcagctctgatgatttctcaacggtcgccattaacaacgcggcaaatgaaggcaatatctcaaatggaaccacataaacgaaataataaataccaaatgatttcataatgaaatgtcgggatgggcaggatgtcattcggcactcgcctagaaacccacgcacaacccactgtcttcgtccttttcgtcctgcgctgtgctgcgctgtcctgtcctgtgctatccccgtcatcatcccggttggcatttcttttattactgaaattgcgaaggagaaaataaaaaaaataaaaaaaaaattcttaatttcgtttcgtttcatcagcagcagcgacaagatttacaacatactgtgagcataaaataaaaatcttatttttgttcgaatgcttcgttggagggtggacatgcggcgagcgaaataaataaataaaataaaaaaaagccaacgaaatagaatgaataaaaatactcaaacgtacaaaagccatccgcccattgtctgccgaagattgtggggcgtggagccccttaatagttatgaagggggggggggcgcccagtggatatggccatcctagttcaggatacggaatatgttggggttccactttccgagcgaatcacgcaattggaacgcatagcgaatgcaataaaacgcacatgtgggccaccacatcgctcctgccgtctcataatttctgtgcggttggcaaatgaatttgattttgagcgaatcgtcctggattgactcgcagccactgtctttactgactgcaaatttggctccacatggtttttagtatgcaagtgctgttcgcgatagaaatcaagtggagtcatcgcagcgatcgagaaattgtcactacttcaaaggggcaataaatagttttatgatttttaaatcctaattaaatctagataaaatattcttgcattgtttgattatcaaaagttgctaagttacttataccattttcatcaaatttaaacgccttcaaagcgcaactgacaccactgtaaatcacttttggtttgctcgatttggagcaggcttttcattttttgctgagctcggatattgcactggattgctctgaccgctcagttgaccttttccattgtgaaaattctgggacaaaatgaaattcccaaagttcttaacaaaagaaaccgaaatcgtattgacgtaataataatttataacaccagattttcaaagcttcgcaagaatggtacgaaaaatgcagacttcattagagtgaatgtcgctcactgaacttaacgacggaattaagaatattttcacttaatatttatattatttatcatgacacttttcaataatgaacgcttaagttctttgtatgtattcgctgtagattgactgactgctgagatttattcggcatgtggttttagcttactgaatcaaaatccttccgacgaccacctgctggttgccatcgcgattcaatttggcagatatttaacacatcgcttcaacacgcccaaaaaaaaaaaaaaagcgaatgatatgaatgccgaggcggacgatatcagaggtcagaggaaactcgcctttggttggggaaaattgtgcgacaggaggaaaataattcaatgcaaaggaaacaacacaacacaagcacgcgctgatgaatggaaggggagtgagaatgggaatgggaatgggattgggattgcgaatggaattggcactgggagtgggagtggtagtggtattcaagggactcaggactttggattcggggctcggtattcgggggcgtggaatcggaaaggcaaaggacaaacatgccatgagcaaaggacaaaagtc

SEQ ID NO: 16838 - DNA, 1818 bp, DROSOPHILA
atgactccacttgatttctatcgcgaacagcacttgcatactaaaaaccatgtggagccaaatttgcagtcagtaaagacagtggctgcgagtcaatccaggacgattcgctcaaaatcaaattcatttgccaaccgcacagaaattatgagacggcaggagcgatgtggtggcccacatcaaactgtggacccaacccaagccaaccgaagccaagaaacccaacccaacccagtccagttaagttccagctccatctgggagccaaagcacagaaaatcctttcttgagctaatagaattcaaacgcatgaaggctttgaataggttcgttttcgaaggacgccgcattgacgctgagcttcggccattttccgaacggaaagtggtcggagttggaaaagtgaaagtacgtgacaccacactgcccttggtgggcgagggttactcgggaagccctataactatagcacaagaattgccattgccgcaagctgcaaaacagtcaaatataaataggttgtgggtagtgacaggagggattcgtgggtttgccggattcgaaggattcgtgggcttagtcctggctgaaatcgctggcttttgggtggcaactggtccgctgatgtgtgcttgtcgtcggcacggcaaagtacttgaagaattacacacaatgcatgcattattcatgcttacttcagaatttgcgttacaaagtaaaaaatgttgtaaggacacttgtgccatgccaggcaagtcctcctggccacccaacggcaagcaatcccggcgaatgtggagtgcgaccaaaacacgagcaggaagtgtgaatgagaaagccgggctaaggagcactcaaaggagtcgccccaaaaggaaaagtgcaaaatattcgagagctgctcgggtgctcggcggctgtcgacaacgagcgacctgggatggaatagggatggggcaagatgaaatggtccgggttgcgaatccgaatgccaatgcggatggcaagggagctggagctgctgtggatgctgcgttgggcgagcaaactaaaaagccactctccggcagcttcagtttcctgctccccggcgatgtatcgaagaacttaaaggattgccgcccgtgttgttgtagctactttattgggaaaacgtgcaacgcattagaagagccggctccacaatttcctcctgcgccacaaaggctcactaagtggtccattcgacgaaggcgatggcgatgccaatggccatggctagatgaaaggattgccagcctaagtgccaacggcagccgggctttggttgaggcttttagcaagcaattcttacggctcccattccgcatcacatttgtccttgcgaagtgcatttgtgtgtctgcaaacgtgaacggtttttccagtcggcttgccacctgtggaaaagtttcaaatcatgagaaaacatcgcaactaaatggatatgccatgtgggttctcgcagcatttatggttgaaaagttagtgctgctagctattttgggaacagctgatcaccggttgcaaaagagtgccaagtcgctcaagagagagttcacggccaaggaaaaggaaaatgaaaagctgcgacgccggcagcgcagccggcgtggaaaattgctatttccaagctctctcgctcgcaccaacacagagacagaaacagaaacagctgagcgagcgctgagtgaaaattttgtagtacgcttcacacgaacttctgaaaaaaaccgcagtcgaaacgcggccgccaaacatagcacatcggcacataaggggcagaacgagaagaattag

SEQ ID NO: 16839 - protein, 605 aa, DROSOPHILA
MTPLDFYREQHLHTKNHVEPNLQSVKTVAASQSRTIRSKSNSFANRTEIMRRQERCGGPHQTVDPTQANRSQETQPNPVQLSSSSIWEPKHRKSFLELIEFKRMKALNRFVFEGRRIDAELRPFSERKVVGVGKVKVRDTTLPLVGEGYSGSPITIAQELPLPQAAKQSNINRLWVVTGGIRGFAGFEGFVGLVLAEIAGFWVATGPLMCACRRHGKVLEELHTMHALFMLTSEFALQSKKCCKDTCAMPGKSSWPPNGKQSRRMWSATKTRAGSVNEKAGLRSTQRSRPKRKSAKYSRAARVLGGCRQRATWDGIGMGQDEMVRVANPNANADGKGAGAAVDAALGEQTKKPLSGSFSFLLPGDVSKNLKDCRPCCCSYFIGKTCNALEEPAPQFPPAPQRLTKWSIRRRRWRCQWPWLDERIASLSANGSRALVEAFSKQFLRLPFRITFVLAKCICVSANVNGFSSRLATCGKVSNHEKTSQLNGYAMWVLAAFMVEKLVLLAILGTADHRLQKSAKSLKREFTAKEKENEKLRRRQRSRRGKLLFPSSLARTNTETETETAERALSENFVVRFTRTSEKNRSRNAAAKHSTSAHKGQNEKN

SEQ ID NO: 16840 - DNA, 3942 bp, DROSOPHILA
ctccaccgagccaaaaggaaaaaataagacaaaattgaagaagaagaagagaagtctcgggcccctttgggcaacaacaacagtcccacaaacacattatcctacagcaataatttctctttccccggcgaacaatgcagcggaacaagaactgaactgtacacctagcggaaaaatgtgccgtgaaatttgaggaagaaatttctaagatacccataaaagttcgaataatgacaagaaagatcgacaaaaaaacgaataattatttaaacacctttagtatttgatgcttatatcaaatttttaaatcaattttaaagtcatacatttgggtatagtcacttatcatgtaagtccttgctcctttttcgacataattaatatttcaattttttcaatatacaatacattctataatttcctattgacaaaataattttccctatttttttcgactgcaaggaaatggagatatgtcatttgcccggctgcagaacgatccgaaatcgaaggagccgccagagaaatgaagatcgatgccacagggtagtccctctatcctctctccttcccaatccctattcccatcccaaatcctctcccttttccctctcttctgcttgagcaacatgtgcgccgctttgtaacgccaattatggtcccataattcctgggcattgtcagtttctgtgggagcacaaaagatgcgctccgggaatcggaatcgaaatgggaattacaagatacaagatcgtttcacggcgagagaacgttctcagcgatgcgtatccgagcggcaaatgagcaagaagagaggagtgatcgagatcttggccaggtagatttggatttacactccggaccggatgggatcggatcggatcgactcgagtcggctcggttcggttctctcttgagtggaatggagttaaactcgtggagctgctcggcttgaccgctcgacgatcggccgctcaaatcagtttgtttgtagactcagacgtcgacggacgtgtgcgttcgtttaaagaaaccggagactaagaacgatccacgagatacagataccgatatcgcagcagtgaaagtgtgccgcaacggatacaacagcagagatatagatacaaatagagattacacccgccagtcgaccgatataaaagtaaaccatggaggaattgccgcgcgcattaaactacgaactctcgcacgatttgcatttcgatcattacgccggtgccgcagctcagaagattctgaacagcgggagaagttctcctgaagcctccaccccgaccatcaccacattggatgccatctccagcagtgatttcctgaaacagattggccagcagatcctcagttccatccaactgaaacatcagcatcagctcaacgaagtcagccatccgaggaattccaccagcgaggagatcatggatttcgatctggccaatcgggtgattctggacagcagcagtgtggatcagctgcagcagcagttggagtacgataaattcatgaacgaggtgtggatcggcatcgtcttcaccctgatcctcatctcgatggtcttctgcatctgctcctgcttcctgtaccatcagttccgcacctggaaacgcaattgtaagtattccgcattagaaatgggaaaatgttcatatggcatccgtatatatttgttaattgagattaagatcttatcgactgcctgttttgattagccagtactgccaaaaaaaaaaaaaaaaaaacactcacacaattcaagccacataaacaagtcgaaattccaggccattataaacgattttattgctgaaattaggtgacctgacttcaaccgtcatcagggaaatatactccattagaagtggaaatcttttcgtattttattccgtcttaagtgcttccacatctctaatgattcactttgttacgtcaatctatttttttttttttttgaggtcgtaaaagcgaagtatttcgttaactgtcgtcaggttcaagaacaaacaccaattttctgtagttcgtgatgcggcctaaaaagtcacgaaaccttggaaaaaaattagcacatcgccaacgaaatggcagaaaagtgcggcaaaaaatttcagagaaattcgtctacctcgagtttaattcgaaagcggtgccaaggcaattatgaaaaagaatgcagcgaagagaaaatatttaaaaagttaatggaaatgaaagccagcaaatagggcaaaacaaatgcgggcagaagcaattgtaatattgcaactgggtcgaggtcttcattaatctcgcccagtcaactccaatccaacgaaggcaaatactaataaacaattattgttctttgttttgcagatcgcaacaatgcaaatggctcgacgcagtgcaccattgtagatatagaggcgttgaaactgcatccggatgtggaggatccggttccggaatacaccctagtatctggattgcccagctacgaggcggctctggagctgctacaaaaatccccgcagtcatcctgcctgattgtctatccgagtgtgttcaatgtgttcaataagcaggagaggagcagccaggagctgcagcatccaggagttgcaacatcagcacctccagccgcacccgagaatcacctggcaccgcagacaccttcgttttgtgatgccacaatgccgctgctcccagcaacaacagcagcagcagcaacacatgcagcagcaacagtaacagcagtaacagcagcaacagcaacatctgcaacattggcagcttcgcccacgtgcgagtcgattaagccaaactttgtgatgatgccaattgtgcccagttatgcggaggtattcggcagctcgtacaaaaccgtcgacgagaaaaagaaatcgaagtcaaaagacagccagtcgaaagacgatatcaagcggtaaaggtaaaagtgacgagaatacgaatacgaatacctagccaagcaactgagctctgtgatattttcatgttcatgctggaaagacatacccatatgtaattaaactaagcgctgtgattatcaaaaagacgtaactaaacatactactcgctactaaatgtgttagctgaatagtttcgccacattgtacttaatgatatcgtatccagtacttatggaaacgcaaagatgcatattgttactagacttaagtaggccacaaactaattattaataaattatacacctaacaatttaaattatcgttggtttaattattactcgaataacaagctctctcttaaagctagaagcaccgaatggagctcttcatctgccgccagcttctttgattattatttcgccatcaatcagttgacattcaaattgattcattgatgctgcagcaactgatttgattgacgccaggaacagatggcatacaaatcctttcgccaggcggtgccactccccacttccactgagctttgtaaatagcttccagcttcggatgccggagcacaacatcaacaatccggcagattgagatagttgtcgtagatagatagatagatggatagatagacagatagagacagttcgatttgacattgagctaaggacgtgatagcttattcgactgccggtgcttgcagtgcgctcaatgcttttgtgcaattgtaatttcgcattgataagctagtaaacccatgtataggtatgcaaatcgctggcagagacaatagacataataaatgatctcaaacactgttttcctagcatcgatgctaagtcggtggacgtgactcccagttaaccccgtgctggaaaacgtggacgcttccgaaggcaatgcgaattgtggtaggtcttgggttctatcgctctatctttaagagtaagaggtatttcaaatttatttctattttatttttattctacgctacacggtcccgcattcc

SEQ ID NO: 16841 - DNA, 1201 bp, DROSOPHILA
acgtcgacggacgtgtgcgttcgtttaaagaaaccggagactaagaacgatccacgagatacagataccgatatcgcagcagtgaaagtgtgccgcaacggatacaacagcagagatatagatacaaatagagattacacccgccagtcgaccgatataaaagtaaaccatggaggaattgccgcgcgcattaaactacgaactctcgcacgatttgcatttcgatcattacgccggtgccgcagctcagaagattctgaacagcgggagaagttctcctgaagcctccaccccgaccatcaccacattggatgccatctccagcagtgatttcctgaaacagattggccagcagatcctcagttccatccaactgaaacatcagcatcagctcaacgaagtcagccatccgaggaattccaccagcgaggagatcatggatttcgatctggccaatcgggtgattctggacagcagcagtgtggatcagctgcagcagcagttggagtacgataaattcatgaacgaggtgtggatcggcatcgtcttcaccctgatcctcatctcgatggtcttctgcatctgctcctgcttcctgtaccatcagttccgcacctggaaacgcaattatcgcaacaatgcaaatggctcgacgcagtgcaccattgtagatatagaggcgttgaaactgcatccggatgtggaggatccggttccggaatacaccctagtatctggattgcccagctacgaggcggctctggagctgctacaaaaatccccgcagtcatcctgcctgattgtctatccgagtgtgttcaatgtgttcaataagcaggagaggagcagccaggagctgcagcatccaggagttgcaacatcagcacctccagccgcacccgagaatcacctggcaccgcagacaccttcgttttgtgatgccacaatgccgctgctcccagcaacaacagcagcagcagcaacacatgcagcagcaacagtaacagcagtaacagcagcaacagcaacatctgcaacattggcagcttcgcccacgtgcgagtcgattaagccaaactttgtgatgatgccaattgtgcccagttatgcggaggtattcggcagctcgtacaaaaccgtcgacgagaaaaagaaatcgaagtcaaaagacagccagtcgaaagacgatatcaagcggtaa

SEQ ID NO: 16842 - protein, 226 aa, DROSOPHILA
MNEVWIGIVFTLILISMVFCICSCFLYHQFRTWKRNYRNNANGSTQCTIVDIEALKLHPDVEDPVPEYTLVSGLPSYEAALELLQKSPQSSCLIVYPSVFNVFNKQERSSQELQHPGVATSAPPAAPENHLAPQTPSFCDATMPLLPATTAAAATHAAATVTAVTAATATSATLAASPTCESIKPNFVMMPIVPSYAEVFGSSYKTVDEKKKSKSKDSQSKDDIKR

SEQ ID NO: 16843 - DNA, 6905 bp, DROSOPHILA
gatcatagcgtgttcccactgcactagcagttaatgcagccctggtgattaatcgccgagaatattgccatccgttgcaaatgcagagaatcatggcaaaattattcttatggttttactaccgaaacaatgcctaatgagatatgtaacttgcatttgaacaaattctcttatatttaaaccgatcccacaataagctgagcccattttcgcgtaatgaatataattcgaaatcataaacaacgtcggaatatgagactcgatagccgtgttatttaataattaaaggagttcagcgagtgcgtgcgccgagagtcgtaataaagaacaacgtaagccgccaattttgccggcaataaagttattaagaagtggtgtttacataatttactcccaaaaattggtaagtccgcagcaaagaaaataaagtgacccacatacttacattgatacttatgaatgcatgtatgtatatgagtaggtgtttgccttatacatgaaggcacgcagacaaccttggactctcacacacgtcaatgacaagcaacagtgcaaaagtagtgctggaaagtgtcctcgaaaatccttaatgtctattttaaaatctattttcctaagtatctgaaatttcgttttataattgcaattatccatcagcttctacgccacttcctggaactttcgctatcccccttgttatattcttcagggtagttcatacatgagcaagtaatttagtgccagcaattaaaaaagttcagatcatgtttaatcatttttcaaagggcaatattcttttagttttaaagaacaaaccaaaataaaaaaaagtttgttattttccgcaaacacctacagtgtgaccagcgtctttggtcggttaaatgacagtaacacgcgttcttccgccttttgccccataccattttcggtcacacttgccacttcattataaccttaaaatgacaagttataaattttttttatgttaattttagtggaaaccgaacactagattgacttttaaaagctgtgccgcagtgtgccgaactttttcgatagtctgggcatcttcggcgtcttaaactggcacatatgcaagataatcatgtaaagaaatcgtcacacgaatatgtgcttgtgctggttggcagcgatgtaaataaaatttaagctgctcccgagtaaaatcttgccgcaaagtaaaaaaacttaaacgccgaagtgccacttgtagcaaaagttcgcggacagcgaagtctcagcacgaaccgtagagaactgagcgtgggtctgcgagttctccaagtccaaccgccaagacgctaagatgcatgcatcctccgcggcggccactgcacttgtggagtactcggacgtcagctcagaggacttctcggatcaggaggcaggggacttggatgcggacgccggcaagggtgccggaaacatcaaaaaaccgaagccagctccggataatcagttctccaaaggtcgtcttgatgccaagcccgataaagagggttatgataactacaggtaagagaaggaaaattgatgtataagcgacggtaactacagcccctccatgcagaagtagaagggcggaagactcaagcgacccagtggcggccggatcgaggcaaacgtctagcagcgaggccacgaatccgcgggaggaaccttcgcaggcatccaacacctcgaaggacgagctgtggggcagagagatatacatgtccagcgattctatcgacaccgatgagctggaggcggaaatgaagcggcagaagcgcaaaaagcagaaaaaggaaaaacacaaacacaagtcgaagaaaaagtccaagaagcgcaagaagaagcgggccaagtcatactccagcatcgattcgatgtcagacaatgacatcaatgccttactggaccggcgctatactccgccgacggctcctagcaagagcaacgaacggacggttagcgctgcgccgtcctccttcaccccacacaacctcaaggagagcagttcgccagccactccaccgccagtgcgtcgcccgaatacgaacagcaactactacggcgagtcgtccctggagacggccaactctgcactgggaagcaacctgcaggtcacagttacgaataagcagtcgatcagcaaccggcttcgttctcctcctccgtcctcccgctccagcggcaacgggccgaggtttggaaactccccgcgaactccaccgccctctcactacagctccagtggcggaggaggggttggcagtgggtcagtggtccgcgattcacgcagctcccgctatgtaaatagtccccacaaagaggatgtaagtgcgcatcaccgctctagccacgatcacggatatcagggacgttactctggtgctgggtcgagcagtcacgataccaggaaggtgaaacgactgtcgccgggtaagtttgattttaattaaggcaaatgtggtttacttactttggaaaactgtggcagagctggaccgctacaaccatcagccaagcacgccaccccacaagcgtcggaagtttagcgatggcagggaagtgggcctcggaaactttgagcacagtagacaccactctggaaagtacgaacgatacagcagagatcgatattctaggcggtcatcaaggtaacgtttttcctatattttatgtgaatagctctaattacctactgacttcgcttattattaaatactttaattatttttgaagtgtacatatgtgagtagtgcaatggtaattagaactaattatttaactgaaattgtatttcgttattattcatatatctaacaatacaattttccaaactatatcaaggagccccagtgtgcagcactcacgaagtcggcaatctcccagcggcggcctgtcaagtggttcgaacgcgtttcgccatggtggcagtcacaaacacaagtatgggaccactgttagctcgacgccgtcgcatacgacgaggacctcaaaacgcgcttcgggaactggtacctctggcgatcgctactcgaggtcgcccagaacaagttcgcggtacatggagtcatcaccgccatcgccagtcggagcttccggttcgcatcactatcatcatcgccgttcgccaaggatgcgccagaggaccagaggcgacagtcgtcgccggtcgcccagttcggccagcagcgaaagttctgcctctcgcagccgatcaccaacgtcaagagatctaaagcacaagcgcgaagagtacattaagaagatcagtgagactagcctatttgccgagctggtaaaggatcgtcacaaaaggcagaaggcgctgaaggaaatcattgagcggcaagaggagaacagcaatagcaacagcaacggtgcactgactattaacgacaacagttcctccgtggatggcaatacacccaacgcggctgatggccgatctgcccctggaagtggaacaccagcagcggcgtcaacaacttccaatgggcttcaagctttgggtagcaagccggatctggacctcaacaacattcccatgccaaacaagcagaacgattctgtggtttcgaatccggcttcaaacgccgatgttccggacagtgtcgcgcagttgaagcaacctttgctggtgccaccgttctcggctagtaagaacaacataaaaccgaagagcctgacttctttgccgctgccgccgggtatgaatgtgctcgacttggccggtgcaaggtctccctctccggggcaaaagaaggaatcggacgaaaagaacgttacttcaagcggcagcgccaacaagagcgtgctcaatcttcctatgccgccagtaattcccggcagcgaagagcttagtggcgatgatgatgttatcgacagtcctgaagactttgatgcacccgcggttggcactgtgcacggtcacggtggtgggccagggacaactcgtcagcgcccagtgatactcaaccgtcgtgactcgcgaaacaacgtacgcgactggggcgagcgctgtgtggatgtttttgagatgattgcgcaaataggggaaggaacttacggacaggtaaaaatgggatgcttggtggatcttttgattaaatctgattttctgtcatttgctttgcaggtttacaaggcgcgggatcatcataccaatgacatggtagcactgaagaaggttcggctggagcacgagaaggagggctttcccattacagctgttcgtgaaatcaaaattctgagacaacttaaccatcgcaatatagtcaacctgcatgaaattgtgacggacaagcaggatgctgtggagttccgtaaagacaagggatccttctacttggtgtttgagtacatggatcacgacttgatgggtctgctggagtctggcatggtcgacttcaacgaggaaaacaacgcaagcattatgaagcagctcttggacggcctcaactactgccacaaaaagaattttctgcatcgagacatcaagtgctcgaacattttaatgaacaacaggtgggaagataatcatttgggtggcttatgttggtgggtggcttaagtgcacgagcagttccgcgcattgctatcgatattacccttacaaacatacaaaggcaatattcataaccagccgtcattctctaatcaatattatattattctctgattgagtccaaaaagggattcattcttaaacgctttggtgttaaataatccttaaagtttacaccaatttctcaagcatatattttctaaatttagttttcttataatatttattgacaatattgaattactttgcaggggtaaagtaaaactagctgactttgggctggcacgactatacaatgcggacgatcgggaacgcccctacacgaacaaagtaattaccttgtggtatcgtcctcctgagcttttgctgggtgaggagcgttacggcccgtcgatagacgtgtggtcctgcgggtgcatcctcggcgaactctttgtgaagcggcccctgttccaggctaatgcggaaatggcgcagcttgaaacgatatcaaagatctgtggatccccggttcctgccgtgtggccgaatgtaattaagctgcctctgttccacactctcaaacaaaagaagacgcaccgccgccgtctacgagaagactttgaattcatgccagcccctgcacttgatctgctggacaaaatgcttgatttagatccggacaagcgcatcacagcagaagacgcgctccggtcaccgtggctaaggaaaatcaaccccgacgagtgagtacacatggtcttaaaccctgtgtacatctcaagcatggaaataactttatatttttgcagaatgccaacgccacaattgcccacatggcaggactgccatgagctttggagtaagaagcgccgtcggcagatgcgggagcaacaggagtcgcttcctcctacggtgatagcctcgaccaaataccaacagcatggagcaaccatggtgggggatgcttagcatttgctgtttgcttcgctacttaatgtgaaggagagctacatacagcgtgaaggcgaggagtgttcctggtggcactagtaactagccgtaactagcaataacgtaaccaataagggattctgttatccctggacagggccagaataggttgacttagacttgctctagctctgtcgagttaaagacagcttcaataaagtcttggctacatttataaaatgctttatatgttgggaaaattgaatcaatcgctgtataaacgagatgttatatattcgcaaagataaatattttaaaaatgattttatacatattttactattcaatttaattgctattagtttttttatttttgaataaactggcaatctgaagacaacgtgcatgatcgagaataaaaacttcgcgtaacgaaattgtaaactgttaacacagtacgtattcgcaacagcaaaggcgatttgtaagtgaccatgtttcaaagctacgaaataagcatatataacgagcagttaaagattagcattttaattataaagaacttgttaaataataatagactacagatagtgtattgactagtttagtttattgttaagtatgtaagaaaggtgtaaattataaatgaatttatcaagtaaatatgtactatgtatttacccaagcacaggcatttgataagtttatattttaatatgatgttagaacgcacacagcatcagatttactttgcatgatgtgcgtgagactgaaatcaattcactttaaattgtgtaaataggttgaacatttctaacattacacacgatcaaacaaaattacaatctccaaatgcaaatcaaattgactaaattcattattggtacataaaatcctacccaaataaaagttaaacatacgaagtgtactttaaattaattgatagctgattcgaatatttttctcttaatgtgaaatagattaaatagattttgaaaggtgtaaacggttttcatttaagaaatcaattaccaagtgggaaattggtcctaaagttatccattttttctgtgccaggtttttaagactaagatatgatcaatcactttacaggaaaaaaattttttttttaatagaaatagtttttgtcacaaatgtattcaacatattattaaacaaaaagtttcaaaagaagggccaccaaaatttatgtaaaattttctatagctgtgccgttaattacttaaaatttaattatatttcaaaaataataaaaaatcatgtggtatagttaagttgagttagaaaaagtgttcatttaaatttgaaaagcatattagcgatacggccactcaaagtaagaaatctggtatttttatcgttcgtgaacaaa

SEQ ID NO: 16844 - DNA, 4179 bp, DROSOPHILA
gaaaccgaacactagattgacttttaaaagctgtgccgcagtgtgccgaactttttcgatagtctgggcatcttcggcgtcttaaactggcacatatgcaagataatcatgtaaagaaatcgtcacacgaatatgtgcttgtgctggttggcagcgatgtaaataaaatttaagctgctcccgagtaaaatcttgccgcaaagtaaaaaaacttaaacgccgaagtgccacttgtagcaaaagttcgcggacagcgaagtctcagcacgaaccgtagagaactgagcgtgggtctgcgagttctccaagtccaaccgccaagacgctaagatgcatgcatcctccgcggcggccactgcacttgtggagtactcggacgtcagctcagaggacttctcggatcaggaggcaggggacttggatgcggacgccggcaagggtgccggaaacatcaaaaaaccgaagccagctccggataatcagttctccaaaggtcgtcttgatgccaagcccgataaagagggttatgataactacagaagtagaagggcggaagactcaagcgacccagtggcggccggatcgaggcaaacgtctagcagcgaggccacgaatccgcgggaggaaccttcgcaggcatccaacacctcgaaggacgagctgtggggcagagagatatacatgtccagcgattctatcgacaccgatgagctggaggcggaaatgaagcggcagaagcgcaaaaagcagaaaaaggaaaaacacaaacacaagtcgaagaaaaagtccaagaagcgcaagaagaagcgggccaagtcatactccagcatcgattcgatgtcagacaatgacatcaatgccttactggaccggcgctatactccgccgacggctcctagcaagagcaacgaacggacggttagcgctgcgccgtcctccttcaccccacacaacctcaaggagagcagttcgccagccactccaccgccagtgcgtcgcccgaatacgaacagcaactactacggcgagtcgtccctggagacggccaactctgcactgggaagcaacctgcaggtcacagttacgaataagcagtcgatcagcaaccggcttcgttctcctcctccgtcctcccgctccagcggcaacgggccgaggtttggaaactccccgcgaactccaccgccctctcactacagctccagtggcggaggaggggttggcagtgggtcagtggtccgcgattcacgcagctcccgctatgtaaatagtccccacaaagaggatgtaagtgcgcatcaccgctctagccacgatcacggatatcagggacgttactctggtgctgggtcgagcagtcacgataccaggaaggtgaaacgactgtcgccggagctggaccgctacaaccatcagccaagcacgccaccccacaagcgtcggaagtttagcgatggcagggaagtgggcctcggaaactttgagcacagtagacaccactctggaaagtacgaacgatacagcagagatcgatattctaggcggtcatcaaggagccccagtgtgcagcactcacgaagtcggcaatctcccagcggcggcctgtcaagtggttcgaacgcgtttcgccatggtggcagtcacaaacacaagtatgggaccactgttagctcgacgccgtcgcatacgacgaggacctcaaaacgcgcttcgggaactggtacctctggcgatcgctactcgaggtcgcccagaacaagttcgcggtacatggagtcatcaccgccatcgccagtcggagcttccggttcgcatcactatcatcatcgccgttcgccaaggatgcgccagaggaccagaggcgacagtcgtcgccggtcgcccagttcggccagcagcgaaagttctgcctctcgcagccgatcaccaacgtcaagagatctaaagcacaagcgcgaagagtacattaagaagatcagtgagactagcctatttgccgagctggtaaaggatcgtcacaaaaggcagaaggcgctgaaggaaatcattgagcggcaagaggagaacagcaatagcaacagcaacggtgcactgactattaacgacaacagttcctccgtggatggcaatacacccaacgcggctgatggccgatctgcccctggaagtggaacaccagcagcggcgtcaacaacttccaatgggcttcaagctttgggtagcaagccggatctggacctcaacaacattcccatgccaaacaagcagaacgattctgtggtttcgaatccggcttcaaacgccgatgttccggacagtgtcgcgcagttgaagcaacctttgctggtgccaccgttctcggctagtaagaacaacataaaaccgaagagcctgacttctttgccgctgccgccgggtatgaatgtgctcgacttggccggtgcaaggtctccctctccggggcaaaagaaggaatcggacgaaaagaacgttacttcaagcggcagcgccaacaagagcgtgctcaatcttcctatgccgccagtaattcccggcagcgaagagcttagtggcgatgatgatgttatcgacagtcctgaagactttgatgcacccgcggttggcactgtgcacggtcacggtggtgggccagggacaactcgtcagcgcccagtgatactcaaccgtcgtgactcgcgaaacaacgtacgcgactggggcgagcgctgtgtggatgtttttgagatgattgcgcaaataggggaaggaacttacggacaggtttacaaggcgcgggatcatcataccaatgacatggtagcactgaagaaggttcggctggagcacgagaaggagggctttcccattacagctgttcgtgaaatcaaaattctgagacaacttaaccatcgcaatatagtcaacctgcatgaaattgtgacggacaagcaggatgctgtggagttccgtaaagacaagggatccttctacttggtgtttgagtacatggatcacgacttgatgggtctgctggagtctggcatggtcgacttcaacgaggaaaacaacgcaagcattatgaagcagctcttggacggcctcaactactgccacaaaaagaattttctgcatcgagacatcaagtgctcgaacattttaatgaacaacaggggtaaagtaaaactagctgactttgggctggcacgactatacaatgcggacgatcgggaacgcccctacacgaacaaagtaattaccttgtggtatcgtcctcctgagcttttgctgggtgaggagcgttacggcccgtcgatagacgtgtggtcctgcgggtgcatcctcggcgaactctttgtgaagcggcccctgttccaggctaatgcggaaatggcgcagcttgaaacgatatcaaagatctgtggatccccggttcctgccgtgtggccgaatgtaattaagctgcctctgttccacactctcaaacaaaagaagacgcaccgccgccgtctacgagaagactttgaattcatgccagcccctgcacttgatctgctggacaaaatgcttgatttagatccggacaagcgcatcacagcagaagacgcgctccggtcaccgtggctaaggaaaatcaaccccgacgaaatgccaacgccacaattgcccacatggcaggactgccatgagctttggagtaagaagcgccgtcggcagatgcgggagcaacaggagtcgcttcctcctacggtgatagcctcgaccaaataccaacagcatggagcaaccatggtgggggatgcttagcatttgctgtttgcttcgctacttaatgtgaaggagagctacatacagcgtgaaggcgaggagtgttcctggtggcactagtaactagccgtaactagcaataacgtaaccaataagggattctgttatccctggacagggccagaataggttgacttagacttgctctagctctgtcgagttaaagacagcttcaataaagtcttggctacatttataaaatgctttatatgttgggaaaattgaatcaatcgctgtataaacgagatgttatatattcgcaaagataaatattttaaaaatgattttatacatattttactattcaatttaattgctattagtttttttatttttgaataaactggcaatctg

SEQ ID NO: 16845 - protein, 1157 aa, DROSOPHILA
MHASSAAATALVEYSDVSSEDFSDQEAGDLDADAGKGAGNIKKPKPAPDNQFSKGRLDAKPDKEGYDNYRSRRAEDSSDPVAAGSRQTSSSEATNPREEPSQASNTSKDELWGREIYMSSDSIDTDELEAEMKRQKRKKQKKEKHKHKSKKKSKKRKKKRAKSYSSIDSMSDNDINALLDRRYTPPTAPSKSNERTVSAAPSSFTPHNLKESSSPATPPPVRRPNTNSNYYGESSLETANSALGSNLQVTVTNKQSISNRLRSPPPSSRSSGNGPRFGNSPRTPPPSHYSSSGGGGVGSGSVVRDSRSSRYVNSPHKEDVSAHHRSSHDHGYQGRYSGAGSSSHDTRKVKRLSPELDRYNHQPSTPPHKRRKFSDGREVGLGNFEHSRHHSGKYERYSRDRYSRRSSRSPSVQHSRSRQSPSGGLSSGSNAFRHGGSHKHKYGTTVSSTPSHTTRTSKRASGTGTSGDRYSRSPRTSSRYMESSPPSPVGASGSHHYHHRRSPRMRQRTRGDSRRRSPSSASSESSASRSRSPTSRDLKHKREEYIKKISETSLFAELVKDRHKRQKALKEIIERQEENSNSNSNGALTINDNSSSVDGNTPNAADGRSAPGSGTPAAASTTSNGLQALGSKPDLDLNNIPMPNKQNDSVVSNPASNADVPDSVAQLKQPLLVPPFSASKNNIKPKSLTSLPLPPGMNVLDLAGARSPSPGQKKESDEKNVTSSGSANKSVLNLPMPPVIPGSEELSGDDDVIDSPEDFDAPAVGTVHGHGGGPGTTRQRPVILNRRDSRNNVRDWGERCVDVFEMIAQIGEGTYGQVYKARDHHTNDMVALKKVRLEHEKEGFPITAVREIKILRQLNHRNIVNLHEIVTDKQDAVEFRKDKGSFYLVFEYMDHDLMGLLESGMVDFNEENNASIMKQLLDGLNYCHKKNFLHRDIKCSNILMNNRGKVKLADFGLARLYNADDRERPYTNKVITLWYRPPELLLGEERYGPSIDVWSCGCILGELFVKRPLFQANAEMAQLETISKICGSPVPAVWPNVIKLPLFHTLKQKKTHRRRLREDFEFMPAPALDLLDKMLDLDPDKRITAEDALRSPWLRKINPDEMPTPQLPTWQDCHELWSKKRRRQMREQQESLPPTVIASTKYQQHGATMVGDA

SEQ ID NO: 16846 - DNA, 4067 bp, DROSOPHILA
aaacaggaagaagttgcatttccatatttcttggattattttaaatggcataaaaggcatgaggcttacgtttgatttaattcctggaaagacctccacatgttcaattcaacaccctccccaccgtacattacttcctaaatacatatttatttatgtttgccagccatttgtgcaaagtgtttgcacttaataaacccatttcgctaagcactttgtcagttgggcggtgggaagtgggcgtggtagggacttccgcttttcgggtcctaagaccacccactcagtgaaaacaacgcagtgtacccaagaaccacccattgctcacgcacttactgttattccagcattaaaagttcattgaatggcaagaggaagtgaaaacaattatcttcaggaaggtgaaccataaatccttcgaatccgtaagtaaattgcaaattttcgtttattactttcgatgtctggaactcaagggatttgcggttgaatcgaatcgatattttgtgttatcatatttattatgcaaacacacttcgcttcgaagaagaaagttcgcaaaaatgtcacacgtgcgtacacaaaacgtattatttgccagcgactcaaatgtaaattgaaacgcataccttttcacatatgaacaccttcgaaggtaaattcggttttatttcatcgcagcctattgatttgattgcccgccttttgatgggctgatggaaatggtttgcttcaattaacacggaaaaaaatcggtttgggtatgtaatatatcttatttacattttcaaacaaatttaacttttattttaacgtcgaatatggaaataacatttttagatggcgtgtttgttaaagtctattttataattataaatataatataaattagaaataaattatatgtaaaggcttaaatattataaataatattataatgtattttatttccaagctagctttcatttataaacattttatattattaagttttataaacctaaagcttagtgtacaaatagatggccacaatgaggccgtatagagccaggacctcggcgaagatcaggatcaggaccatgcccacgaaaaggcgtggctgttcggcggtaccccggactccagcatcgcctgcgattccaatggctactcctgcggtgagtcctggaagtccgacggacaatccggcgcccagatgcacataactgtcttccatcgtataatcatcgccaatcgatccggctatcaggacggataccaccaatccgtagatcgcaataattcccgccattacgaccggaatgatggccttcatgatcatatccggtcgattgaccgccatcttggcgattccgacaccggaaactgctgttccgtaagacgctcccaaggtcgtgaatataatcgcaactgcagcccccgtgcatcccaagaagaaggcgtatgatggctcttcatttaaagcggcagtaaccattttgcttaaatcggattgaaatcgaaacagttgaaaagatgtagaatgaaaaaggaaatgtaatcccaaatcaaagcacttcagaaaaaggcgtactatgttttttgtttacagaaataattatagtagatttacaaaaaattctgattattgctgaagaaatactttattaaaggataacgctcttattttttttatttttaaatataaaataattggctttcgaaaagataattaaccatactttttacttgcagtttttactttatataattctaggttcgcttgaaccaaagacactagaataactagtgtctttgcttgaacgcttgttgtgcccttaaagtaaggacttctttttccttaagtcaaataacctttacatatttgtgcaaatgcttcttactttccgggtttttgggatatttataacctcgaaggaccgcaaaagccattctcagtattgaaaatcgaacctgcggttgcttattcactttgagtggtttcccccattgcctttcagcgcttttttcgttaccctccacttgtttcaattaaacaaattggaaaatatgagcccgactcgactcaactcgactatcgtcgagcttaaaaagggcgatacttttgaaagtcccccccaaccttaggacgatgttgtttcgttttccttaaaatggaaatttgttgccaccgctggcgcggaggggacggaattgttttgtgggactgggctggggcttcaattgctcctccattttccatggcgtttttatttgtggccccagctcggctgctttgcattttgaatacatattccgcaaattccttgggggagcttgtaactttgtcactggctctgcgttcgtgtgatgtgattgttaagttggcccagatttgtcacaggcgactttagtgaatgatgatgactgtggcagaggggattcttgattgcttcttggttagaaaacaggtatgatttagtccgggtatttagcaaaattcatatgaactgacaatattttgtatgtaacatttattatgaaacatttcagtttacatttgcccattaatgagggctaaaacattgttgagtgtgaaaaaatacgcagtttacttggtgtacaggtaaatggcgacgatcagcccatacagacccagtacctcggcgaagatcaggatcaggatcatgcccacaaaaaggcgtggctgctgggcagtgccccgcactccggcatcacccacaatcccaatggcaaatccagccgccaatccggcgaaacccaccgataatccggctgccaggtggatgtatcccttgcgaatggtatacgaatccgacagagatccggcaatcagaacggagaccaccaggccatagatcgcaatgataccagccatcacaacgggaataatcgatttcatgatcaattcgggtcgcattacggccatggctgcaatcccagtgcccgacttggccgttccatatgccgctcccaaggctgaaaagatgatggccgatgccgctcccatcgaaccaaagaagaacgagtacgccggcttatccttgtcagctgcatctgttgccattttgattatgattctgagaaaccaatgggataattgcagcgctagattttcaagtaacttactgcttaaaaattcgtagggcttccttatttttgcaattcgtttgctcgtcagattttcgatttgtagtcctttactgtatattcgccgccaacttatatttgtaaaaaccaatggttggggtattcatcatattattattatttttcataaccaatacagcaaaagaagtataaaggtattgaattaagagagtgagtatgatatttcgctggattcgcatataaaagtccacatccggcttaatcaaatcgaacgggcaaaagtgcgaaaggtggttgtccattaaagatttatgccgcgttgagggacttagcatcgaaatcctcacttctgtgccatctcgagctacttttgggttgccttggaatgaaactgtattccaatcccaattctaatcccgaatccattgttgccactgccgctgcgctttgttagttattgtttggtccgcttttcgcaactataaatcgtttatgtattttgttgagtgcgagaatttatcgttggagttgagtatgagaaaggaatcacataaatacaaataaatcaaaagcatttcgaatgccaatggcgatggcagtacaaacaatattttcctcctgcttccaggaatggaaaattgagaaatataaatggggcatggcatagttgtgtgtgtgtagtggctataggcaggctagactgtgctgtgctgtgcgaaaattgatgtcttgcctcataaaaataaggcatcagaggaatcgcccgaatgtgtttttgttgaaagcaacattgtaaattttatgacttttttatgcgctgaaatctataaattatgtaaactgacactgacagctgtcaaccgaaggctcagcgacagctccagtcgcactcacaggcccattctgtttcccattcgcagtcgccagagttgccgctgatttttttcggtgtcaaa

SEQ ID NO: 16847 - DNA, 954 bp, DROSOPHILA
atggcaacagatgcagctgacaaggataagccggcgtactcgttcttctttggttcgatgggagcggcatcggccatcatcttttcagccttgggagcggcatatggaacggccaagtcgggcactgggattgcagccatggccgtaatgcgacccgaattgatcatgaaatcgattattcccgttgtgatggctggtatcattgcgatctatggcctggtggtctccgttctgattgccggatctctgtcggattcgtataccattcgcaagggatacatccacctggcagccggattatcggtgggtttcgccggattggcggctggatttgccattgggattgtgggtgatgccggagtgcggggcactgcccagcagccacgcctttttgtgggcatgatcctgatcctgatcttcgccgaggtactgggtctgtatgggctgatcgtcgccatttacctgtacaccaacaaaatggttactgccgctttaaatgaagagccatcatacgccttcttcttgggatgcacgggggctgcagttgcgattatattcacgaccttgggagcgtcttacggaacagcagtttccggtgtcggaatcgccaagatggcggtcaatcgaccggatatgatcatgaaggccatcattccggtcgtaatggcgggaattattgcgatctacggattggtggtatccgtcctgatagccggatcgattggcgatgattatacgatggaagacagttatgtgcatctgggcgccggattgtccgtcggacttccaggactcaccgcaggagtagccattggaatcgcaggcgatgctggagtccggggtaccgccgaacagccacgccttttcgtgggcatggtcctgatcctgatcttcgccgaggtcctggctctatacggcctcattgtggccatctatttgtacactaagctttag

SEQ ID NO: 16848 - protein, 317 aa, DROSOPHILA
MATDAADKDKPAYSFFFGSMGAASAIIFSALGAAYGTAKSGTGIAAMAVMRPELIMKSIIPVVMAGIIAIYGLVVSVLIAGSLSDSYTIRKGYIHLAAGLSVGFAGLAAGFAIGIVGDAGVRGTAQQPRLFVGMILILIFAEVLGLYGLIVAIYLYTNKMVTAALNEEPSYAFFLGCTGAAVAIIFTTLGASYGTAVSGVGIAKMAVNRPDMIMKAIIPVVMAGIIAIYGLVVSVLIAGSIGDDYTMEDSYVHLGAGLSVGLPGLTAGVAIGIAGDAGVRGTAEQPRLFVGMVLILIFAEVLALYGLIVAIYLYTKL

SEQ ID NO: 16849 - DNA, 2921 bp, DROSOPHILA
gagtcgtctgacgacgaacccgcgggaccaaccaagtgcaaacgttcccgcctggacgattcgaaccccgtggcagtcatcagtatcgattaataaaaaaaagaagtttttattcgaataagttctcaactgcgcactaaattatgctcttgattccctgtaatttcattctgatttaaaataaaaacacatttttgtggatgataaaatttttaaatttttgtgctttgaacgggtttggttttgctctactcgattaaattcaaataatccagtgcgagaaatgtaattttattaaataaaagaaatataaaataacatttaaaattagtcaaatttttaattcgataactttttaacgccaaccagtgctgcgaagcactggaagtcattgtgcctgttatcggtttctgaccagttcaatccaaaacagaaaaaggtgagctgttctacaaattttcattgtaaatctcaatgaaaatgcaaatttcagatgtccctggctagtagaatactgcaacaaggttcccgcttgtggaatggtctcagtgccgcgcgtggtttccaccttctcacccggccggcggctcctgcaattgtatcaattcaaagctcgcaacttgtggccgccacaactggaatctgtcagacgtcgggtctgctgacgcctggctccactttggtccagcaggtggcgggattcaaggtcaagggacgcctgaagcgacgctgcaaggactgctacatcgtggtgcgccaggagcgcggttatgtcatctgccccacgcatccacgccacaagcagatgtcgatgaagaagcgcgactacaagtcgtggatcctgacgcacgccacccaatccaaggagcgcggctattagacctaattaggcattaataaaagcatttctttaaatatgttcataaataaataaaagaaaaataatccaagtagtccgtgatacgtttcctaacactgtatcagctgattgtttgtttatatcgcagtcgtttcttgcctgttttgctttttactgtatccgaccggagttcagtacacctggccgaaaaagatgacgacgcacttcagcaatgtactgcggcaggcattcaaaacgttcgaccgggcaaatcacgccagcttcaatgcgaatttgcagcatctgcgtcaattgacggatgagctgacctaccgggatctgcacctccgcgaggagctctttcgcaacgtgggaagccatcgggcaccctgcagctacatgcatatattcgaggatgatcgcttctccatgagcctgtttatagtgcgcggagcgagcactattcccttgcacgatcaccccatgatgttcggtctgctgcgctgcatctggggtcagctaatggtggacagcttttcgcaccagttaggcccggatgagccgctcacctatgacccccatcaaacagtggtgaaggtgaatgtcgaggaacccaaattggtcacgccggctagtccgtgtgccacattgactcctagaaagagaaattaccaccagattgcccaaattggtagcggcgtagccgctttcttcgacattcttagtccgccatacgatgcggatatgccaacatatggaccgcgacagtgtcgcttctatcgcgccacggcagagggcagccaggtgcagctgcactgcatcccatcaccggatacatactattgcgatgttgtggacacgcccgaatcggtgatgcaggccgcttttcagtgcgccgacgaggtctatgccgataatgccagcgggacacagtgagtcgttatctcgcttcccagcagctaacaccctcctatttatttgcccataatcaaccgttggctgatcgtatcagccaagtatcttctgtgttatttaaataaaattgcctcctttttttgtataaatcgctccgctttcacggaatttgtttgggtttaatcttcttgcgcttggtaaatgttctgattgcgtcgcttaagttttttcacattgggactagcgggcactgatgcaggttcctctacatgaggcgtttccgttgctataattgcttcttcagcttcctcctcgggcaggtctatcacgttttcatcggtggtatcagctgctgcagttgtaggtgctggcagggataagttaagtttccttttagttggcgtaaccaatggttcagccacgtcttcttccaccgcctgcagcttagaactttttgtttccctatccttgcattcggtagctcccaccgcaggcagatctaggccattcgccaacaaaactaagcacagcggatcgtctatacccagagtggcacagaacgtattgctctgggggtttagttgaaccttgggttgatccacaaacatgtgcttataatcagactgctccgcgggatcgaaagctggcactgtgcgctcaaagttctcggggacttgaagtttctgaaactttgcggtcactgcttctagttcttcttcagtgggggtaaagtttgatcgctctgtaaactctcccgccttttttccgggcaggtaataataattctccttcactgaaatcaagtgatttgtactgtgcaagatggctagccactctgcgtcgtattccaggcggggagtgccttcgatggggtcactgggtacctctaccacttgcaggaaagcacgacgtggcaggcatttgtcgagagccagaaacttggtcacgggaacagatttggatggtggaggtacaggagcagctttctttaccttctccctttcctcgtcttcatcttcactgctgctgctggaagaggaagattcagcatctcctagcttctggctgtgattgtgcggcaccaaagcggcaaacttgcaatgcaaatgggcagcaaaccagtaggccggttggaccgctttcagta

SEQ ID NO: 16850 - DNA, 921 bp, DROSOPHILA
atcgcagtcgtttcttgcctgttttgctttttactgtatccgaccggagttcagtacacctggccgaaaaagatgacgacgcacttcagcaatgtactgcggcaggcattcaaaacgttcgaccgggcaaatcacgccagcttcaatgcgaatttgcagcatctgcgtcaattgacggatgagctgacctaccgggatctgcacctccgcgaggagctctttcgcaacgtgggaagccatcgggcaccctgcagctacatgcatatattcgaggatgatcgcttctccatgagcctgtttatagtgcgcggagcgagcactattcccttgcacgatcaccccatgatgttcggtctgctgcgctgcatctggggtcagctaatggtggacagcttttcgcaccagttaggcccggatgagccgctcacctatgacccccatcaaacagtggtgaaggtgaatgtcgaggaacccaaattggtcacgccggctagtccgtgtgccacattgactcctagaaagagaaattaccaccagattgcccaaattggtagcggcgtagccgctttcttcgacattcttagtccgccatacgatgcggatatgccaacatatggaccgcgacagtgtcgcttctatcgcgccacggcagagggcagccaggtgcagctgcactgcatcccatcaccggatacatactattgcgatgttgtggacacgcccgaatcggtgatgcaggccgcttttcagtgcgccgacgaggtctatgccgataatgccagcgggacacagtgagtcgttatctcgcttcccagcagctaacaccctcctatttatttgcccataatcaaccgttggctgatcgtatcagccaagtatcttctgtgttatttaaataaaattgcctcctttttttgtata

SEQ ID NO: 16851 - protein, 240 aa, DROSOPHILA
MTTHFSNVLRQAFKTFDRANHASFNANLQHLRQLTDELTYRDLHLREELFRNVGSHRAPCSYMHIFEDDRFSMSLFIVRGASTIPLHDHPMMFGLLRCIWGQLMVDSFSHQLGPDEPLTYDPHQTVVKVNVEEPKLVTPASPCATLTPRKRNYHQIAQIGSGVAAFFDILSPPYDADMPTYGPRQCRFYRATAEGSQVQLHCIPSPDTYYCDVVDTPESVMQAAFQCADEVYADNASGTQ

SEQ ID NO: 16852 - DNA, 5177 bp, DROSOPHILA
tctgatcccgcggagatggccaaacattgccttgccatgctgacactccattaggcgggcggttataaaaccagctccattttccttgaacccacaagccaaagtgttggaccggactctgatccgacccgtagcggctctacactgagaaaaaatgctcaaatgtatgctttcataatttatcaacagtctggttaggcctcacaactttaatgtactttgtagccttatactccaaattaattttaatttatggataagagttaactctcacaactttacattccttacccattacaaagttgtattaattgaaattaaattaactttaagatagttttagccataatttttgcctgtgtatcatctaaaacgattaccacaattggcaacatgtgccactcgcacataatggcttgccattagccgccttagaatcggtttcaaatgctgctccatgaatatggatggtcgacatgccgagtggcgagggaattttgaaagaattcattcgaaacacgtatttcatgtcccacttgacatgctaacaatttaatttgaacccaagacgcgcaatttggctcaccagctcggattgaagtctacaacttggttcaggtcattgggggcgatctctttataacttgggtaaccccagctaatgcgtaacctatggcacttatggagctcaattgttttgtggaccccaatcataaggaagtgccatttgtcggtccataatgggtctgctcacggcatagttaatcgattatggccacgttgagatcgcgatgagaatgctaacggcttggttttattactagtatgtcttcggttcgattgcggcatcttctctgcttcaatctgggtcattctgcggtcacaccttatgttggcagatggaagataataaaaaacacatacctcggattccacgtgccgaatcggatgtctatgtgagatataatcagtcaatccgcacatcaatcaatgcgattcgatgcgggataactttaaaactttgcgccgatttttatttgaagacttcacgcttgaaagtgataaaacttttattgtattaatttaagtcgaatttaatgccacaccctttctaacacagcaatactacttttagttattaatccaacatttttttagtttttggttgcggtttaatgttgcatagagaaaacaacacagaagcttctccgccctctcccgtatccccccaatcctcagaataccttacccaaaacgatctcaacataatattaatcccttgatgtactaatttgtaacattactattgtattataccaaagaactatcctattctgtgtttgctttttctattctttatttataggattggcttgcgggacgtgtgttttatcgtccgatttcggtttcattctcgattgtaacttcaaaaagtctggactgtttcgtgtgcgaaatttgggtggccttaaggcccatttcggtttaggtaaatctcctcaactgttctgtcaacccattcgcaccatccctatcatccttcaccctcattttctcagtgtacatacggccccgaaatagttcaaggtgtagacgtagattacgtagtgattccaaggcttttaatcctcaaatttcaagtgcagctaattggtcaagtaatcgaactcgatctgaactcaaacgcatagcgaatagcgattaagtaagtcattatgcattaatgccaatgtcagtggcagccgcacatttatgaactcaattgtgataaagtagagcgtttgagcggagtagcccaacaagaaaacggcttgaagattgacctgtagttcaattggcaagggcgtagaatggggggttgctaggattcaagtttgatcggactttaatgattccaaagagcacaaaacgcatcggacataaatatgcactttttgtagtttgttgcagctttaaacgaaaaagtatttattttatatcttgtattgaaaccaattaagttcggatcttaatgatagtttaacgagcattagcagctgcggccttcaacttaattatagtttataaatgaaattattaatttaaatgatagtttggcaatttagtaatgagaacatgtaagcaataagtgtttgatacgctattattttggtcagatgtgtatcattcgctgacccccccttatagataaatcctactaggctctgtgtacataaaagccacatagatataagacttcgataagacccttacaacagccacgtgaagggtaaaacaaaagccattaattaacacatcattgcccaaccctcgaccacgattgaagtgattgatggggccgtcgtaggcccgacctaacccaaacctttgctgcttacaggtttcagtctgggcgacgagctgggctttccggaatcgctgggcaacacggagagtgaccgccgacgggctattagctacaaaaacggagcgcctcccgacttggtgggcgtacttccatccacccagcaacaggtcagtttagacggtctgcttgcattttaaaatatctcattatctaacatctctaccgaaggtcaatccacccgtgcaacatccattgccagagaaacggataagttcacggtccaccggagcagcgccgtacaacctgcagcaggtgcaacagcagcagcaacttcaacttcagcagcaaaaactgcagcaacagcagttgcagcaacagttaaagctgaaacagctgctgcttttgcagcaacaacaacaacaacagcaacagctaatgaccgaggctcgtccattaccattgggtgttcctgccttccgacccattccccagaagcaactggccgccacacagccctctgctccgagttcgacgcctgcggagagacgggtagccgtggacaccccagagcctcgggtcagtgtcaacaacaagctagtaagctccatagatcagccggtaagttactacctattaacttaaccaataagaattaaatatttaatattaattcacccccatctggatagcactcaaatcgcacttttcacgtggccaacccggtggtgtcccaaccagtagccgtgccggtgttccaagcgatgccccaatccatcgccaggatcgccaatgtcggtaaggagcaccgaacggtgtccagtcacccgaattaccttcagttcgaggagcccaagttcgacctaaaggatgttaccgttgaagagctggccgccgctgctaacgtaacagtggacactatcaagcacgccatttacgtccgggagcagcagctaaaggccgaacaccgggcccaactggcggccaagctaagggaagagtttatgcgcacctccactgtgaggactacgaccacgacgaccacaacgacaaccactacaccgcgcccacaaaagtcgctggcggagcacaaggtgtccaaggtgcgtatatcgttgatacataatatatgtacataaggcgttttgcaattaccattcaatataaataattgtttactaatttatattaggtaatgaatgcccctaaagagtactatccagtgggctacgataagaactttgacgacaacttcaaatccaaggtggacctgccacctacaagcttctcctgcgctaagcaaaagcacttccccggtctctacgctgacaccgaccttggctgcatggtaagctacacgcatttgatgtgctttgatgccgtgaattatatccacttgttaaacacaatccatgacaggtattccacgtatgcgccctaaccgatgacggcatggtgcggaagtcgttcctttgcccggagaacacactcttcgaccagacgatcttaaagtgcaactggtggttctacgtcgactgcagctctagcacgagcgtctacgactccaacattcccatctcaaagagctatcagctgatgaagtcgctcacctatttctccaagtacgctggcggtcagaggcacgagcagggtggagacaaagacgagaatgcgctggacatcgattcgctgagagagtcgatggagggcgtggcccggcgccaggagcaagccaagaaggcggagctgagggtggaggagcagcgcagcatgcccaaggaggaccatgagcacgtggtgcccgcggaggcagagcagcagctatccaactaggcttaactaggcctatcccaacgctatctgagatctaggttaagagttcacgatcgagcgcctctggtcgactagccgtacgtagtcaagtcctttgctaaagtcagcggttttcacactcatcactgagaaaaactattcccggatcatatgtataccgattcaaggacgcctatttgtggcgcttcaacatattgtatcacagagtcaaaataattttctccatatctattaaagaaaatggataatatatatgattaagattattttgatcgcaaaatagaggacactagggaactgatattattatgattttttctctgttaagtatcatcacttcctgtgggcagctcctgtactgcagagcgccccttacacttagtctcttcctagccattaggtggataatatctagttaagtcccatcagtaagtacattttgagttgggcacttatttttagtacgttctactatttatttattgtacaagtatttcccgcaaattaaacgtcgtttgtttaaaaatgttcaaaaactttgttttatatggatacatttgatatatggataataaaagttatttgtttcttcttaacgtttaagaatattaaaattttaatatattgatattgcacacctatcaatttatcgtagatcccagtaatattgcagagttcattattggttattgtaccattccaacatgccagtggcgtcaggaatatctggattgatctgcatattcgtgtaccagctggcgttgagcttcatttcattattgtgaagctgggcacgcgcccctttgaccacgataacatcatcacgttgacccacaaagttcacggcttccttttgccacagatttaatatgacaggatggaaatcaggatctacaagtaagagttcccgaataaagcaacctcctctattttccagcattccaacctccgcgcagattccaattgcgtcgacgggttcttggtctctttttgaagaaac

SEQ ID NO: 16853 - DNA, 1563 bp, DROSOPHILA
atgcgggataactttaaaactttgcgccgatttttatttgaagacttcacgcttgaaagtttcagtctgggcgacgagctgggctttccggaatcgctgggcaacacggagagtgaccgccgacgggctattagctacaaaaacggagcgcctcccgacttggtgggcgtacttccatccacccagcaacaggtcaatccacccgtgcaacatccattgccagagaaacggataagttcacggtccaccggagcagcgccgtacaacctgcagcaggtgcaacagcagcagcaacttcaacttcagcagcaaaaactgcagcaacagcagttgcagcaacagttaaagctgaaacagctgctgcttttgcagcaacaacaacaacaacagcaacagctaatgaccgaggctcgtccattaccattgggtgttcctgccttccgacccattccccagaagcaactggccgccacacagccctctgctccgagttcgacgcctgcggagagacgggtagccgtggacaccccagagcctcgggtcagtgtcaacaacaagctagtaagctccatagatcagccgcactcaaatcgcacttttcacgtggccaacccggtggtgtcccaaccagtagccgtgccggtgttccaagcgatgccccaatccatcgccaggatcgccaatgtcggtaaggagcaccgaacggtgtccagtcacccgaattaccttcagttcgaggagcccaagttcgacctaaaggatgttaccgttgaagagctggccgccgctgctaacgtaacagtggacactatcaagcacgccatttacgtccgggagcagcagctaaaggccgaacaccgggcccaactggcggccaagctaagggaagagtttatgcgcacctccactgtgaggactacgaccacgacgaccacaacgacaaccactacaccgcgcccacaaaagtcgctggcggagcacaaggtgtccaaggtaatgaatgcccctaaagagtactatccagtgggctacgataagaactttgacgacaacttcaaatccaaggtggacctgccacctacaagcttctcctgcgctaagcaaaagcacttccccggtctctacgctgacaccgaccttggctgcatggtattccacgtatgcgccctaaccgatgacggcatggtgcggaagtcgttcctttgcccggagaacacactcttcgaccagacgatcttaaagtgcaactggtggttctacgtcgactgcagctctagcacgagcgtctacgactccaacattcccatctcaaagagctatcagctgatgaagtcgctcacctatttctccaagtacgctggcggtcagaggcacgagcagggtggagacaaagacgagaatgcgctggacatcgattcgctgagagagtcgatggagggcgtggcccggcgccaggagcaagccaagaaggcggagctgagggtggaggagcagcgcagcatgcccaaggaggaccatgagcacgtggtgcccgcggaggcagagcagcagctatccaactag

SEQ ID NO: 16854 - protein, 520 aa, DROSOPHILA
MRDNFKTLRRFLFEDFTLESFSLGDELGFPESLGNTESDRRRAISYKNGAPPDLVGVLPSTQQQVNPPVQHPLPEKRISSRSTGAAPYNLQQVQQQQQLQLQQQKLQQQQLQQQLKLKQLLLLQQQQQQQQQLMTEARPLPLGVPAFRPIPQKQLAATQPSAPSSTPAERRVAVDTPEPRVSVNNKLVSSIDQPHSNRTFHVANPVVSQPVAVPVFQAMPQSIARIANVGKEHRTVSSHPNYLQFEEPKFDLKDVTVEELAAAANVTVDTIKHAIYVREQQLKAEHRAQLAAKLREEFMRTSTVRTTTTTTTTTTTTPRPQKSLAEHKVSKVMNAPKEYYPVGYDKNFDDNFKSKVDLPPTSFSCAKQKHFPGLYADTDLGCMVFHVCALTDDGMVRKSFLCPENTLFDQTILKCNWWFYVDCSSSTSVYDSNIPISKSYQLMKSLTYFSKYAGGQRHEQGGDKDENALDIDSLRESMEGVARRQEQAKKAELRVEEQRSMPKEDHEHVVPAEAEQQLSN

SEQ ID NO: 16855 - DNA, 17500 bp, DROSOPHILA
gctcctggcttcatagcagaagttccagtccttgctttctataccataatttgaatttaaaatttaattttgatagacttccgatcggtcaataatcatattatcatataggcctccttttgcagagttactcttttgcaaaaacatttggaatgtgtctgtatataattaacatttatacaatatacattaattgtatttttaagggtttaagtttttagaatttttatatatattatgttgtctttttatttaatagtaaagagcgattttacgaactaacattatcattattacgaatacacatacagttatacagaatagaaaatttaatttgtttaaaaatattcatccatcagattacaaatattaacttttttattttattttaattttttcgcctttagttctttgctgtgggcacgtatagaggaatagcgcataaaaataacaattataaaaagttttctctgcatatacatacaagatatacttttgactctatagatttaatagttagtttggattcttctctcttagtttgtaaaacgttctcaactttttacaattgtcggcaatgtaataaatatatttatatataatttggactcgtttgttaggttcgtgtggttcaccatgcgcagctttattgggatccttttttctctgcttgtataaggtgtatgtgtagtgtgtgagttttggcgcctagttaaaatacatacgaaataacactaaactagcaaaaatgattataatacaaaagcaaacgaacaaataagtacacgatctgctggcggtgctattccaagtgaatgcaatgaggttgcggttgtgccgctgatttcgctgttgctgctcttcaagtcgttgttgttgttgatcttgtggtacttgtgatgtgtggaatcgttgtaactgctcctcctcctggcgctgcagaaactgttgctgcacctccagccaaagccattcgcttgcactcccgttgccggtgttattaatcaactccagcaaatccttggctgccctcgatggccttgatcagtttgtccttcagttgcaggtagccttcatagggtggcaggtccaggcgattgaaactgtagaggaatattgttagcaaacaggttgaaaagccttaattgggtttttcgcaatttgacccgaaactcaccaggtatgtgcccttggaaagttattaggagtgccccacttttcgatagtaaacatctgggggccatttgagccgtacagctccttgaaaccgttcatgggcacgcgtgaagtgcccgtaacaaattgcagcagacgagaacgcatctcgttggagaaggaaagtacagccctccagaaccactgaataataatatgattcatgtggtagtcgcccttgtacagagtattctcgcgccaatccttcacatcgatgttctgtatgccacacatcagtagctccagttcgtgctcgtcgaaaatcttaataagattcagaggaattatcgatccaaaaccatcaaggaaggacgacatctgttccttgacacgtgccacaaagcgccattcgataaccaatctataagggaagaaattgcgattgtttagccattgaaagtaatcgtattattgatgacacttacttaatgtattcatccttgttttcgttagtcacgtctatgttggcaccgccgggctttagttcgtgctgactcttctggccaaaaacgtcttcatccaggcagaaagtcagttccagaatgcgtggatcgttctccttaatccacatcagcgagttgtagtactccgtgtccacagactccatgtcctttaggtcaatcggcttctgcagcatcatcttgtagaatggacgaatgaagaaggcatctagcagctttccatgatacacagccatgcccgcaatacggccaatgaatctacgatgtttttaaaacaattaacaaaagtacttgctttcacaattaaaaatacttacttaaagtaacttaaatgctcctcgttgcacaaaccactaccattgtttatctgaagcgtgtagttgtccatggccgagtactcgaatagtccgtagtacggattaaacatttcttttgataataaatagaaccattcccttgcgaggcctccataatctgcaatcaaaaacatgactttaattgcaatccaacaataatattgtagtttaatttacttacctaagccagtttctccttcaaactctacccataatttagtctttagtaaatcggtcttcgttaccgaactaataattctgtaagaatcctccagtatcgacgtacgacgaatacgtatttcaaatttatttggtacatttgtctggaaaaaaatattaaaaaaaaatgattaatttaatttaatcaccagactatttttctgtatgtacttacaggctttctaatgtgactcttgaaatactcgtatttttgcttgtaatctcgagaatagggcacagcctgaccggcaatatttggattagacaagcgaggatcttcccactgcgtagttcgcgtgtctacaaacagagtttagttaattcatttgtggaaagtagtaagtaattgatgacttactatgatctatatagaatacgcgtccgtcggtgtgtactcgctcctcccagccctctggtaaaggacccaggtcgtcctcgacgcgacgagtttgatttggcatagggctggcccgtccgttgcgcgggtctatccaagtagtcctccgggacgcatgatcaatgaagaatgtccttccgttgggggctacctgcatcgaccagcgcggtggcaggggttcctcttcaccaccagtattctgcaatacaagatcgccatagaacattagccgcttcacctaaaactctacctttagattatccttggcacatgcagataaattatctgaagatcactttacgtttttattgtgctttaaggataggaataaagagggaaatcgacattacttgttccatgggaggcacagccgcgttgtcttcctcggaattgcgtcgtgtggacggagctgagatgtcagagggattgtggctgtctgtgtgatcggtgtcttcattctagtcattggtggatcgattattttattcatatatgtataaatatggatgcattgcattgcgtaaggtatttttgtttgttggtttaggaagaaacagaaaagaggtattgatgaaattaaaaaccatgttctcaaattgaaaatttcataaaaacacaaattaagcgacaaatgcaaacatacaaacatttataactaatcaaataacttagcggaaactacgattactgaaaagctgcagtttaaagcattatgagggaaagtaccatgagtacaatacttgggtttacatgcaacatagacagacacagatgttggggagcagtcggaatggtctttgtgttgcttaccgctccgcccactgaaatcccccatgtcctaaaacaaacaaatatatgtgtatttatcttatcttacactgacaaatttcgatacgacaaatagtttagattctccaacagaaatggacgaacgagaaaagagaaccaaggtttgagactacaagtgcaaggatacgagtgcggatgggaatgtgctgaccgatggccgatgttgctgctggtgtctctgaccccgatgttgcggctcctgctgacgatgatccacatcaagctacaagtgaaatgagtgatttcggtggtttgtttcatatttaatagtgagatgagtgtgtgcttaagacttgctaaccaatattctattctgctgttgttgctgttgccgctgctgatgctgctggatatgcagttgcatttgctgtcgccgccgttcttgctgccatcccgcaccgccggccatattgcccgcggcccgccgcgtgaacgggttggttatggctatatccggcacaccgggagcctcccgtaccggccgcaggtcgttctgcaaactggtcgctgagatttcgggctgcctatgggcgacaggatgtcgcagggaattgtaaacaaaactgaggtcatgaaagatagagcacaacgtatggcggttaggaagctggctgcgaagtgaaggagccttgggggttgggaggattgttcgggtacggacaaaataccgacaaaaggctgagggatcttttggatgggtgctgctagcgcatagcggatgatattaacctggtatggtccactgttggatcttgatcttcctctgcgcgatattgcatggcaatttgtgcgagaattccattgttgtttgttggggtgttgggtggtgccgatgaggtggctgctgtttttggagtatatgctaagccagcagcattgttattgtcctctatactattgtgactgatggagtcctacgtatatacaggggattattattgaagggctctagacgtctacacatctaaaattctaagtggggtttcaaacaaggcggtgaaggcaaagacacaacgatcaacggcagtgggcatcttaggattagaaacctataactggctcccaatattgatgtcatactactaagatcttatctagaaactagcgatacacttaatctgtagttaaaaaaaatatatatcattacgaatatgcgtttcaagtacaagttcctatcgagtatatcacatgtttgcgcgctttgggatgtggctgacggctgatctgggtcaggtgttggaggctgcagctctgcattatactcctcctcatcaacatactcctctgcctcgtcattgtcatgcagctcgccgcagtgcagacaattggcctgattattctgaagatccaccatctcctcgccattctcagccacatcctcatcctcgctgctctcatcgctggccacagtctccatgtgagcagcgttccttggcctctgaggtttgtggtgttttgttattgggttagtcggttcgagtgcgttttgtgtgggcattgtgtaatgggtttttgttcgatgcggaagtttaagagatcatgcacaaaaatcaatcaaatcaaatgctcatcacacatgcataataaatagttatacgtctttgattaaatatatatatatatatcgaaacttacaaatttgcctgtggttaaccaacttaaacttaaacgtgcaccctagggaatacagatccaagtttttccacttaccgccgaacgtcctgactccgtgtcgtccacgctgatgtggaaacgtctctggaaatccgaggccaactggtcgtcagtggattggctactgtggctgtttaagctgagtaaggattatacattttcagggttataaataaattattatttacattgtaaaaagctgttcctcatttcttctgagaagcattttcgcatgtttatcttattctttaaatttaacgaaactagataaaatttaatattaagcgtacaaaaatcaagttgctgttaatgtttaccgaaatcagaaaatggcttactcaaatatgtattcatcagtgaaatttatggaacagtctttctgatttaaactcatatctgcacgcccaacttacacagtaggcctatcccattgcgtcgtcctcgccgtgtgattcacatagtacgtgcgcccgttggcatcctggcgttcttcccatccagcgggtagggcatcgtggccaccagtaggaaaggggtgctgcgaagcaggaagcaggcacacgattaatatttgcatttcaaagggaataaggacactcaccggctgggcagacgtctcaccggcattggtggcctcaacgtgctcccactcgccatcgctattgccactagatggctcgctctgctcccgcgtctcccggataaaggcgtggtagatgcgcagtgtgcccttgatgcgggatttggcgctgctgggcgaagggcaggggagaagatcaattttaatgagccaaccaaacaggtgcacagacaccgccaccaataccaggcccatacggcagacacacagacgcgcacgagttaaaaacaataagtttcatactaagcgtaaactaaaaataaactcaacagcgaatacacaattgcagatacatatgggttactatggattacggtcgcgttgcacaactttaaagccgctttcactttaatgaatgtcaataaggaaggcaacacacatgataagaatggtatttgtaggagctgttaatcaacaaaaatttttaatcaaatactttcttgaatgtgagtgactcacttttaaaataggtttatgacaaataggccaaaatataaaagattgaaatattgtaagttaacaatagaagtacacaataggtaattgttaccaatatatataaaatgtattgacacagcaataagtcagatattgaaaacacgctccaaccattcgtacatttaacctccaccagtaagcagtgttttcattaataagctgcatttgtataatattttcctactttgtcatgtggtctaaagttgtgaaaagcagttaatgttcgattgaaaagcgattctattctagtcgagggtaagtggagtgttctactacgattacgacgaatacatttgcaaattataattgcaagtaaagactgcacttgggctaaaggggcgtggtgataaacaataaacaaagcaaaacacgtaaactctatagcactacaacagaatctctacgggttggggacttagacgagatcttagccttcttcaccaatctattaacaattctgcctttgttgtttattatacataactagattttatggctatgtagtagtgtgtaaatcaactgaaattaaagaaacaaaatcaaactgcaaatgatataaacctaccctactgacctgcgcgggcgcagagtgtagctttgttctccgatggtgcgaccttcctgctcggtaggcagattcaccagggtcagctccaccatgcccaggaagtcgtcgcgtgtcaggcgattctcgtcaaatacttgaaacacaagcttatgctcagacggtttaacctggtcaaataagtaattaaatggtcaattaaaaggcgatacaattcttctgtggtatgtctgcaaacttactctaaatatgaactcttcattccaggttggattcagtgtctgtggaagaataaattaaaagaatcaaaattaattatcaatagatgcgggttagtatcctataaagtaaatctattggaaaagcggatatttaaacaaaatttatcagcttggataacataaacgaataaatcatatgattacttaatcacattttaaacagcttaatggtgactaactcaatcttcattatgttcgcaatctatatttcgtataatctagtaaacctcaaactcaattccaaatgaattatctcaaaaggcgttctactcttaaaaacttgtaatctattaacacctgtatttgatcagcaaattagatatctaagagcgttagtcataaagtccacacgacactgataaccactgtgtgatttacatttataaacgtacaatcagggccaaatagtcttcccttgcacctttaatttggtaatgtagcaagtagcaccaaacataatcgataagacaaaacttctccgattgcccttgtcacccaacataggacgttaaggtttaatagatttaataggtttaatgttttatggggtttatgttcaccttctttttggtcttcgtcaaaacagagtcaatattaatatcaccgttgattgtgttcaaatcgattctgacatacgggtcgctgtggatgaaagcattcaattcagttatctccaatataatcggcttaattagcaactgattcactcacctggcgccgaatatatcctttttggccagcgactggccggtgagtacgacgattcgcaggtgacacgagtccccagagtcgttctgaaaagggggaaaaataagagaaaatcatgaaattagtaaaaataaaatagtagtagcctcacaacaaatgagacacttgtgcacgcgtcgctggggaaaaacaggggacaggaattgaatggcacagactgggtcacatggagaacgaatagataagccgcagcagtgcccataagcctgacccacgcagcgtatgcttaatgtccgcgattacgcatacgccgcgtacgctggcctgggtaaaagtatattttttggatttttttggtctacattgcgaccgcgcgcacaagttcttcacaaatgttccctgaaggatatgcattatacattcgcgttcataattgttttttcattcgcggccagataattcccacgaccttgacacgagcaccgccccagaaaggggcgtagaagttcaagagagtcatcaagcaattgtctagtgcagagaatgcggccaaaaacttgagctaaattgcgtgttgtgaatcactacggacctcggggcctctcgggtctagaattgcggttgcggcccagtttgcgtttgcagttggcatttctcgttgaaatgcgaaatacaattttaggcatccctcaaaaatacatttccacatctaaatgtactttgtggcgatattagagcggcttgagagcacagaattgggttaattgggcgtgagtttgatgtcagacctcaaaacttagtggcttttcatgtcataaattaaattgtaggattattaaagctttgtaaacaaatgttggatctagtagtagtagttgattttaatgggtaaaccgtgttgtactatatgtcaaaagcagtctcaggtttataaaaccgctgactgccgggattaactatatttcgagtaaatttctttgttaaatatggattaatatgtggattattctaatattcacctgatttaaatcttcaatatttctgagcttaaagtgctggaagctaaccacataacaccataacacctctaccacgtgaccacccactattcgggactggggagcagcaaactttgtgcattcttccaagacaaacataacccattttatccactcatctcggctgagagctagcacttgtatccattaaaaggctttcccattaaatattcaatttgccgacattgtttataaagtgaggagcaaaccccgagtgccccgctgccccccccccccccccccccgacttggtggctgaccagacggcgccatatccatatccgaccgccccttgtatcagatatcagaggctcgcatgttgcggcttgttggccgcccgctgaccctgaatgggttggtttccagaccctatattacatgtgccatttcgtacacgctctcaggaactattttgttccgtttctgtgacgggttgtgtttgtatttatgcgctgacagttccgcattttccatgaacttgtactattgattttcaccgcgttcacggctagctctttaaaatagccgcggcttttcccacttgtgcaataattaaatgtacagagagaaaagctttgagtgaaatctcaagttactttacacattccttcattcttttaacctattaaattagcatgtgtattttggtaacaaggtttttcatcaaattttatcaaaattgtttcataaattataagtgctcttcttgccacgaactatataacaataatggggtaatgccattaagtacgcacagtataataagctagtgcgcattattaaatgccagatgcctcgttgtcccgactcgattattgcctgggcaaaaggtccaatcaatcagcctaagctggtgaccctggagtcgagtaatcccccaaggtccttccggtatcctttcgcacgccttcactgcccgtgcagctgttactgttccgtttcttggctcaaaatctctgacaaagccacgtcgtagctggcattaaattgatttttagccattaaatctgggaccgagggaaattagcttaaaacggttctggcggtttaagcctgtttggcgctggattgacagttcgttttgcaaaaggggcgggctcggcaggaaaagcgttaattaaaagggaagtccgacgtaatgatccgcattgcgctgcactgtcatttcatcttcctttaattgcctggcggtatacagtggaaccactcccaatgaaaccacttttcagatttacaaattgaattattaaatcatttttatggcaattttaaatgtgctatatcagctttacaaaactatagtactgacaattgctagaggttgtaaaaacaattatgagtcataaaagtaaaacggttttttaataactctttttaaaagttatttcaaaaaacatattgcgattggcgtctaaatggttattgaacaataaatggtatgtaaatctgtgccgcagtgtgaaattgtttaatatgcgagttcccaatgcatttcctcttaaaacaagcatagttcaccctagccaaatcctcctgcttattcgttttgactgtgctttgtgtgcactttttaatcacgaattccactgataccgttccaaatttcttggctattgaagagctaaaatcgtgtccgaaatcggttatcaataggcacatagccccaaacgctcattatcagagttggcaagccgttgactttaccattcactcgaccatgtgacatacaaccagccggctgccctttctccgtttccttgccatcagtccagtccgtccaatcggcattgttccgccctgctcaaactatttcacattcaccatagttttcacccacttttatttccgtgcccactgcatgaataatgaattataaaagtatatatgtgaataatcattcagctgttcgctgataagcaaaagcgaataagagaggaagcgttttggtggccaaaaaaaaaaaaaagtcaaggcgctcggcagaagcccatttctgttgctcttagcgattcatctgctgttcaaacagatggcttaagcgcaaggctgatgggagataataaataccagtcaacagcgaaattaaacaagctcgaatatcaattgttactcatacgttttaatgcgcacatggggccgagtgaaaactcttcaggccaaaaaaaaagaatgaggccttaagcgtagtcgttgccattaacctaattgattggttgccacccatcacttgccactatttccagaggtcaatgcaaattcattacacaaattgacattctgccgtgcatctgggttagatgaaagatacattgatagtttacaagataagttcttaaaagtctatttttataagcaataaccagaaagaactagctacaagaatatagaaaaagtgttcgctttataaggcatagcatatatgtacatacatatgtcaaataaatttagggctataaataatttgttctaatgtgacggttatatatgaatgtctatgacgtctgtaagtacgataaataggcttctatcatcgggaagataaattattagttaaaatgttaactaatgaaataaaaattcagcaattttcaacggtcaatagtacatttctactgcatctcagggccatcgaaaattaattatacatatttctgtgtatttccgtgtattatttcgaacttttattccttatcattaagtggaatctaaaaatttcccaattaaattaaatatcctttttttttttgtattaattgaaggatggtgccaggtctttaaggccaaattctcatctaaatatttatactttatttttattctatcagacagatatcctatacaattgcactttgcgctctaccgatctcatttgatattttccaatatctatcgaaaaatctcattaaccggggaggccttgagccggaaaatctctagagatttagcggagaatgcagagaggattactgagcggtgggcagagggccgggctgcacgtgaggcacatcaaaggcggctcaattagcggtcgaagaaaatgagcacactcacacagaggctcgagcatttgcatatgtaccattttcacgtagtgacgagagagaagagaggcgctgctctcggcagttacttacatcactgttattgcagccatggatttggccatcttcgctcgtcaccgatggcgatgtggttgttgactcggccatttttactttattttgatggcgattgggattgggatttggatttggttttgcctccgatttggactttattcactgccgatttttcttccgctgtttacgtttcgcgtttgtgttaattttcgtgcacgcctctcaaactaaattgaacaataaattgcgagggttataaaataaacaaacacacagagcatcagaatattggccgcgtttggcggttttaactgctcaaaacgagttggtcaaaaaggaatttcatattcttgcagccttttttgcgttctttttacttgattttcacggttttggcgcacacacgatttattttggtatctcgacgagctttttgatttttttgctttttgctaagctgcaagctgcatacggcgacaaaaagggaacaggttccacaacaattgccgttttgtttttattatgtttattgcgaatacgcaatgttggttagggccaaaagggggcatggcagcattaggctcacattccaacttttttttctgccctgtatgactaatagggccccgcgaaaaatgcgaaagaaatggggaaatgcttctgcatttgatgtgatttcgagatttctcgattgtgccgagcgagaactgttgctttacggtacgtacgcttatttactgcttttttttttatataattaacacatttcaggggtactgtgcaataaatttatctatataatccagcgatttgtgtgtgtgtggcggtacactctacaatatttataattcaattattcacttatttatcttttattaacggccctaaacgatggaaacaataacaacaataacaaacggcacaccaacactattgcgaaaacatgttctgcgtaaatgtctgcctctctcgctcgctcccgcagcgagtgtgtgtgcggtcgtgggtgcgagcgcaacagcaacagcaacacttgtcggcagccgcagcgcaaaacacggaacttggcgctttcgcgttctaagctaaaatgaaggcagctccactgaaaagtgtggccagcgcgttcgggccaagaggttgccccattgcggagctttcattgggtctagtgtgaccgatggaacggagtaaattatttacctcatggtcggcttctccgggaaaaattctaatattaatatattaaaaagcaaaatacgaagtggacttgcaatactcatgcatagatattttaatgaattgtcacaaaaagtgctccaattaaccataaaaaggaaagtttttaatcttaaaaaaaaaataccaaaacagtactgaacacatttttcaacactgaagccccagctacaagctgttggctgaaagctttttaaaatgacagcttagccctgtactctttttgtcttcctctcgcgttttctcactcccactgttgacagctgccatcgaacaagtgtctttaagcaaaacaaaacaaaaacagctgatcggctgcgccgtgcgttgatgtgagtggactatctatgtgtgcgtgcgtatctgtgtgaaatttgtattttgggctgggaatccctccaattccattaataatgttcagctaaatagcgtataatcacttataatagacatgagaatgttctgactgctgacgcaatggattcaatggatgtaattgaccagctgttgactgataagcggcccattaaggctatccgctaaggcaattgtgacgtcgactgttcttacaagtgcgtcgattggccgacgtcaccgcttgccggctgacgtgcaaattggattaaataacccaaataacagagctcaattagcgggggcatacaacttttgcggcaaaaaaagcactaatgaagataagccattcattcatacacctcccactttttggacaggaatttcgagccattctgacaacgcttcaatgagttcgacaaacagaattgaagtgccgtcaaataatcgctcattgagtgaaagcaaacagagcaaacaaccaacactgggatactaaaaaagaaagtaaaagaaacacaaaacaaaatgtcagttcataatacgtttagaaactatgaataatataattctgcgagttctgttagaaattaaaatacttttataaaccattaaacatagcctaggtattaaaagttaaaacaatatttttctctctgtgcagccagaaaaccataaagtgtagacacacaacattcaagaggcggcggccaagaattgtgttgataaattaaattagcttcgaagatgccgatgactgctcaagtggctagcatctttggcaaattaagataaataaattagtttagtttccgttcggcctgagatggcgagcgaattatttgtttatacaagtgagcaaaacaatagaaaagcccattccagacactaagtaaacaacgatgatgccagtttattttctggcggcttcctaatacttttcttggcacttttctgctcttcggaaagtgcaagtcaagaaatgttattcgattttaaaaaatccgcaaaaaagctactttttctttaacattataaagtaattggtacaagcaaacaatgactaaacgataaaatgtaatgtgctgtattaaaggccctcctaaaaaaagacttatggaagtcactcctgaaatacaactacatctaacttaatggttgacgaaatgcaacgacctttacaccgtaaaagctaggtattggataagaacagttcgtaagtttttcgtgcttttcggcttctgaaggaattgtagatcccctacttttcccaccatacatatatcccactttatcatccatgaggggagtgaaatctacatggcccatctacacgactcagctgtttggcaatctgcagattagattagtagtgaaaacatcgtaaaaatggaaacactaaatacagcggaggcactgataagggcgaccaaatcccccagcaccacccgttgataaatacttttcaaatcttcacaccaacaaaatggtggatacattgtgggcaattccttataaaaggttataggaattggttggcttagttttgataagacaacatttcggtatgccctttaaaatgagatacatttattgattagtcagtttgcaacgaaaccaaaacaattgataagagtatcttataagatgtcatagtaagtaataccttactatctattaaaaattgataaacatataggtgccacggtcactatttggtgttatgataacttaatttgatacatacgcgtttatataacccataattagttaactggctttatcaaaaatggaatgaaatttttcaatcagagttggatgcgttgtgaaataaggttgtaaccataaggtgctcctacaaaattcctaagatgttagaagagttcctaagttgtccttcaaggtaaagctctctcttttcgtcgtcacctgcacttatgtaaacttaccactgctgccaacgatctgcgaggagtgtaaccatttccaaattcctggcgcgtttgctgttgtcccgcaacagaggccgctcgccggcggggcggcgggcgtggcacgtcgccgccggccaccgaggaagaagacgacgggacgggaagggccgccgcggccaccaagccgctggaacgtgccgacattgttgtgttgttgttgtttgtttcttttagagaagcttctgcaatgaaagaatgacggaaggagagagggtgaatatgtgcaaagcggaagtgcaaattaagcgataaatgacacgaagaagaagaagaggaggctgccataaggtaacaagagggggaagggtgtacagaagcgaaggaaagaaaagcgaacagacaacaaagacagcaaacaaagtgaacaacggtacttgtgctagatgccatctctgtctgccgccctgcccccgtgcaagcgtgtttctagtgtgtgtgttgtgtgaatgaggtgtgggtgatagagcacaaaagccaaacattttcttgataattagccaggcgcgaagccatgtctttgtagaccatttatggttagcataaagtttcgcccaagttttccacttacgtttacacacgcacaaacacgggccactatattttcgcccgatttatgtatatattttgcggtggtatgcgtgtgggctcgcctttatccactatttgcggaaaatcatcacgtacttctatcacacggcaaattctacactgctcactattcaagcgattatcactttgaccgcttcggcggcgcacatgccttaatcgccgatatcggtcggctataggtgcctgtatatatgtcgcacgcgcagtattaaataaaatttaaacaccggacgggaaaaatgcacaaaacggcgacaaaatcgagaacaaaactgccagagtgaccgtgtacgcgcactgagaacataccacagcacccagaagccttaacagttaagggaagcacttgttaaattcataaaatggctcgcaggcttttattgaaccaaatatttatcaaaataaggtgaagtttccgtaaagcatgaaatttgtagttattataaatatgtatattattataaatttattaagtaaactaatttgccacgcagctagtttgggtattgttcggtattatctgaacaccaacgaacggccacacgcaagcagtgaaaatcccaatgaaacgagaaatccaataagttttagcgtcaatgtgttgcaacggttggtgcatttattgattaaaagagacaaaataccgaaccccttgaccgcagagccaaataattcaaaaacacccgactttaagccacaaaacactagaatcaacggcggtgcagcagcaggaagaagaggaagagaggtgcgtggtgcgtagttagttagtggcgaaattgcgtattagaaacgaaaacaacaagcagctctgcgcgggccagcaaacatttcgaacaaccattagccagggcagaacaagccgatccaacgtgttgtcgcattcgcaaagggagtatcgaaaactgattacatgggtccgacggatcaagactggatcggctgtgcagtgtctatagcctgcgacgaggtcctgggcgtcttccagggcctgatcaagcagatttctgccgaggagatcaccattgtgagggctttccgcaatggcgtgccgctgcgaaagcagaacgccgaggtggtcctcaagtgcacggacattcgcagcatcgatctcatcgagcccgcaaagcaagatctggatgggcacacggcgccgccgccagtggtcaacaagcccacgcccgtcaagctgccccacttctccaacatcctgggcaagcagcagcagctccaactccagcagcagcagcagcagctacaactc

SEQ ID NO: 16856 - DNA, 3592 bp, DROSOPHILA
tcgattttgtcgccgttttgtgcatttttcccgtccggtgtttaaattttatttaatactgcgcgtgcgacatatatacaggcacctatagccgaccgatatcggcgattaaggcatgtgcgccgccgaagcggtcaaagtgataatcgcttgaatagtgagcagtgtagaatttgccgtgtgatagaagtacgtgatgattttccgcaaatagtggataaaggcgagcccacacgcataccaccgcaaaatatatacataaatcgggcgaaaatatagtggcccgtgtttgtgcgtgtgtaaacaagcttctctaaaagaaacaaacaacaacaacacaacaatgtcggcacgttccagcggcttggtggccgcggcggcccttcccgtcccgtcgtcttcttcctcggtggccggcggcgacgtgccacgcccgccgccccgccggcgagcggcctctgttgcgggacaacagcaaacgcgccaggaatttggaaatggttacactcctcgcagatcgttggcagcagtgaacgactctggggactcgtgtcacctgcgaatcgtcgtactcaccggccagtcgctggccaaaaaggatatattcggcgccagcgacccgtatgtcagaatcgatttgaacacaatcaacggtgatattaatattgactctgttttgacgaagaccaaaaagaagacactgaatccaacctggaatgaagagttcatatttagagttaaaccgtctgagcataagcttgtgtttcaagtatttgacgagaatcgcctgacacgcgacgacttcctgggcatggtggagctgaccctggtgaatctgcctaccgagcaggaaggtcgcaccatcggagaacaaagctacactctgcgcccgcgcaggtcagtaggcgccaaatcccgcatcaagggcacactgcgcatctaccacgcctttatccgggagacgcgggagcagagcgagccatctagtggcaatagcgatggcgagtgggagcacgttgaggccaccaatgccggtgagacgtctgcccagccgcacccctttcctactggtggccacgatgccctacccgctggatgggaagaacgccaggatgccaacgggcgcacgtactatgtgaatcacacggcgaggacgacgcaatgggataggcctactgtcttaaacagccacagtagccaatccactgacgaccagttggcctcggatttccagagacgtttccacatcagcgtggacgacacggagtcaggacgttcggcgaggccaaggaacgctgctcacatggagactgtggccagcgatgagagcagcgaggatgaggatgtggctgagaatggcgaggagatggtggatcttcagaataatcaggccaattgtctgcactgcggcgagctgcatgacaatgacgaggcagaggagtatgttgatgaggaggagtataatgcagagctgcagcctccaacacctgacccagatcagccgtcagccacatcccaaagcgcgcaaacatgtgatatactcgataggaacttgtacttgaaacgcatattcgactccatcagtcacaatagtatagaggacaataacaatgctgctggcttagcatatactccaaaaacagcagccacctcatcggcaccacccaacaccccaacaaacaacaatggaattctcgcacaaattgccatgcaatatcgcgcagaggaagatcaagatccaacagtggaccataccagcacccatccaaaagatccctcagccttttgtcggtattttgtccgtacccgaacaatcctcccaacccccaaggctccttcacttcgcagccagcttcctaaccgccatacgttgtgctctatctttcatgacctcagttttgtttacaattccctgcgacatcctgtcgcccataggcagcccgaaatctcagcgaccagtttgcagaacgacctgcggccgcttgatgtggatcatcgtcagcaggagccgcaacatcggggtcagagacaccagcagcaacatcggccatcgtctcaaaccttggttctcttttctcgttcgtccatttctgttggagaatctaaactatttgtcgtatcgaaatttgtcagtaatactggtggtgaagaggaacccctgccaccgcgctggtcgatgcaggtagcccccaacggaaggacattcttcattgatcatgcgtcccggaggactacttggatagacccgcgcaacggacgggccagccctatgccaaatcaaactcgtcgcgtcgaggacgacctgggtcctttaccagagggctgggaggagcgagtacacaccgacggacgcgtattctatatagatcataacacgcgaactacgcagtgggaagatcctcgcttgtctaatccaaatattgccggtcaggctgtgccctattctcgagattacaagcaaaaatacgagtatttcaagagtcacattagaaagcctacaaatgtaccaaataaatttgaaatacgtattcgtcgtacgtcgatactggaggattcttacagaattattagttcggtaacgaagaccgatttactaaagactaaattatgggtagagtttgaaggagaaactggcttagattatggaggcctcgcaagggaatggttctatttattatcaaaagaaatgtttaatccgtactacggactattcgagtactcggccatggacaactacacgcttcagataaacaatggtagtggtttgtgcaacgaggagcatttaagttactttaaattcattggccgtattgcgggcatggctgtgtatcatggaaagctgctagatgccttcttcattcgtccattctacaagatgatgctgcagaagccgattgacctaaaggacatggagtctgtggacacggagtactacaactcgctgatgtggattaaggagaacgatccacgcattctggaactgactttctgcctggatgaagacgtttttggccagaagagtcagcacgaactaaagcccggcggtgccaacatagacgtgactaacgaaaacaaggatgaatacattaaattggttatcgaatggcgctttgtggcacgtgtcaaggaacagatgtcgtccttccttgatggttttggatcgataattcctctgaatcttattaagattttcgacgagcacgaactggagctactgatgtgtggcatacagaacatcgatgtgaaggattggcgcgagaatactctgtacaagggcgactaccacatgaatcatattattattcagtggttctggagggctgtactttccttctccaacgagatgcgttctcgtctgctgcaatttgttacgggcacttcacgcgtgcccatgaacggtttcaaggagctgtacggctcaaatggcccccagatgtttactatcgaaaagtggggcactcctaataactttccaagggcacatacctgtttcaatcgcctggacctgccaccctatgaaggctacctgcaactgaaggacaaactgatcaaggccatcgagggcagccaaggatttgctggagttgattaa

SEQ ID NO: 16857 - protein, 1082 aa, DROSOPHILA
MSARSSGLVAAAALPVPSSSSSVAGGDVPRPPPRRRAASVAGQQQTRQEFGNGYTPRRSLAAVNDSGDSCHLRIVVLTGQSLAKKDIFGASDPYVRIDLNTINGDINIDSVLTKTKKKTLNPTWNEEFIFRVKPSEHKLVFQVFDENRLTRDDFLGMVELTLVNLPTEQEGRTIGEQSYTLRPRRSVGAKSRIKGTLRIYHAFIRETREQSEPSSGNSDGEWEHVEATNAGETSAQPHPFPTGGHDALPAGWEERQDANGRTYYVNHTARTTQWDRPTVLNSHSSQSTDDQLASDFQRRFHISVDDTESGRSARPRNAAHMETVASDESSEDEDVAENGEEMVDLQNNQANCLHCGELHDNDEAEEYVDEEEYNAELQPPTPDPDQPSATSQSAQTCDILDRNLYLKRIFDSISHNSIEDNNNAAGLAYTPKTAATSSAPPNTPTNNNGILAQIAMQYRAEEDQDPTVDHTSTHPKDPSAFCRYFVRTRTILPTPKAPSLRSQLPNRHTLCSIFHDLSFVYNSLRHPVAHRQPEISATSLQNDLRPLDVDHRQQEPQHRGQRHQQQHRPSSQTLVLFSRSSISVGESKLFVVSKFVSNTGGEEEPLPPRWSMQVAPNGRTFFIDHASRRTTWIDPRNGRASPMPNQTRRVEDDLGPLPEGWEERVHTDGRVFYIDHNTRTTQWEDPRLSNPNIAGQAVPYSRDYKQKYEYFKSHIRKPTNVPNKFEIRIRRTSILEDSYRIISSVTKTDLLKTKLWVEFEGETGLDYGGLAREWFYLLSKEMFNPYYGLFEYSAMDNYTLQINNGSGLCNEEHLSYFKFIGRIAGMAVYHGKLLDAFFIRPFYKMMLQKPIDLKDMESVDTEYYNSLMWIKENDPRILELTFCLDEDVFGQKSQHELKPGGANIDVTNENKDEYIKLVIEWRFVARVKEQMSSFLDGFGSIIPLNLIKIFDEHELELLMCGIQNIDVKDWRENTLYKGDYHMNHIIIQWFWRAVLSFSNEMRSRLLQFVTGTSRVPMNGFKELYGSNGPQMFTIEKWGTPNNFPRAHTCFNRLDLPPYEGYLQLKDKLIKAIEGSQGFAGVD

SEQ ID NO: 16858 - DNA, 3037 bp, DROSOPHILA
aattacaatttgaaggaagaaaagcgagaaacgcccgtttggctctaaattacttggcacagctatttgggtatacagagcctgatgacctcattaattttcaatctgagccagattacagtccgctggcgggagtatgatgaatctctttcaagccccccccacccccaattctaatttatgatgataaatgagtttcaatcaagcggcaaaagtgaagtttacggcagccagttgcccattttgaccactcggctccttaaatcacgggattgtacatagaaatttatacataattcgatttgactttttcccttgctgtggtgcgaggattttcatttcaatatttatgaattttttttttttttttggaacagccattttttgcgcggcagcaaagttcaaaaatcaaggggcttattgattttgatttgaattggactcggtaaatctctaattaagaatttgccttggccgacatttgcataatctgtacgcaatccattatttctatttatttatttatcggctcgaaacagagacagtttggtcacctgctgttccatttcgtgaacgaacgactcctatttatttaaataatctggccataattcaagtgaccaagggtaaacaacaaaaggtatacgtatatgtgaatgaaaaacttttgaacccttttcggcgaggaaaaaataaatgacattgcaggttcgttttgcaatcaatttggaaattccggttaaaaggcggtagcacgaaagtgtgtttatcccataatttatggtcgatacacttttggccgagcgtctgcaagggtaattattgtattatctaccaacggtgcggatacgtaataaatgctcggtttaaaaagggtgaaaagcatgcgatagtttctttgtgccatttttttccagtaattccattccattgaatggtggctgtgattaaagtattaaataagatgaagtcgaagtccaagaggagatttttattttaactacagcctcattcttttgatctgttttctgaaaaattttcgaaatgagaaattcaatttcgacccaattataagatcggaggcagtaaaatgttagcgatatgatcgtacccatttttcgtgcacttgtagctggccatgcgattgccaaagtccacggcaactgaaacggatctttcccggatatagagggcgtagatgaaagcgcccacgaaggtgtctcctgctcccaaggcgtccacgatgcgtttgggcttgtgcggcttgacgtgggtgaagttaccattgagatccaagatgccggcaccctgatcgccccaaaggacgaccacatatggtcgcttgagattaaggccccaacgcattcgcaatcgctcgtccagctgcatgcaggcatcctccagagaaacccaaccattcggttgggccaacttcttagagaatacggcatagtcacagtaatccatcagaggccacatgtcatccaggttgttatcgaactccatcgatagtacgatcttctcctttctgttcgcattatatgcctctatgtccttgaccatcggcaatgacttatcaaagtatagtgcccgaatgtgaatccatccatattggttaaggttcagctttcggaaatcatcaatgctaacgtacgggaagttattattgcaatagacaatgttccgcgtcttagtcgccttggtgagtatcacggatgagaagggtgcaccctggtcacaggttggacagttgtcgataatgatgccacgactcttcaagtcatcgaccagaacttgaaacacactccaactgctcagcattcctaggaactccactttgacgcccagattggccaaaacagtacagttgttcgaggccttgccaccgcgaatccagtatcctccaatgaccttctgatgtgagttctcctcgggaaaacgttttatggtcgagacaaagtcaatggtcgttgtgccgatgcacaacaccgtctttttgccaacagcccagctcagtttgtggccatattgagtcatattgaatattgcttttaaaatttaaaattttttaaaatcagttttccaaaaagtacgtggctgatatgatatagaaatttggattaaaaatgctttccactccataatagagatctacaagtccatacctaacgattcaatcatttgtcaagagttattcaaaatcaaaaaaacaaattatgatcgatttaaattaagggcagagaatcgaagaaagaagtagaggaggatctggatacgaaatcagagctttagacaatcgccaggatgacgcaatggtgtgctatcagtgtaatgaaggccgtgctctgcgtcggctgcacggaggtggactacgtgaccaccatggataaggtcgacttccagtgcgacaggtgcagcacccagaatggaatgcttcagcgcagcggaagatcctcgaatgttagtacggccctgcgtctgttgggcgccaatgtggagttgttcggtgtgctcacccgtaatcccacctatcgcatgattctggatgatctcgagcagcggggcattgatattagccattgtacattcacggacgcaagtcctcccttttccacaattgtccaagatcgctggacgcgtcgttgcacggtggtgtattgcgacaagtcatttccatatgttacggcagcggatttccgcaaattggatctcgatcaatacggctgggtgaattttgaggcacggagtccacgtgaaacttgcgatatgatacgcctaatcctcgatcacaacaacgggcgggatgaacgggatcggatagtggtatcgttgcagattttcaattccttcgaacaggtcgtgcatctgattgccatgtgcgactatgtgttcgtcaccaagtatatagccgagtccagaggctggaagtcaccgctggaagcctgcgagggtgtcaatgcgctactgcgcatgccaaggaacattagaattcgcagaccctgcatcattgtgccgtggagcagcctgggagcaggat

SEQ ID NO: 16859 - DNA, 828 bp, DROSOPHILA
atgactcaatatggccacaaactgagctgggctgttggcaaaaagacggtgttgtgcatcggcacaacgaccattgactttgtctcgaccataaaacgttttcccgaggagaactcacatcagaaggtcattggaggatactggattcgcggtggcaaggcctcgaacaactgtactgttttggccaatctgggcgtcaaagtggagttcctaggaatgctgagcagttggagtgtgtttcaagttctggtcgatgacttgaagagtcgtggcatcattatcgacaactgtccaacctgtgaccagggtgcacccttctcatccgtgatactcaccaaggcgactaagacgcggaacattgtctattgcaataataacttcccaaaggagaagatcgtactatcgatggagttcgataacaacctggatgacatgtggcctctgatggattactgtgactatgccgtattctctaagaagttggcccaaccgaatggttgggtttctctggaggatgcctgcatgcagctggacgagcgattgcgaatgcgttggggccttaatctcaagcgaccatatgtggtcgtcctttggggcgatcagggtgccggcatcttggatctcaatggtaacttcacccacgtcaagccgcacaagcccaaacgcatcgtggacgccttgggagcaggagacaccttcgtgggcgctttcatctacgccctctatatccgggaaagatccgtttcagttgccgtggactttggcaatcgcatggccagctacaagtgcacgaaaaatggaaaacagatcaaaagaatgaggctgtag

SEQ ID NO: 16860 - protein, 275 aa, DROSOPHILA
MTQYGHKLSWAVGKKTVLCIGTTTIDFVSTIKRFPEENSHQKVIGGYWIRGGKASNNCTVLANLGVKVEFLGMLSSWSVFQVLVDDLKSRGIIIDNCPTCDQGAPFSSVILTKATKTRNIVYCNNNFPKEKIVLSMEFDNNLDDMWPLMDYCDYAVFSKKLAQPNGWVSLEDACMQLDERLRMRWGLNLKRPYVVVLWGDQGAGILDLNGNFTHVKPHKPKRIVDALGAGDTFVGAFIYALYIRERSVSVAVDFGNRMASYKCTKNGKQIKRMRL

SEQ ID NO: 16861 - DNA, 3930 bp, DROSOPHILA
caattcagtggatttccgaagaatcacacgaaactcgcaataaatatgtacacatatagaaatatatatagcatacatacatatgtaggtgccccaaagatatcgacttgttgcctctggggcaacaacatagaagtcgggataatggtaaacacataaagggcaaactttttgaccgatatcggattacactatccacacccacacacttgtacaacgaccagagtgatgaagtgcgggagcgagggaggttaaaagcgaacaattaaaaaagcacatggttttcaggcgatggcgccacctccaaagacctttcgaattcaagtgcaggcgtttatttttgggagcaaactcacctgggccagttgatcctcggccgccttgcgctgttccggattcggatcaatagttgcgcgcaacagttccgtgagtttttgtgcctccatttttgctacttttgcttgattctatgtttcgccggtctttctgctgcacttcgtcgtttggcggtcaccttgtgcccactgtgcacccgctgttcttgcctttatatagaccttggtttatgctagccgaaccagtggctccaatgtgtgggccaaattgcaaatctctttttccggaggaaaaaacgtggaaaagactccacacacgcacacacacaccgccgaaattcgcgagacgaacgaagcttagaagaagaagaaacagcgcctgtgtgtgttgactaacgccgcagtgtatggggccctacagggctgcattatgttcgccggtaacagtttagccaaaaattcgagcaatattgaaaagccttcgctgcggaaaatctaggcaccatttatatatagaccacttgcttcataaggtaactatatttaaaggcttaaaaaacagcgacttttcacaattcccgataaattgccattcaagttgcatggccaatcgattgttgcagccctggcagctgctcgtacgtgaacacgcgaatgtgtgtgtgacgaagagcaaagtgacacatagttggaggtgtggttgaaaatatatagaaatctgggtttatctgcaactgaaacgaagggaaatttgtgttaaaggcgagcgaagatcgcaactgaagagctttaactggcagcaaggcaaaaggacgagcagcgaccatggcaggcaggctaccggcatgcgtaatcgatgtgggcaccgggtgagtttttagtttcgattgcccgtgggggtctccaattggacggaaaggaggtcgactgactaacactctgcttgtctgcacatccatcagctactccaaactgggatttgccgggaataaagagccgcagttcattattccctcggcgattgccatcaaggagtcggcacgagtgggagacaccaacacacggcgcatcacaaagggcatcgaggacctggacttcttcatcggcgatgaggccttcgatgccaccggctactccatcaaggtatgctcttgtatctatggtcattaagcaaccgacatcacatttatcattgcattccaatagtatccggtgcgtcatggtctggtggaggactgggacttgatggagcgctttctggagcagtgcgtctttaagtatctgcgcgccgagcctgaggatcactacttcctgctgactgagccgccgctaaatacgcccgaaaatcgggagtacaccgcggagataatgtttgagacgttcaacgttcctggtctgtatatcgccgtccaggcggtgcttgccctagccgccagttgggcctcccggtccgcagaggagcgtacccttacaggcatcgtggtggacagcggcgatggagtgacgcacgtcatacccgtggtaagtagcacagatcttatcttatcagcagagttgggttggcactggattcggtaaaaactgtttgaaaagagaacccaaaaccgaaacagtcgacggatttatttaataaataaatagcacattctgaggctattattaatactacagaatgttatattaagagggaattattaagataaaatagcgtattagttataaccatataaatatattaagctgtttttcatttctaggccgagggctatgtgatcggctcctgcatcaagcacattcccatcgcgggccgcaatatcacctcgttcatccagagcctgctacgcgaacgggaggtgggcattccgccggaacagagcctcgagactgctaaagcgatcaaggagaagcactgctacatctgtcccgatatcgccaaagaatttgccaagtacgacacggagccgggcaagtggatacgcaactttagcggcgttaacacggtaaccaaggcgccgttcaatgtggacgtgggctacgagcgattcctgggacccgagatcttcttccatcccgagttctcaaaccccgactttaccattccactgtcggaaatagtggataatgtcatccaaaactgcccaatcgatgtgcggcgtcctctatacaataacattgttctgagcggtggatcaacgatgttcaaggacttcggcaggaggttgcagcgagatatcaagcgatcggtggacacacgtctccggatcagcgagaatttgtccgagggacgcattaaggtgggtgatatcacagctgctaatgagtcatacttcttactttgattatttttgttacagccaaaacccattgatgttcaggtgattacgcaccacatgcagaggtacgccgtgtggtttggaggcagcatgttggcttcaacggtaagttatagtggcctaagatccgtaaaatcctttatctcaatattcttcccatttctagcccgagttctatcaggtgtgtcacacgaaggctgcctacgaggagtatggccccagcatttgccgtcacaatcccgtctttggcaccatgacataattgatccgatccaatcggcttgcagcagttatttttgatttatttttccatttaaaattgatttattgatttattctccaactatatatatatatatatacattgcgattcggtattccacgctaaagtattagtaattattcttttctatatgtgtttagctattaactctgtgtaaatcagtttcgttctgtttaatttcgtgtgattttgttaggctaactataaagcaacaactccgatgtctgccagttcaaccccctatctaaggtgcattatttctagaagtcgacttttataccatactcaaacacgatcacacacagtcacaccgatctaagctcttggagaaatcccggctctatacacaattaaatacgaaaacgctctacttgtcatagaaatatttataattgcaataactgcaaccaattcaaacactgaatgaacaaaaaaggaaaaacgaaaagaaatattgatgagaaatctgtttgttatattgataagcgtaattaaaaaggcattaaataaatcaataaaacattctttaagctcaaacactttcgtcgctttcgatctaaagcttttactggaaaattttattcaatgcataagttacatatatatatttttttgtgttcaaattgctctatgtattgtatatataaattttgtgacggtgtcgctaagctgagaaaatagcaaaaggtggtttccaaaaaacatgtcccgagctagaaatccgaaacaacttcgttacgcctcgcgtaattgacaaactgactagtcaatgtagtcactggagccctcctcctcgtcgttgctgctcgtggattgtgccgccgccgtttccggcgaacgcaagtgctctgcaatccggaagttttgcaggaagtctcgcatcgcgtccatcattagcgttaatgactgctgcaaaccagcttctgcaataatgttggaggagaagtgtaactacgatatccgctagcgattcttttgg

SEQ ID NO: 16862 - DNA, 1417 bp, DROSOPHILA
acgaagagcaaagtgacacatagttggaggtgtggttgaaaatatatagaaatctgggtttatctgcaactgaaacgaagggaaatttgtgttaaaggcgagcgaagatcgcaactgaagagctttaactggcagcaaggcaaaaggacgagcagcgaccatggcaggcaggctaccggcatgcgtaatcgatgtgggcaccggctactccaaactgggatttgccgggaataaagagccgcagttcattattccctcggcgattgccatcaaggagtcggcacgagtgggagacaccaacacacggcgcatcacaaagggcatcgaggacctggacttcttcatcggcgatgaggccttcgatgccaccggctactccatcaagtatccggtgcgtcatggtctggtggaggactgggacttgatggagcgctttctggagcagtgcgtctttaagtatctgcgcgccgagcctgaggatcactacttcctgctgactgagccgccgctaaatacgcccgaaaatcgggagtacaccgcggagataatgtttgagacgttcaacgttcctggtctgtatatcgccgtccaggcggtgcttgccctagccgccagttgggcctcccggtccgcagaggagcgtacccttacaggcatcgtggtggacagcggcgatggagtgacgcacgtcatacccgtggccgagggctatgtgatcggctcctgcatcaagcacattcccatcgcgggccgcaatatcacctcgttcatccagagcctgctacgcgaacgggaggtgggcattccgccggaacagagcctcgagactgctaaagcgatcaaggagaagcactgctacatctgtcccgatatcgccaaagaatttgccaagtacgacacggagccgggcaagtggatacgcaactttagcggcgttaacacggtaaccaaggcgccgttcaatgtggacgtgggctacgagcgattcctgggacccgagatcttcttccatcccgagttctcaaaccccgactttaccattccactgtcggaaatagtggataatgtcatccaaaactgcccaatcgatgtgcggcgtcctctatacaataacattgttctgagcggtggatcaacgatgttcaaggacttcggcaggaggttgcagcgagatatcaagcgatcggtggacacacgtctccggatcagcgagaatttgtccgagggacgcattaagccaaaacccattgatgttcaggtgattacgcaccacatgcagaggtacgccgtgtggtttggaggcagcatgttggcttcaacgcccgagttctatcaggtgtgtcacacgaaggctgcctacgaggagtatggccccagcatttgccgtcacaatcccgtctttggcaccatgacataa

SEQ ID NO: 16863 - protein, 418 aa, DROSOPHILA
MAGRLPACVIDVGTGYSKLGFAGNKEPQFIIPSAIAIKESARVGDTNTRRITKGIEDLDFFIGDEAFDATGYSIKYPVRHGLVEDWDLMERFLEQCVFKYLRAEPEDHYFLLTEPPLNTPENREYTAEIMFETFNVPGLYIAVQAVLALAASWASRSAEERTLTGIVVDSGDGVTHVIPVAEGYVIGSCIKHIPIAGRNITSFIQSLLREREVGIPPEQSLETAKAIKEKHCYICPDIAKEFAKYDTEPGKWIRNFSGVNTVTKAPFNVDVGYERFLGPEIFFHPEFSNPDFTIPLSEIVDNVIQNCPIDVRRPLYNNIVLSGGSTMFKDFGRRLQRDIKRSVDTRLRISENLSEGRIKPKPIDVQVITHHMQRYAVWFGGSMLASTPEFYQVCHTKAAYEEYGPSICRHNPVFGTMT

SEQ ID NO: 16864 - DNA, 3244 bp, DROSOPHILA
actggaagtacagcatttcacttaagtacactatttgtatttattttggttgcagtgcaacatggcctcgatgcggttgttggctcttgctaccgcactcacactttagcactcgcatcaaagtatctttcggatgcaaaggcgaaacgcactgcgccgaaaacgtgtgcgttttgcattgcaacagaagttgattgtaaggcataaccgactgggtaattccctaagctgaacatcttacaaaaataagtttttcaacatgttttatttcaaaagataactattatttgcccaaagttaaaattgtatttatgtgccttattgaattacttatattttctataatatgtataatataatattctactataatggcataccaagtttttatatctttttatgttgcacattatttattcttcatctaaagtcaactatattcggtagagaagtgcactcaaactagcaatttgaaggcaacgacatcgttcgacggcctagaagttttgctcgccaaacagaaaaaaattgtttaaaaattctacaaaaaagcaaacacaaaacatgctttacagcaatgcaatttggtgcttgtttgctttgcatttttctcccagtttttgttttgataaatgggtgcagtacttttatttatgcatctcgtgtgtgtctcacgctaaaataattatctgcattgcatttctgagagacatatatttcaaaatttgcaggcgggcttgcagaaaagattctcgtttgtaaagcattttcaaattgatattgattgggttctttaaattaaaaaccattgaaatgaagagcaaactaatatttaagcattcaactcattaaacgtttaagatcactttaatttatttcaatgctatatgtttataaatattttataggttaacagaaacagcataagtatactacgcaaatataaacaaaggtattaatgtcgctgcgtgagagatgaggtgcatacacgatataaattttatgcatctgttccattttgtagtaacagcaatcgcaggctcttgcatcctgagctgtgaacggtcttcatagcttcctgaaggataaaggattccttcttgctggtgagaatacggcgctcccttttcaattcactggccagacaatccagaagatcatcctcattgaagaaccgaaagttcacgatggtcgtctccgccggcagttcctgcagcaattcgaactgctcccagtacagatttgtttccagattaaagacgtagacaaccaggaccctttgattccctttcggttcgccctcccgttccaatatcaatcgattgtagatgggcaccagtccgtgatcacaggtcgtcagattgtcgatgatcagcagattcacaccgcattcggaaagtccatcggcaaactgccggatcagtcggaatttactcgcttcatccgacacttgtgtgctccaggagtaggagtgagcatttcttggccagggaaaacaccgacgtagtgtttcggtcgccagagtttttcccacgcccggaggtcctagtagagccaccgaccggaaacgccccgaaccgctcagcgccctttccatgcgagacagtgcctgctcctgattcagaaccaccctgcccatatatcgaaagatccgttccaagttcagagcctcgggactgcagaaagtatcctgaggtgggtagaattataggcacatgattttatttgaagtaaactgtatcaaagttcttactttattatgcacatacaagtctcctgagagataatcctcctgctccaagccaagcagtctgaggaaacccaaccaaaggccttcctcacgtggtgcgggataatccatctgctccgtggataacttcattccaaggaagaacatcaggacaacccccagtgttaccgtcgccacgatggaaagtccatggaggagctgtgataggcggttcgaacgcaatcgttcacggtaacgctggcagctggttctccgcaggatgccccttagcctgggatcctcctcctcatccgaaaagtcacctccatggtgttgcagataccgccggcggttccattggcaatttagcttagaaggcggcattgcagttttcggttgcatttgattcgtctaaacgcactatgttaattttataaaattacttttgactgcagctccagaatttgtttaatgctttttgtgtcttttgtgtgagcaacaatatgaatttagtttgacacatctaatagtattggatttgttggctaattttgactgtttaatcaaggaacccattgaaaaatccaaaggaaaaacattaaatttactgtgttagtttttttttatcttttaattgttgggcatttggaaaaacctgtattcattcttattgttaatggtttaaatgttagaaatctttaatcttcaactgtttcatacaatttctaccaatcagttgcagactcaataacagattgtaaaaagcgatttggaagcgaactcagcggattgaaagcgcttactcatcattatcggacattggcaatcagctgatttggagcagcaaagacgatcattaccattacgctggtgattaaccccgcacccagaccccaactacagtacaaacggcaactgggccatcatcatggttcgttcgaaagcagctggaagatctagcgatcgtggttaccaaaccaacccaaaccgaactgaaccgagccgaggtaagccaagcagacccagtagactcactagacccaccagaccaatccaagccaagtcgagaagagacaagacaaccagggacaagacaaagccgtggacagccagacaatcagccagccaagccaggcagctattttggtgcttggcaacaaacatggctcaaaatgtacgggacacatctcagtaagtattcgtaagtcgacaataggcaaaaattgaggaagccgttaaatgcaatagtcactatcatatgcccttctctaaattcattgcatataaatcttaagaaaatgtaaatattaatttaataaatattatttataaattaatactcaataaatattaatgcgatctaaagtactaaatacattttgttttaaatatattccttatctaaagaaatatattcgctatactcaatatttaaatattcctaagatcaaagcagctctccattgaattctcaatgggatgtaagggtattccattagtcgtggcattgcgaag

SEQ ID NO: 16865 - DNA, 1181 bp, DROSOPHILA
aactaaattcatattgttgctcacacaaaagacacaaaaagcattaaacaaattctggagctgcagtcaaaagtaattttataaaattaacatagtgcgtttagacgaatcaaatgcaaccgaaaactgcaatgccgccttctaagctaaattgccaatggaaccgccggcggtatctgcaacaccatggaggtgacttttcggatgaggaggaggatcccaggctaaggggcatcctgcggagaaccagctgccagcgttaccgtgaacgattgcgttcgaaccgcctatcacagctcctccatggactttccatcgtggcgacggtaacactgggggttgtcctgatgttcttccttggaatgaagttatccacggagcagatggattatcccgcaccacgtgaggaaggcctttggttgggtttcctcagactgcttggcttggagcaggaggattatctctcaggagacttgtatgtgcataataaagatactttctgcagtcccgaggctctgaacttggaacggatctttcgatatatgggcagggtggttctgaatcaggagcaggcactgtctcgcatggaaagggcgctgagcggttcggggcgtttccggtcggtggctctactaggacctccgggcgtgggaaaaactctggcgaccgaaacactacgtcggtgttttccctggccaagaaatgctcactcctactcctggagcacacaagtgtcggatgaagcgagtaaattccgactgatccggcagtttgccgatggactttccgaatgcggtgtgaatctgctgatcatcgacaatctgacgacctgtgatcacggactggtgcccatctacaatcgattgatattggaacgggagggcgaaccgaaagggaatcaaagggtcctggttgtctacgtctttaatctggaaacaaatctgtactgggagcagttcgaattgctgcaggaactgccggcggagacgaccatcgtgaactttcggttcttcaatgaggatgatcttctggattgtctggccagtgaattgaaaagggagcgccgtattctcaccagcaagaaggaatcctttatccttcaggaagctatgaagaccgttcacagctcaggatgcaagagcctgcgattgctgttactacaaaatggaacagatgcataa

SEQ ID NO: 16866 - protein, 349 aa, DROSOPHILA
MPPSKLNCQWNRRRYLQHHGGDFSDEEEDPRLRGILRRTSCQRYRERLRSNRLSQLLHGLSIVATVTLGVVLMFFLGMKLSTEQMDYPAPREEGLWLGFLRLLGLEQEDYLSGDLYVHNKDTFCSPEALNLERIFRYMGRVVLNQEQALSRMERALSGSGRFRSVALLGPPGVGKTLATETLRRCFPWPRNAHSYSWSTQVSDEASKFRLIRQFADGLSECGVNLLIIDNLTTCDHGLVPIYNRLILEREGEPKGNQRVLVVYVFNLETNLYWEQFELLQELPAETTIVNFRFFNEDDLLDCLASELKRERRILTSKKESFILQEAMKTVHSSGCKSLRLLLLQNGTDA

SEQ ID NO: 16867 - DNA, 2948 bp, DROSOPHILA
atcaggatcgatgtattcccgccaccgccggcgacatatgcacgttcggaccaacctgttggctacccggtccactgcccataccgcccataagagtcacatgcttcctatagttggtgaactgctccaggtattgtttcacggtgtccattggctcaaagatgtcgttgtgcttggcatgcagctgctgttgccccattgccgtcattattgtctgtggagcgaaataggagggaaagtccttattcacagcaatgccgaggaatccctgcagcatttcgcgtatcatttcccagcagtaggccagaatcacgcatgacttgtactcgatttcgatgaggatgcccttgaagtgctccatcatggtgacggaaccgagtttgataacaaagtcaccatactcgaaacgagcgccacgggactcgattttggtctgctttttggaggtgaaggtgttggtcatcttgagcatgagcagatcgaagatattgtcggcgacaatggccacttgtttgccggtgccattgtcgatgatcgagaacgtggaggcgggatactcggagttgtgcaggacgtggactgcgcgtccaggtgctccattgtgcggctgtggcgtcgagatgaacgtttcgcagtccaccagaaattgaccggcatgtgtggcgcccagggcgagcagacgcttgctcagctgatcgattatgtgggcacccgatttgccttcgggtaagggatacggttgaaggatagttactcccatagtttatgcaataatgtcagctttttagttttattaattttgtttacaagtcttgcaagctaaaagcgtccagtgtgaccagtgctgactttttagtcatgagaaaagttagacaaataaaaataccaaaccggcatacaattttcgtcagcaataaaataggacaacactggccacgtcgcgtgcggatttgtttataattttcggcaatgcagtttcactttaaagtcgcggacgctgaaagggacagggataatgtggctgcgaccagcaatgctgccgccaatccgcacgcagccctgcagccgcaacagcccgttgccctggtggagcccaaggatgcacaacatgagatacgattgcagttggttgaccacttttcagaggcacttcatgaaataaatagaaacccattgatacatccataacttgcaggaatatcgtggccaccttctcggtgaactgtgaactggacctcaaggcaatcaactcgcgtacgaggaactcggagtactcgcccaagcgctttcgtggcgtcatcatgcgaatgcactcgcccaggtgcacagcgctaatctttcgaacgggcaaggtcatctgcacgggtgcacgaaacgagattgaggcggacattggatcgcgaaagttcgcacgcatcctgcagaagctgggattccccgtaaagttcatggaatacaagctgcagaatattgtggccaccgttgatctgcgcttccccatccgcctggagaacctcaaccacgtgcacgggcagtttagttcctacgaaccggagatgtttccaggcctaatctatcgcatggtcaagccgcgcatcgttctcctgatcttcgtcaacggaaaggttgtatttacgggcgccaagtcgcgcaaggacattatggactgcctggaggcgatatcacctattttactaagttttcgcaagacgtagttgtttctacacatccaaatgtttttgtttagcttagttatattccataactacaatatttttaatatatttaccttaacttttttagtataaaatgtgaaatgaaacaacttaattaataatttccatgggtaaattcatagaaattgtaagattttattttggccttactaagcaaattaatttttatttaaaaaaaactgttgttattttaaataaatttttatatattaatgtcttgtaatccatttcattctattctttgaattaataataaatttgtaagtaatttgaatttttatacatttttgtacccattcctggaatttgggaaaaatattcaaatccacaaattctgaagtgtaccaacacattccatgaaaagaaaacacatttggataaacattacttttatttattttcaggtttcgtttattacaaaagaaaacacaagacacttcatagagattcgattcgattcttatggtacggaaaggagcgacattcttaagttgtgtacaaaaatttccttgtttctcgcttagtagcttcatgtacatggctatgtgagatttgtgttgggaatttataaactaattgtggttcatatgaaggcgtatatacgtataaaacttacaaactatgcagattcattatttgcataaattaattggacggtttcttcaacgattttcacttcatttcgtttaaaaatgtattcaagagttagataatacaaattagataaatttccattcgatatgcttgcaaacttttgtcaagatacattcgctaatgatttctaaaatctattaaaggcattttgtgaaagacacattgtttgattttttcattccgcacttggagcccgctctatgataaggcatagtacggttcgttacgacttacaagatacattaggtggctacatgtggtctgctacgtgtggcagaagattctttgttcagcaataaaaataaaatctaatttacgtttaactgctgttttgtacattcaattatacagcgggtcagtggagtaaaactgaaaagaactaaaaataaaaccaaaatgttgaccagcatttttggacggaatgcaatttcgttggcaaacaaaaaaactacaactcaaaacaaaaaactacaaagtaaacacattcaataaatgaacaaaaacattacgaatcttagcaagttgtttcgagggtgactttgtgaatagcgtttcgtt

SEQ ID NO: 16868 - DNA, 944 bp, DROSOPHILA
ccacgtcgcgtgcggatttgtttataattttcggcaatgcagtttcactttaaagtcgcggacgctgaaagggacagggataatgtggctgcgaccagcaatgctgccgccaatccgcacgcagccctgcagccgcaacagcccgttgccctggtggagcccaaggatgcacaacatgagatacgattgcagaatatcgtggccaccttctcggtgaactgtgaactggacctcaaggcaatcaactcgcgtacgaggaactcggagtactcgcccaagcgctttcgtggcgtcatcatgcgaatgcactcgcccaggtgcacagcgctaatctttcgaacgggcaaggtcatctgcacgggtgcacgaaacgagattgaggcggacattggatcgcgaaagttcgcacgcatcctgcagaagctgggattccccgtaaagttcatggaatacaagctgcagaatattgtggccaccgttgatctgcgcttccccatccgcctggagaacctcaaccacgtgcacgggcagtttagttcctacgaaccggagatgtttccaggcctaatctatcgcatggtcaagccgcgcatcgttctcctgatcttcgtcaacggaaaggttgtatttacgggcgccaagtcgcgcaaggacattatggactgcctggaggcgatatcacctattttactaagttttcgcaagacgtagttgtttctacacatccaaatgtttttgtttagcttagttatattccataactacaatatttttaatatatttaccttaacttttttagtataaaatgtgaaatgaaacaacttaattaataatttccatgggtaaattcatagaaattgtaagattttattttggccttactaagcaaattaatttttatttaaaaaaaactgttgttattttaaataaatttttatatatta

SEQ ID NO: 16869 - protein, 224 aa, DROSOPHILA
MQFHFKVADAERDRDNVAATSNAAANPHAALQPQQPVALVEPKDAQHEIRLQNIVATFSVNCELDLKAINSRTRNSEYSPKRFRGVIMRMHSPRCTALIFRTGKVICTGARNEIEADIGSRKFARILQKLGFPVKFMEYKLQNIVATVDLRFPIRLENLNHVHGQFSSYEPEMFPGLIYRMVKPRIVLLIFVNGKVVFTGAKSRKDIMDCLEAISPILLSFRKT

SEQ ID NO: 16870 - DNA, 3571 bp, DROSOPHILA
tccacgatactgctgcgtggtgccgggcactcgaagtgccggctcgggtgccatgccggcggcgcccatgttgaccatgtacgccgtggagctggccggcccagagttgcgcatatcttcgtagttggcgtacacgggcgaatcctggtgcggctccattgctgtttctctgctccgttctggcctacgttcgttgctctccgatcggctatggattcgaaactgtcgccagcggtcagcgccgcaaaagccaaactgaatgcccaaaagcgttctcacgtgataagagcgcactggttctctcagatacgaagtatcgcattggcattatcgctacgctgagctgccgagcggcttaaatgcgattcaacagtgagagaaaagaagcactgcactgaaacaccacgaaccaagtgtgccgccactgaaagaggcgatctctagtccgtacatcctccacagcaattgagcacatgccatataagagaatgtaatggaatggaatgtaaatgcatcggctcgtaaattttcgttcagtgtagtgtatctacgaccggggaaacaccaagagccgctctgtaagtcgagagccatgggtcaccacggatgattcactgcactgcgccgaaagaattgccaactggaggcgtacactttcagattattccgaccgacgatcaatgaaagccgagtaagctctatctggcccaagtgcgtttagcactttaatcaatcggttatctcagctggagcattgagacgcagttctgctttggggtcacgggtcattggctggagccacccgatggtgactcaattctgatctggcggtcacattagcactgaagagcttatctgccacactcgctgaagtggcatgcaaatctgagttatttagataagcgaagagcaaatatgtacatacatatatatatatcatatataaatgtaaattttgttgtttcgaaaaagggggaagaactgaaaaaaaaaatgtgttttctgaatcatttggtttatttaaatggttagcttttaccctggtttgtagttagctattgttattaattcttaagatacaaacaaataatattggttattttaaatataacgtctctacttaaaacgactgtgaatgaagaaggaaaagccttggaaaagcctcagttactattgcatactaaattcgacatattagaataaattctaaaaaaaaaaaatttatttttaagtccgaaccatgtttgaatctctccagaatctagggaattccatggcactttcattcgaattcattggtgactcattttccggattttccggacagttccgctttctgtcgctgctgccgccgttccactagagcaagaaacccacgatgtcgtcatcgtcatccgccgctcccgctgcagccgctccgcttcgctgttgcttctgctgacgctgcagctcgcagcgatgcagtgcctccagatatggttgcagcaccgacatcgagcgtcactggtggtgttggtgcgggtgtcgatggagtggcgtgccaggagccgcaggatgttgttgttgttggtgctgatgctgctgctgttgctgttgcagctgctgctggtgttgcagttgcagctgctgcgagtgtgcttgggtattcaggaagggcgtgagcagctccatgggcagcgggaagatgatggtcgaattcttctcggttgaaatgctgctcagtgtttgcaagtatctgcaactaagtagagaagaagatggaacgaatgaaaccatttgggccagttccaaatgtccgatggttggattcagatggaagaagatgactcacctgcagggcggatggactggccgagatgatctcggaagcctcgcgcagagccctcgacgacttcatctcgccctcggcggcaatgaccttggcccgcgcctccctcgctgcctccgcctcggcggccatcgcccgctggagggcagttggcaaggatacgtccttgctgcaagcggatcatggatagagtggatcatgtcatgatcacatcacgactttcggcagttggctactcacatctccacgcgctccaccttaacgccccagggatcggtggcctcgtccagggacatctgcatggtgtgcgagatggtctcgcgttcggtcagcagctcggacagattcctggtgccgagcacattgcgcagcgtggtggccgccaggagactcgtcgaatggctgtaattgtacacctggatgaccgccttgaggggatcgctgatgcggtagtagacaaccgcatctaccgtcacagtaaccgagtccttggagagcacctcctgcggcggcacgtcaaaggagacggtgcgcagatccaccggatagtagtcgtccacgcagggcagcacaaagaagaccccgggaccacgggctccgccgctgcgcagtcgccccatccggaagatcaccgctcgctcgtactcggagaccaccttgaagcagatgaacaccgagatgggaaaggttagcaccatgatcagcacggacaccaccgtggccaggatctccacgcagcccatgtcatcgttttcagctgcaagatttgaagatcatcgtatgcagtatgtaaagtggtatgattggttatgatgatgattagctggtatgattgtttttaaacttttgcttaggacaatcaattctcacaacattttgtaatattttggacttaatttaatatttattattaaagcttaaacaatagatatgcaattaatatcattggttatgaaaatggacaccatttttgcatttaactttagcttaaaaacatacgagtatattataactttctgaatacactccatcaaatgaaaactgatcccaatactaagtacgagtatggatgtatctttacaactgctggccaaacagataaaagatacatgtttcagttggatttggcaaatcgttgagattttccgtagattttccgtagggaaagcgagcagtgactgacccaataatgtgttttccaattacctattttatgatcctttcgaaatggccgctgtttgtttgtttacaatgaaaagtggcttcggtgatttcggtgatcgacctgattgtttcaattgcgccagcatattccacgattggtactgtatttttttttgtttttgtttttggggcaattaacttgtacaaattgcttttgatctagtacaaatgcccaggagttccataaatacccagcaacggggctgcctttgctttttatgctcgactaactatgtacaacatggctgggcatttttttgtttatggctatggaccagacattgaatatgatcactgatttccacatctccacaactggccatgtttgcgcccgtgcctggctgttgcccattccggcgctctgtttatctctcgagtttcgatccgtaccatatacatatatccgatctgatccgatccggtccgcaccgatcatctctatttattttcatatgtcggcgcacagtttatattgcatacttcataggtggtcgcgacgatcgatcgatgcatggatac

SEQ ID NO: 16871 - DNA, 1410 bp, DROSOPHILA
atgggctgcgtggagatcctggccacggtggtgtccgtgctgatcatggtgctaacctttcccatctcggtgttcatctgcttcaaggtggtctccgagtacgagcgagcggtgatcttccggatggggcgactgcgcagcggcggagcccgtggtcccggggtcttctttgtgctgccctgcgtggacgactactatccggtggatctgcgcaccgtctcctttgacgtgccgccgcaggaggtgctctccaaggactcggttactgtgacggtagatgcggttgtctactaccgcatcagcgatcccctcaaggcggtcatccaggtgtacaattacagccattcgacgagtctcctggcggccaccacgctgcgcaatgtgctcggcaccaggaatctgtccgagctgctgaccgaacgcgagaccatctcgcacaccatgcagatgtccctggacgaggccaccgatccctggggcgttaaggtggagcgcgtggagatcaaggacgtatccttgccaactgccctccagcgggcgatggccgccgaggcggaggcagcgagggaggcgcgggccaaggtcattgccgccgagggcgagatgaagtcgtcgagggctctgcgcgaggcttccgagatcatctcggccagtccatccgccctgcagttgcagatacttgcaaacactgagcagcatttcaaccgagaagaattcgaccatcatcttcccgctgcccatggagctgctcacgcccttcctgaatacccaagcacactcgcagcagctgcaactgcaacaccagcagcagctgcaacagcaacagcagcagcatcagcaccaacaacaacaacatcctgcggctcctggcacgccactccatcgacacccgcaccaacaccaccagtgacgctcgatgtcggtgctgcaaccatatctggaggcactgcatcgctgcgagctgcagcgtcagcagaagcaacagcgaagcggagcggctgcagcgggagcggcggatgacgatgacgacatcgtgggtttcttgctctagtggaacggcggcagcagcgacagaaagcggaactgtccggaaaatccggaaaatgagtcaccaatgaattcgaatgaaagtgccatggaattccctagattctggagagattcaaacatggttcggacttaaaaataaattttttttttttagaatttattctaatatgtcgaatttagtatgcaatagtaactgaggcttttccaaggcttttccttcttcattcacagtcgttttaagtagagacgttatatttaaaataaccaatattatttgtttgtatcttaagaattaataacaatagctaactacaaaccagggtaaaagctaaccatttaaataaaccaaatgattcagaa

SEQ ID NO: 16872 - protein, 339 aa, DROSOPHILA
MGCVEILATVVSVLIMVLTFPISVFICFKVVSEYERAVIFRMGRLRSGGARGPGVFFVLPCVDDYYPVDLRTVSFDVPPQEVLSKDSVTVTVDAVVYYRISDPLKAVIQVYNYSHSTSLLAATTLRNVLGTRNLSELLTERETISHTMQMSLDEATDPWGVKVERVEIKDVSLPTALQRAMAAEAEAAREARAKVIAAEGEMKSSRALREASEIISASPSALQLQILANTEQHFNREEFDHHLPAAHGAAHALPEYPSTLAAAATATPAAAATATAAASAPTTTTSCGSWHATPSTPAPTPPVTLDVGAATISGGTASLRAAASAEATAKRSGCSGSGG

SEQ ID NO: 16873 - DNA, 3213 bp, DROSOPHILA
agtcgacagctgcgaaaataagcgaaaataagaagcaagcgtcggatttgaagcggtggcagcacaaccttttagccccgattccatctgagtgtcatctggggccccctcggtgaaagtcaaccccttggtggtgcactgagaaagatcaggtagttctaagctgaaattcccatacaaattgcgtacccatttccaaaaatatttggttactgttcaaagcgactttaaatctttttaaaatgctaacgaagttcgttgtgtatttccaataaaatttatttttatattatatatattacttattattacttattatatattacttatatattatattgcaattatttttctacgtgtggccgctaacacttatcccttctccatggccgatcaacccgcaagttacaaatgtcaaatgctgcttttgtcaagaaggacctttcagtgcgtctttgtgcgggggggggggggggtaggaggaggaggaggggcgtcaaaccccctgatttcaaatggcaagtcccgatggaaggtgcgatgacgcaacagttctattattccggatgagaaccatcaagaaatatctacgcatttcttggtctgcgatttgaagcgcctgtcacattgactgacgttgatgacgcaccggagctgcaaaatttcgcatatgaaagatgaaagggatggaggtggtaaagggtttcccaatccattcatcacactccgtttttggccagctgcagaccgaacactggtcattaggtatgtcagtcacatcattggttattgttccactgcagcttgtaaatggtcaagccaaaaggggtggcacgcactctttggatctggaagctgcgcagatcctggtaaattgctcaccaagtcacactctggggattttgatttaaaaacagagagctctaagagaactccatgaacacagatacaagaatcgcaaatatttatcaaattaattttattagcttctgacatatgatcacttttcgtagcctttcttatccttttcagaatcctttaacagatccagatctcgaagttcttgcagcacagcctggacggacttaaagcggttgagtgtgaagaagtggaagccccaaacccccacatcggcatccaaaacattacgaatcgttcggacggtgaggctaacaaagaaccttcttatcagatcttggtcagacttcatatccttcatatgggcactatgcagctgatcgagttgctctcgcaaatcatctggcagatggacgccggttatttgctcgatcattgagtaggagcgaaaggattcatgcgacatcagtcccacaacaatgggtaccgagattccagctgctcgacagtccttcacaaattgcactatgacctcgggacggtagcataactgtgtgataatgcaatctgctccagcatcaatctattcaaatatataaaatgacactataaaatatgtaatttgtatatgtgcacaaataacaacgcacctttgcctttagaaactccatgttcttagctgaattttgtggtatgtcgcctaaactagtgtatccctctggatatccacccacacagactgatattgtttctggttcgagtgtaagagtgattttagagtatatttagtgataaataattaataattaacttaccacccctctgccgtatcgattgctccaccatggggtagctaatcgagaaatcctgatcctcgtgaactcgatcccctcgaacggccaaaagactgctaaagttgagggccaaaaactgatccagtcgctgcctactcattcgataggcggacacatggggcagcacgggaatgcgtgtggccaggtgttgggccatctgaaggctctccacctgacccactggctccacgtcccagtaccgctgactcagccaaacgaagctcacgaaggtgggcaggagcggcaggaagtgattaaagtccaggcaggttggccggccactcggatcgctggccatcacctcgatgccgtagaagaggcgatgttgggctgttcgctccgccacgagcgttcctatccgctgcttcgtcactacggattcattttgatcgggggcaaaggtcacgcagggaatgtaggaggcagcaccaggcgacgaaccaccggcgggcacttgaatcgcatgcattgatttggaaccacgctcgctcaacggcagatcaactaaaactgccggctgttgtcatttgccaggcgggttatcaccgatcatcaatctatctcaataaatacgagcaaagtttcgaacagatacgaaactactggattcgttgagcgaatctgggaatacccttttcttcagttcattagtgatttgacaatggttaattactaatatcataatttccaattcacttaatatgctatgctaagagttacaaatttattttgtttctttacgtataacaagtactaatggattttcttttaagaaattacactaatttttattgaaatagaaaagtttcagtattaatggtagatttggaatattccacataattgcctttagcaacaattgctactcctctatttgggaatgttaacttaaagagcttaacaaaagatagttgttaacaattgattgcaaaaccatttcaataatctcttattttcctcatacaccgactgtggacctttgggtgcgtgggaatcggtactggttcgcatccacaatccaaccctttttaacgtcccctgtgagaatggtctctaattcgtggcaatcggtcccaacgccatccaattaaagatttcatgcagctgcactggatgaaggatggagaccttcaaatgtttccgtcgttcgggatggaacctaaaattagtttggctcgtaaacatgtgtgcgggtgcagcacggaacctgttcttagttttactggaaggccgttctatatttaaatctgaaaagtgaaatcgttttaggggaacatcatttcgttttggttcataatactaagaggaaacacataaatgtgacagagaaaatatgctggaaataattttatatcgcgagtaaaacatatcacacatattttaaaattaccaagcgcaacgacaagtatttttggtaacagatggatgatatgtcggcagaagatcgaaaataataaaatacaaatgggaatggcttggggaatggctttaagttcgttag

SEQ ID NO: 16874 - DNA, 1082 bp, DROSOPHILA
atctgccgttgagcgagcgtggttccaaatcaatgcatgcgattcaagtgcccgccggtggttcgtcgcctggtgctgcctcctacattccctgcgtgacctttgcccccgatcaaaatgaatccgtagtgacgaagcagcggataggaacgctcgtggcggagcgaacagcccaacatcgcctcttctacggcatcgaggtgatggccagcgatccgagtggccggccaacctgcctggactttaatcacttcctgccgctcctgcccaccttcgtgagcttcgtttggctgagtcagcggtactgggacgtggagccagtgggtcaggtggagagccttcagatggcccaacacctggccacacgcattcccgtgctgccccatgtgtccgcctatcgaatgagtaggcagcgactggatcagtttttggccctcaactttagcagtcttttggccgttcgaggggatcgagttcacgaggatcaggatttctcgattagctaccccatggtggagcaatcgatacggcagaggggtgaaacaatatcagtctgtgtgggtggatatccagagggatacactagtttaggcgacataccacaaaattcagctaagaacatggagtttctaaaggcaaagattgatgctggagcagattgcattatcacacagttatgctaccgtcccgaggtcatagtgcaatttgtgaaggactgtcgagcagctggaatctcggtacccattgttgtgggactgatgtcgcatgaatcctttcgctcctactcaatgatcgagcaaataaccggcgtccatctgccagatgatttgcgagagcaactcgatcagctgcatagtgcccatatgaaggatatgaagtctgaccaagatctgataagaaggttctttgttagcctcaccgtccgaacgattcgtaatgttttggatgccgatgtgggggtttggggcttccacttcttcacactcaaccgctttaagtccgtccaggctgtgctgcaagaacttcgagatctggatctgttaaaggattctgaaaaggataagaaaggctacgaaaagtga

SEQ ID NO: 16875 - protein, 349 aa, DROSOPHILA
MHAIQVPAGGSSPGAASYIPCVTFAPDQNESVVTKQRIGTLVAERTAQHRLFYGIEVMASDPSGRPTCLDFNHFLPLLPTFVSFVWLSQRYWDVEPVGQVESLQMAQHLATRIPVLPHVSAYRMSRQRLDQFLALNFSSLLAVRGDRVHEDQDFSISYPMVEQSIRQRGETISVCVGGYPEGYTSLGDIPQNSAKNMEFLKAKIDAGADCIITQLCYRPEVIVQFVKDCRAAGISVPIVVGLMSHESFRSYSMIEQITGVHLPDDLREQLDQLHSAHMKDMKSDQDLIRRFFVSLTVRTIRNVLDADVGVWGFHFFTLNRFKSVQAVLQELRDLDLLKDSEKDKKGYEK

SEQ ID NO: 16876 - DNA, 3432 bp, DROSOPHILA
actctcattcgacgattcaaaaggaaacgtcgtcggccggtatggatacgtacccaagctatattatctggattatctatgtaatacgcatatctgccaaaacaactaacattggtctggtataatgtatatagtcacctcgccatactcaatacgtaccgaagctgtgcgagagtttaagcggctgcgaaagtgtggaacggaacttcaagtagagaacgctttggggttacaaatcaaatcaaatcatatcatatcaaatgaaatcaaatcagagcagtgatggagtgtgtcagagttaaatatggtggaggcttaccccaaagcgggacgacagcgatgcacaacacacgttgacttcgactgggtgaacgtgatcgttagctgagaagagtacatggtcgaatgtggtcaggtttggttgggtttcagtcaatgttaccaacttgtagctagctatacaacacacaaaatatcatatattaaacgtttctcctgctctgaatccttataaattagttatctttaacttgactgccgctgtgtcctaaccgaattacaatgaactgaactttaattgacaacactgccgattcgttgggatttctattttctgtttgggtttctgtctctacgtgccaagtacactggactggacggggactatataatttcaatcgcattatatcgagtatatcgtttctcttaaagtttttattgaggctggggtcttggactgcgttcggtttactttggggtagtaacaaaaatttgtcattagaggttggaacgcaagatcaaaaatagaaatcaattaaattattaaaaatgtacaaaggtagttgtatcttcatattggagcgtcgaaagtgtggctctaggttgctttattggttacgctaagaatattcggttcctgttgttttcagtagttcaatttgtggtggcattatagttcatgtgattaatgctacgtacgtgcgctgggcgggattctagcctagcggcggtagttgcgctcacgggagtaggatcgtttgcgctggccatttccgccgccaccaccatccctgaagtggttaaagttccgccgttcgcgtggcgagcgttccctggaccttgagcggcgtctgtcgtcacggtgatggccaccgcctcctccaccgccgcctctgtcaccaaagcgtcctctgtcgttgcgtccatgtcggtcccgatcccgcctgccatcgcgttcccgttcgcgatgatccctgccgtggttgtccctgtcatctcgccgtcctccacgatctggtgccctttcggctcgctccggaccatctgccgcttccttgggtcgctcactccccttctcctcaggaccgcgtccgttgttggggcgttcgcggtccccatcccggttgcgctgtcgttctctggagcgggaacgatgtacgcgagagcggcggtccagttcacgaccacctacaaagtagcgattgcgtccgcgtccctcgtcctcgcggtccgtcatcttacccgtccgcttgagctccgccttccgcggcgccgccgtcttctccagttcgatcagcttttctctgatagtgaggaatccgagatgtaacttaccaccaaagtggtccgccagacgtatgtcattgtcgtgaatcccgaggtaggcggagcatacctcgcagacgcgcaacttttgctgctggtaggtggatgcgggcatagatgtgcggtactcgtgctcggccttgatcttcttagcacgcagctcctcgatctccttcatcagctccatgctgtcctccacttcgccggcctcgcccagggcctcggccttggccaacttcttgccaatctcctcggcgaggccatggacagcattggccttctcagccacctcggcggtcagctcttcctgggtctctttcaacctttgcttggcggagtcggtgcgtcgatcgcagtcggcaataaaggcctgcaggtgttccatggcctcaatgtcgtagtagtagtcgcgcgtcttggcggcactttcgtaatctgcgcggaaagccaggtcatgcactttgggacactcaccgagatccatgcgcgtggacgccaggatgtcgtgcggacagcagtcgagcagaaaggacttgcagaccctggggtccgagaatttcagttggcgctcgtcgccattccgtgtggtacccataagctggtccagcattgctcgcatctgatcggtggccgacattttgttgctcggcgcgctcatatccttctggccaggagcgcgtgaaaaatgctgcagcggtggcagtgacagctatctcactggctttgtgaccaatagcgtgcgacgcgtgtggaaattctcaattttcactcacttttaatcacctaagaaaattctgtgcgtgcgtgcgtgaggatgttctaaaatggggtagtgctgaaaaacagtgctgtgaagcacgagtaggcgatatatcggtgaaaagtcacggtttctgggagtaacggcttttgttcagatccaagtatatagattattgttgattaaatgattaaataaaaaacaaaggcacatcatttaatttccaagaacaaatgtagttctctctaataacggtatatcgcgatcttaatataaaattttattaaacacgtggaataaagtttcagttttaaatagttattgttttaaatataatttagagtttcaaaaaccgttcatttaacaataaacaacaaacaatatcgatctaaaaactattgcttattcgctgcataccgctctaaacatcggtgatggcatcactaaaccacccctctcggcgttgctcaacactaggcagcaaaacgttttctttacggcaatattttttgttgtttcttcgttgtttcggcgaaattttattttaaaattaattattttgcacttgtttgctggccgcaacgatgtccgatgacgacgatatacagtacattaagcggcagcgaacgctgcactatggatcgctcgaggaatcggaacgcaagcggcaaaatgccgcggcgtctggggcagcagcaacaacaacatcgggaacgacggcatcgtctggggcaggaacaacaacaactggaacaggcgggcaactggaagacatcgattccgatgaggattacgaggagtccacgaaaaagacaagcaacgccaagcaggccggagcaccaccacccacagccgctactctggccaacaaaattgacgatgactacttcgatctagagatggaaatggagcgcgacaaggtggcgctccttgaggaatttgagcggaaaaagcgagcacgacagataaatgtgtccacagacgacacggagatcaagagcaatctgcgccagctaaacgaacccatttgctattttggagaaggaccggcggagcgaagaagacgt

SEQ ID NO: 16877 - DNA, 1432 bp, DROSOPHILA
cattttagaacatcctcacgcacgcacgcacagaattttcttaggtgattaaaagtgagtgaaaattgagaatttccacacgcgtcgcacgctattggtcacaaagccagtgagatagctgtcactgccaccgctgcagcatttttcacgcgctcctggccagaaggatatgagcgcgccgagcaacaaaatgtcggccaccgatcagatgcgagcaatgctggaccagcttatgggtaccacacggaatggcgacgagcgccaactgaaattctcggaccccagggtctgcaagtcctttctgctcgactgctgtccgcacgacatcctggcgtccacgcgcatggatctcggtgagtgtcccaaagtgcatgacctggctttccgcgcagattacgaaagtgccgccaagacgcgcgactactactacgacattgaggccatggaacacctgcaggcctttattgccgactgcgatcgacgcaccgactccgccaagcaaaggttgaaagagacccaggaagagctgaccgccgaggtggctgagaaggccaatgctgtccatggcctcgccgaggagattggcaagaagttggccaaggccgaggccctgggcgaggccggcgaagtggaggacagcatggagctgatgaaggagatcgaggagctgcgtgctaagaagatcaaggccgagcacgagtaccgcacatctatgcccgcatccacctaccagcagcaaaagttgcgcgtctgcgaggtatgctccgcctacctcgggattcacgacaatgacatacgtctggcggaccactttggtggtaagttacatctcggattcctcactatcagagaaaagctgatcgaactggagaagacggcggcgccgcggaaggcggagctcaagcggacgggtaagatgacggaccgcgaggacgagggacgcggacgcaatcgctactttgtaggtggtcgtgaactggaccgccgctctcgcgtacatcgttcccgctccagagaacgacagcgcaaccgggatggggaccgcgaacgccccaacaacggacgcggtcctgaggagaaggggagtgagcgacccaaggaagcggcagatggtccggagcgagccgaaagggcaccagatcgtggaggacggcgagatgacagggacaaccacggcagggatcatcgcgaacgggaacgcgatggcaggcgggatcgggaccgacatggacgcaacgacagaggacgctttggtgacagaggcggcggtggaggaggcggtggccatcaccgtgacgacagacgccgctcaaggtccagggaacgctcgccacgcgaacggcggaactttaaccacttcagggatggtggtggcggcggaaatggccagcgcaaacgatcctactcccgtgagcgcaactaccgccgctag

SEQ ID NO: 16878 - protein, 420 aa, DROSOPHILA
MSAPSNKMSATDQMRAMLDQLMGTTRNGDERQLKFSDPRVCKSFLLDCCPHDILASTRMDLGECPKVHDLAFRADYESAAKTRDYYYDIEAMEHLQAFIADCDRRTDSAKQRLKETQEELTAEVAEKANAVHGLAEEIGKKLAKAEALGEAGEVEDSMELMKEIEELRAKKIKAEHEYRTSMPASTYQQQKLRVCEVCSAYLGIHDNDIRLADHFGGKLHLGFLTIREKLIELEKTAAPRKAELKRTGKMTDREDEGRGRNRYFVGGRELDRRSRVHRSRSRERQRNRDGDRERPNNGRGPEEKGSERPKEAADGPERAERAPDRGGRRDDRDNHGRDHRERERDGRRDRDRHGRNDRGRFGDRGGGGGGGGHHRDDRRRSRSRERSPRERRNFNHFRDGGGGGNGQRKRSYSRERNYRR

SEQ ID NO: 16879 - DNA, 3629 bp, DROSOPHILA
tagagcgatcgctcaggtgagatgcgcttggagagccaagcattgtaacccgtttcccgctgacttttggcgatggcctccagctgctcctcagtccaattaccccttgccgggcgacccaaagctcccagatccggtatgacctccgactcgaagaccgcttgcagatctcttatgtcacgctccaagcgagaagttgtcgaagttgcactttcatcacgctccccctccaatttcagggtatatagatagtagataatactgccgatggccattagcagtagcagcggcaacaccttcttcttgtgccgccaaatgtccaggcacatcgtatcacagaaacaaacacagccctccggaacgaatagtaaactttcggcttaaaccgcacagcgttttggccaagactgaagctggccaactgagagcatgacgagagcggtctgggtcttccacaccagtaatcccatcttatacgctgagaaagtttttgattcgatggctcaatgagcatatcaggggcatattgaaatttctgaaggccattggagtgggttttattcgttttaccataaaagctagcgacaaatgactttaataaatcctgccttaagacaataaaatgtactgatgagtagataccaaacgcctttatgtatacacagttagttatgttagcccaaacgaatatgaaaagggttggagatccgatagtctttacttctcctaatactatatcaaatgaatttgttccatccaaatcgtattaacgaaggcctttaagagtttttgtaatacttatttcagtcttattttaatcacaatgaaatcattactatttggtacaccgtgtagctgtgcaatcttcattttagtatattgtataattactctatttatctggtttttgtatacagataacttgtcaaacgccatagttgactttgaatacttttcaataaaaaatcttggcgaacttggaaaagaagcacatttacaaatgacagaaactgatttagttgatgctcaactacagaatgagaaatatcaatacaatgcctggctatcagaaagaatcccgctgaaaagaactctagaagactatagggatccacagtaagtacacttagcaaaccaatataatttcatgcactaaatccttgtttaaagatgtctcaagatcaactacagttcagaaaaaacggttactgttagcatagttatagccatccaacaggagcatcctcacactctgctgagaggcatctatagcgttattacgcaaacatcaccctatttactcaaagaaatagtactggttcatgatgggcaccccgatcttgatcttatccggcacattcatcataaacttcccatagttattcagttggaaatggaatcttcaaagggaattattcatgcacgtttgactggagctggtgtagcgactggagatattctagtctttctcaatggccacatggaggtcacaaggggttggcttcctcctctacttgagcccatactgttgaacaaccagactgtcactgagcccattgtggatgccatatctagagaatcgtttgcctaccgaaagctggtggaacctgagcaattggctttcgattggcagttggatcacatttttctgcccctggatcagcactcgtggaatagccttcccaagccatacccatcctctcaactggagggtcgtgtttttgccattgatcgcaagtggttctggcatcttggtggatgggatgaaggactccgggactacggaggcgatgctctagaactcagcctcaaggtgtggcagtgtggtggtctgatccttgctgttccctgttcacgagtaggaataatctataaacgcgatgagcttgaggcccagatggcaccaaacagaaatcccagcttacaagtccaaaaggttggttaatagtacaaaattataaccgaaactttctcacattattctattcttttccgcgttttaattactttgcagaactttaagcgtgttgtagatgtctggttggacgagtataagctgcacttttatcgatacaatcctaagttgagaaaccttactgcagaatcgctggacaagccgcgggatttacgacgtcgcctgaactgcaaatccttcgaatggtatagaagccaagtggcgccgcaaatcaggaaccactttcttcatgccggtcttaccaactatccgattggtaaaataatgccctttgtggcgccacatttttgcttatcgatcaagggaggatttcctgtcataaggaaatgccactcaaccaatttcgaagactggacactgacgtctcgttgtcaactgaaacatggtaacatgtgcctggatgtggactataaaaataatgtgcgggctacgaaatgcactaaaaaattgtcgaaaaatccatggcactataattaccagcacagctcatttgtaagcaacggaaacaaatgtctacaaattgatgtcaataaagttggactcattttaagtgcttgcgattccgatgtgacggaacaacgatggatgttcactaaagtgcaggacttcaaactagaccacatgagggatatttgcttaagtgtcaaccactaaacattaagattttagtaacactaattttgatttaacaagagcaatttacgtttattcctttaaagcttaaactaatgtttaataattatataccaattccgaaaaccttattaatagatcatgaacttcagatactttagagcctacggagcttacagctatcatatggttcaattttatagttcattgatataaaatctataccaatatatttgctgattgcattacacttagattaatattatcaagaatccacctttgttttccgttcgcggcgtcgcaaatagccagaaaaatattaagttcatctgtaaattccagacactttgtattgctcattagttgattgcttaccgaatcataatgccaactttgccgacctcctaggctgtggcaaaagctatatcccaacctcaaattgggacgcacttctgcacaaatattaccagccacgcgtagatctttgacataggttagtgtccagttttgaagagtattatttgtactgcaacgttctagaaataaattctgactttttgcattgatagtcaaacactttttgggaaattcaagggttttaacatgtcctgaggcataatccgtacgatttagtgccgcaacgtggttgagacccggcgtaatatcatttataaactctttaaacgactggcattcattttgcttatataattttcgcggttcattgagatccccctcggagatattcaggagatgtggctggtatttataaatggccgattttagatctcctgtccacacttctataatgcgtttcaggttctggataaattagatataaaaaacaacattgatttcatttttgtttcctttgtacatacccttgatttttgttcacccattttatggagatccccatatcgttttaggtagtcctcatccttgggctgcaagtgcccaactcgggagcagggaacttgaactattcgaccaccagtacaccatactttgaagctcagct

SEQ ID NO: 16880 - DNA, 1497 bp, DROSOPHILA
atgacagaaactgatttagttgatgctcaactacagaatgagaaatatcaatacaatgcctggctatcagaaagaatcccgctgaaaagaactctagaagactatagggatccacaatgtctcaagatcaactacagttcagaaaaaacggttactgttagcatagttatagccatccaacaggagcatcctcacactctgctgagaggcatctatagcgttattacgcaaacatcaccctatttactcaaagaaatagtactggttcatgatgggcaccccgatcttgatcttatccggcacattcatcataaacttcccatagttattcagttggaaatggaatcttcaaagggaattattcatgcacgtttgactggagctggtgtagcgactggagatattctagtctttctcaatggccacatggaggtcacaaggggttggcttcctcctctacttgagcccatactgttgaacaaccagactgtcactgagcccattgtggatgccatatctagagaatcgtttgcctaccgaaagctggtggaacctgagcaattggctttcgattggcagttggatcacatttttctgcccctggatcagcactcgtggaatagccttcccaagccatacccatcctctcaactggagggtcgtgtttttgccattgatcgcaagtggttctggcatcttggtggatgggatgaaggactccgggactacggaggcgatgctctagaactcagcctcaaggtgtggcagtgtggtggtctgatccttgctgttccctgttcacgagtaggaataatctataaacgcgatgagcttgaggcccagatggcaccaaacagaaatcccagcttacaagtccaaaagaactttaagcgtgttgtagatgtctggttggacgagtataagctgcacttttatcgatacaatcctaagttgagaaaccttactgcagaatcgctggacaagccgcgggatttacgacgtcgcctgaactgcaaatccttcgaatggtatagaagccaagtggcgccgcaaatcaggaaccactttcttcatgccggtcttaccaactatccgattggtaaaataatgccctttgtggcgccacatttttgcttatcgatcaagggaggatttcctgtcataaggaaatgccactcaaccaatttcgaagactggacactgacgtctcgttgtcaactgaaacatggtaacatgtgcctggatgtggactataaaaataatgtgcgggctacgaaatgcactaaaaaattgtcgaaaaatccatggcactataattaccagcacagctcatttgtaagcaacggaaacaaatgtctacaaattgatgtcaataaagttggactcattttaagtgcttgcgattccgatgtgacggaacaacgatggatgttcactaaagtgcaggacttcaaactagaccacatgagggatatttgcttaagtgtcaaccactaa

SEQ ID NO: 16881 - protein, 498 aa, DROSOPHILA
MTETDLVDAQLQNEKYQYNAWLSERIPLKRTLEDYRDPQCLKINYSSEKTVTVSIVIAIQQEHPHTLLRGIYSVITQTSPYLLKEIVLVHDGHPDLDLIRHIHHKLPIVIQLEMESSKGIIHARLTGAGVATGDILVFLNGHMEVTRGWLPPLLEPILLNNQTVTEPIVDAISRESFAYRKLVEPEQLAFDWQLDHIFLPLDQHSWNSLPKPYPSSQLEGRVFAIDRKWFWHLGGWDEGLRDYGGDALELSLKVWQCGGLILAVPCSRVGIIYKRDELEAQMAPNRNPSLQVQKNFKRVVDVWLDEYKLHFYRYNPKLRNLTAESLDKPRDLRRRLNCKSFEWYRSQVAPQIRNHFLHAGLTNYPIGKIMPFVAPHFCLSIKGGFPVIRKCHSTNFEDWTLTSRCQLKHGNMCLDVDYKNNVRATKCTKKLSKNPWHYNYQHSSFVSNGNKCLQIDVNKVGLILSACDSDVTEQRWMFTKVQDFKLDHMRDICLSVNH

SEQ ID NO: 16882 - DNA, 5775 bp, DROSOPHILA
aatgagatttatgtgttgtatttattgattggctgttttaatgggaattctttaaattgcatgcattcatgacttctaattaagtggaataaattcttttttcagtaaagtaaattaccataaatacacttcaaattataaattcccagatcttcacaatcaggtgtgcctacaatcaatattttccgtattttcgtaagttaatgctgcagctttagataaaactacgtctgaccatgaaaaacctgaacaaggccgtaagtttcagaggctagataaatggactttaaactgatttccaggcgaccaacaacaaacggcacaaaccgacaaggcgcagcataagttctggtttgattcggtggattcgggttgatttatattccctggtttgcatttgcgtgttttgcaattacaaatttgcataaatacaatacggtgatttatctgcatttgcttgaaacttaatataattaatatttctgcaatgcgatttgtgaaattcgattggcgcgtgggttgtgtttattaccatttaaatcatacgacgggtgtgttttgtggtgtattttgcgtgtgggaagcacgagaccatttatagttaatacagcagcggttattataatatcatccgaaagcgaaaatgaaattgtatgattcatatcgctttaaatgacatgatttatgaaatttaacatttattatttattattatatcttaaatttaaagagctactatatttgcataaattataatttcaatcaataattgcgcaattctttcaaacgcgtaaaccgttaccaagcaatccagagagaaagcttatctccaagctttttcgttgtttgctgctcagcggcaacttccgtatctaacgctctatttcgctaaaaaacctcccaacactcatttcactctcttctcgaactcggaactcgatatgccatgccacttacaacactgcttactgcgcagggctggcataataaatcagctatcagctggagtaattggttattttttttgttgtgcgctggctgaaagaaaaaatcgacgagccagtgttttgctggtgatttaaactccgaaacaccagcaaatagtcggttacttgcggcggaacctacggtaaagatggttcaagtgggcaaacggatttgcaacctgcttttgctggccactgcgatgtcgtcagcatatgccgacgtcacaacgcaaaacgctctgttggttggaagtaagaaacacaaggagaccagccccgataattcagttggcggttctatatcgcccaatttggtgtgccacaagatgctgaggcatgtgttcgaaaacgccactccgcgggatgagcagcaggcgggtgtgtttgaggagtacaagccaccgccggatgcagtggagccactggaggaggaggcctatctttggaactgcctacaggcttgctgcgaaaagccccggaatggcagcagtgcctgcaatgtggtcctcgtttttaaggccaaatgctaccatatccgatgccagagcaacgaggcctgcttgcccaagctcagagttcggatgcccaacgaaaaggttcagatggtactggtcaatccactgggcgatgccacatggccacagctcctcaaggcggaggcagccaaacagaatgctgagattctgccatacgatgaagcggcacttaatttctggaagcagcccagaaggttgagctacctggctcgcaatcaggtaatagcatattggtttctctctatattcctgactatttattaatcttataacatttccttgtaggaaacccccgtttatgaggacgaagatttcccattggccgacaagcgaatgaatcaaatgatcttccaacccgacgaaaacgatgttctggccaacgaagagctcggctactacgattcgaatgccaagtttaccacctgcgatatggagacaccttgtccaccaccgcaacaatgtgtaccactacagccaaatgccgtgcgtggagtgtgcacctgtccagaaggctttgtgtggaataaacaaaggaagtgcgtaatggcagcggttccctatagctcatatctaaccagcaatgaggcgggacagcaagaagcggctgctagtgagaactcaccggaggtatcaacgccgcctttgaaggctgagcagaacaaggacattgtagtctccgtaatgtccaaggaagttcgtttgccggaacaggaggtgaccctagcggcgtttacggttcccgatgagcaaaccagcgataccaagtacaaatatctttggacacttatatcgcaacccaagggtcctatgaatggcactatttcggatcagagcaagtcgaaggtaaaactatcgaatctttcggagggactgtatacttttaaggtcactgtaactggtgacaatggaacctttggcgaggcaacagccaatgttacagtgcttcccgagaatcgaatcaatcagccaccacaagtcatcatctcgcccagggagcagatcatccgtcagcccaccaccaatgccatacttgatggcagcaccagtacggatgatgataagatcaccaattggcactgggaggtgatttcgggaccgattggttaccaaccagttttgccagaggttaacaccctccagttggatctcacatcgccggggaactacacattcaagctaaccgtaaccgattcaaataacgtgaccaattcaaccactgccacgatagcagttcttaaggagaccgattatgctccggtggcaaatgccggcgatgccgtgatcttgtatttgcccaacaataatgtcactctgaatggcacagccagttcggatgatcacgagatcgttgcttgggagtggaccaaggatgctagcgacgaggccaaggctgtggatatgcagaatacaagaacaccctatgttcagctgtccaatttggaggagggcatgtacacttttgttctaaaagtaaccgatggcagtgggcaatcgagtacagctaaggtccatgtgtttgtgaagcctcccacgaattctccaccagttgctgaggcaggaagtaatacggtaggtttcagttaaaagattatattttattcgttttaatatgatctgtgttacagactactagcttgcccattaattgggttcttttgaatggctccgattcgaaggacgacattggcatcaagagttatttgtggaagcagctgagcgggcccaataatgcagtcattttgaagtccaactcatcagtaagtgcatatatatatatcgttatgttggacctcatgcaactccatttaaccctgcagattgccaatgccacctctctgactctgggactctatgagttcgaattaaccgtagctgatgaaaataataacaccgctacggacaccacgtgggtgaagatagttcaaggtaatcatatccataatcttcagtagctcataggtgctaattacattacataccgccactagaacggaacgcagctccaatagccaacgccggtggtgatcacaccgtcaccctgccggccaccgccatctatttcaatggctctaaatcctgggatgacctggctgtggtcaagtatctctggacacgcgacgagcacagtttggcagcgggcgtcattgtggcagataccgacaaggagcccgtaatgattgtgagttaagatttaactctaatcccactgcgacttatattatttatacaattttccagttgaccaatttagtacaaggccgctatgtattcacactgactgtgagcgatgatcagggtttgaccagttcagatactgtcagcgttaatgtccgtcgcgatcccaagctattgaatttggttcaaatgaccctgcccatgggcatctctgtgctcgtacaatccgaactggattcggtggtgcaaaaactgcagttgttgctgggagatgagaataagatccaggtcagggagctaaaatatgacttgcatacggatgctactgtcctggtcttctacgtaaacgatggacagggtaaggcattggatggtttgcaagtggagcggcagttgagaacccaactgcagaaggatgcatctatactgggcgcatttgcagtggatattcgcacctctgtttgccagagtgattgctccggtcatgggtcgtgtaatcccattaccagagcttgcatatgcgaggcgttctggatgccatcggctggctacttctttaataaccaggaggccaattgcggttagtttaataatgttataccccgcattaggtcgctaatttctttgtacatttttcagactggtccatattatacgtgtttgttggtgtgattgtgggctgcctcttgctatctggagtattttggggcatagcctgtgcctgcagacaatcgaaaaagccgcgtcttcgtcagaaagtgcaaaaatattcattgattggtaataaggatgaagaagcagccaattgtaagtaccaatgccatcttcttctcgtagcgaaggatttaattatctactattattttcacttgcagattctcgaaacacatcgctgacggaatcagagacggattccgatgtcctttttgagacccgcaccaagtccaatggtctgggcaagcacaagtcgcacaattctcacagtcatggacatggaagtagtggaggcagtggatcttccggacgggatggtcataaatacggaacacaaaaactgggccgcaaaatcaaggcataaaagtatatgcatcagaaggataaggagatcaaatatgtgtgtgtgttagtcgatctactataccgtgtgtgtgatatctatttgtatttctataatgtactcggatcttttgtactttccgcaaaactcgtctgaagtcaagttgtctataagttcctttacgtgcaattattttaagttaagagtcattctttatattattttaagctgctgctgtgcaacaagtattatatttaatgtttatttctactgcgatactttttatgtgtgtatatagacatagctgttcacaatcaatgtaacaaacgacatgtaactgcttaaaagtgcattattacccacattaaacgaaactaatagatgaaatatgcatttctttgtagctgacggggaaatccaatgtcgttagtttaatttacgagcgctcaatcatggcaaatgtcattcaattcatttgatcaatcattaatcacatttggccaactgcgttggaatatatttgtatgcagaggacatatcagcaaatcgaatgctgtatgcattcacaaacatttctctttggcggctacagtttgacatgccactgatgatatttacacgacttgttgttgacttatcactgctgtttttctggcagcttctttactttgatcagattttaattcaaacattgacgcatttcaagcccacacacaaaaagacaacaccaaactaggctccaatgcggatttcttgccaatttttacacaacaaataaattgttacccttcaacaaaaatttgtgtatatattttatgtttaattttctatcttatcggttttaatggcttcaaatggtatttacagattgataagtttgatgagtttaaaaaatcattttgacttgttaacagctagactttttgtctgtcacggggatcattcaatttgttaatattttgtgtatagtggtaattcgtttaagtgtagctgtctgttacgatttttggcgaaataactt

SEQ ID NO: 16883 - DNA, 3345 bp, DROSOPHILA
agctggagtaattggttattttttttgttgtgcgctggctgaaagaaaaaatcgacgagccagtgttttgctggtgatttaaactccgaaacaccagcaaatagtcggttacttgcggcggaacctacggtaaagatggttcaagtgggcaaacggatttgcaacctgcttttgctggccactgcgatgtcgtcagcatatgccgacgtcacaacgcaaaacgctctgttggttggaagtaagaaacacaaggagaccagccccgataattcagttggcggttctatatcgcccaatttggtgtgccacaagatgctgaggcatgtgttcgaaaacgccactccgcgggatgagcagcaggcgggtgtgtttgaggagtacaagccaccgccggatgcagtggagccactggaggaggaggcctatctttggaactgcctacaggcttgctgcgaaaagccccggaatggcagcagtgcctgcaatgtggtcctcgtttttaaggccaaatgctaccatatccgatgccagagcaacgaggcctgcttgcccaagctcagagttcggatgcccaacgaaaaggttcagatggtactggtcaatccactgggcgatgccacatggccacagctcctcaaggcggaggcagccaaacagaatgctgagattctgccatacgatgaagcggcacttaatttctggaagcagcccagaaggttgagctacctggctcgcaatcaggaaacccccgtttatgaggacgaagatttcccattggccgacaagcgaatgaatcaaatgatcttccaacccgacgaaaacgatgttctggccaacgaagagctcggctactacgattcgaatgccaagtttaccacctgcgatatggagacaccttgtccaccaccgcaacaatgtgtaccactacagccaaatgccgtgcgtggagtgtgcacctgtccagaaggctttgtgtggaataaacaaaggaagtgcgtaatggcagcggttccctatagctcatatctaaccagcaatgaggcgggacagcaagaagcggctgctagtgagaactcaccggaggtatcaacgccgcctttgaaggctgagcagaacaaggacattgtagtctccgtaatgtccaaggaagttcgtttgccggaacaggaggtgaccctagcggcgtttacggttcccgatgagcaaaccagcgataccaagtacaaatatctttggacacttatatcgcaacccaagggtcctatgaatggcactatttcggatcagagcaagtcgaaggtaaaactatcgaatctttcggagggactgtatacttttaaggtcactgtaactggtgacaatggaacctttggcgaggcaacagccaatgttacagtgcttcccgagaatcgaatcaatcagccaccacaagtcatcatctcgcccagggagcagatcatccgtcagcccaccaccaatgccatacttgatggcagcaccagtacggatgatgataagatcaccaattggcactgggaggtgatttcgggaccgattggttaccaaccagttttgccagaggttaacaccctccagttggatctcacatcgccggggaactacacattcaagctaaccgtaaccgattcaaataacgtgaccaattcaaccactgccacgatagcagttcttaaggagaccgattatgctccggtggcaaatgccggcgatgccgtgatcttgtatttgcccaacaataatgtcactctgaatggcacagccagttcggatgatcacgagatcgttgcttgggagtggaccaaggatgctagcgacgaggccaaggctgtggatatgcagaatacaagaacaccctatgttcagctgtccaatttggaggagggcatgtacacttttgttctaaaagtaaccgatggcagtgggcaatcgagtacagctaaggtccatgtgtttgtgaagcctcccacgaattctccaccagttgctgaggcaggaagtaatacgactactagcttgcccattaattgggttcttttgaatggctccgattcgaaggacgacattggcatcaagagttatttgtggaagcagctgagcgggcccaataatgcagtcattttgaagtccaactcatcaattgccaatgccacctctctgactctgggactctatgagttcgaattaaccgtagctgatgaaaataataacaccgctacggacaccacgtgggtgaagatagttcaagaacggaacgcagctccaatagccaacgccggtggtgatcacaccgtcaccctgccggccaccgccatctatttcaatggctctaaatcctgggatgacctggctgtggtcaagtatctctggacacgcgacgagcacagtttggcagcgggcgtcattgtggcagataccgacaaggagcccgtaatgattttgaccaatttagtacaaggccgctatgtattcacactgactgtgagcgatgatcagggtttgaccagttcagatactgtcagcgttaatgtccgtcgcgatcccaagctattgaatttggttcaaatgaccctgcccatgggcatctctgtgctcgtacaatccgaactggattcggtggtgcaaaaactgcagttgttgctgggagatgagaataagatccaggtcagggagctaaaatatgacttgcatacggatgctactgtcctggtcttctacgtaaacgatggacagggtaaggcattggatggtttgcaagtggagcggcagttgagaacccaactgcagaaggatgcatctatactgggcgcatttgcagtggatattcgcacctctgtttgccagagtgattgctccggtcatgggtcgtgtaatcccattaccagagcttgcatatgcgaggcgttctggatgccatcggctggctacttctttaataaccaggaggccaattgcgactggtccatattatacgtgtttgttggtgtgattgtgggctgcctcttgctatctggagtattttggggcatagcctgtgcctgcagacaatcgaaaaagccgcgtcttcgtcagaaagtgcaaaaatattcattgattggtaataaggatgaagaagcagccaattattctcgaaacacatcgctgacggaatcagagacggattccgatgtcctttttgagacccgcaccaagtccaatggtctgggcaagcacaagtcgcacaattctcacagtcatggacatggaagtagtggaggcagtggatcttccggacgggatggtcataaatacggaacacaaaaactgggccgcaaaatcaaggcataa

SEQ ID NO: 16884 - protein, 1069 aa, DROSOPHILA
MVQVGKRICNLLLLATAMSSAYADVTTQNALLVGSKKHKETSPDNSVGGSISPNLVCHKMLRHVFENATPRDEQQAGVFEEYKPPPDAVEPLEEEAYLWNCLQACCEKPRNGSSACNVVLVFKAKCYHIRCQSNEACLPKLRVRMPNEKVQMVLVNPLGDATWPQLLKAEAAKQNAEILPYDEAALNFWKQPRRLSYLARNQETPVYEDEDFPLADKRMNQMIFQPDENDVLANEELGYYDSNAKFTTCDMETPCPPPQQCVPLQPNAVRGVCTCPEGFVWNKQRKCVMAAVPYSSYLTSNEAGQQEAAASENSPEVSTPPLKAEQNKDIVVSVMSKEVRLPEQEVTLAAFTVPDEQTSDTKYKYLWTLISQPKGPMNGTISDQSKSKVKLSNLSEGLYTFKVTVTGDNGTFGEATANVTVLPENRINQPPQVIISPREQIIRQPTTNAILDGSTSTDDDKITNWHWEVISGPIGYQPVLPEVNTLQLDLTSPGNYTFKLTVTDSNNVTNSTTATIAVLKETDYAPVANAGDAVILYLPNNNVTLNGTASSDDHEIVAWEWTKDASDEAKAVDMQNTRTPYVQLSNLEEGMYTFVLKVTDGSGQSSTAKVHVFVKPPTNSPPVAEAGSNTTTSLPINWVLLNGSDSKDDIGIKSYLWKQLSGPNNAVILKSNSSIANATSLTLGLYEFELTVADENNNTATDTTWVKIVQERNAAPIANAGGDHTVTLPATAIYFNGSKSWDDLAVVKYLWTRDEHSLAAGVIVADTDKEPVMILTNLVQGRYVFTLTVSDDQGLTSSDTVSVNVRRDPKLLNLVQMTLPMGISVLVQSELDSVVQKLQLLLGDENKIQVRELKYDLHTDATVLVFYVNDGQGKALDGLQVERQLRTQLQKDASILGAFAVDIRTSVCQSDCSGHGSCNPITRACICEAFWMPSAGYFFNNQEANCDWSILYVFVGVIVGCLLLSGVFWGIACACRQSKKPRLRQKVQKYSLIGNKDEEAANYSRNTSLTESETDSDVLFETRTKSNGLGKHKSHNSHSHGHGSSGGSGSSGRDGHKYGTQKLGRKIKA

SEQ ID NO: 16885 - DNA, 4054 bp, DROSOPHILA
tgtgtttgtgccttaacaattcgttatttcgaaacattctttacaaaataatttgaattacttacaaacaataaaaaggataattttattttgaagcaaacttattgttacaagacaaaaacgaaaaaaaaaataaagtaatttaacttaaatactgtgagttgattcaagatcttttaacattttcttcatggatggataatgataatggataaagtcaatttggagatctgctccagttatattataaatcctcgggcttcggaggttttttcagtcctgtagcttcaggctcttaatgtagtcaatgagtagcttggggtgcacatgtttgatctcctgaacaggcacggcttccccccacttggatcccttccaggtgacaatgaagtagaccgtgtcaccaagcatatagctgtacataacattctcaattgctttgccgcggaccaggagcgcatccgtaggcggcacgttcaacggttgggactcattggaattgccgccatcgagattccctgacacgctgccaccgttggttgcatccagttctgcctgttgtaccaacaactcgacgagcagccgagccagctctgcccgagccgaattgtgaactcccatgtgctttggaggcggcgtcgaaccggcctccttggattcatcctttgtcggctcttcctgcacttcctcctgctgatcgttctccttctgctgatcgttctccttctgctgatcgttctccttctgcttttcctcctccgcggggaaaccacctgtgttcttgttgttggggctgttttctttgtccgccatcgtttagcaataaagttctcttgcaaaagtaaaccaaatgaattcacgtgcaatcgttaaatgaaaaatggcggcaagtttccgattgctgaagctgccagctagtgcgaattgcatttattaaaaaaaaaaaaaaaatgaataagacattaatattttcaaactctggcaacgccctagattcaaatcataggttggttttcggccaagcgtccagtgcgtctaaaactatgttatctgacttttctggcgattgcttaagttccggtggcgggcccatcaagtgggcatatttggccagatacggagtaagcagctccatgggcagaggaaagataatggtggagttcttctcggcggagatgctgctcagggtttgcaagtagcgcagctgtgatgacagaaaaattcgaatggctggtaatccgtgctcaacgattgatttcagcttttactaggacaacacccacctgcaaggccgatggactggcggaaatgacatcggatgcctccttgagcgctgtggcggacttcttctcaccctcggcggcgatcaccttggcacgagcatcacgagctgcctccgcttcggcggccatggcacgctgcatggaaacgggcagggagacatccttgctgtcagcgggtgaagtgcatacaacgtacagatgttaagaaatactgatctgatctgatggatgtcaaatgcctactaaatggctacttacatctcaacgcgctccaccatgacgccccacggctcggtggcctcgtccaacgtggcctgcatattgtgggccagggtttcgcgctcggttagcagttcggacaggttgcgagtgccgacgatatttcggagcgtggtggccgccaggaggcgagtggacatgctgtagtcctcgacctggatgaccgcataaaggggatcactgatgcgatagtagacaacggcgtccacagtgaccgtcacggaatccttcgtcagcatctcctgctgcggcacattgaaggtaaccgtgcgcaggtccaccttgcggtactcatcgatgcacggcaggatgaagaacatgccgggaccacgagctccgccgctcagtctgcccagccggaagatgatcgcccgctcgtactccgccaccaccttgaagcatatgaagatggcgatgggcgatgtgatgatgaagatcagcacggagaacagggtgaccacccattccatgcagcccttgggctcgttctccgctgcaatgggatgttaggaatatgaatatgaaatattcatctacaaaatggccatatttcaggcatatgtgtacaataattgtgccgcaagagaaacgtagataagtccacttcaattcgatggccaagatgaagtaccttctttgtccggattccgaagagaccaacttattattaagtaaaacaggactatgatggactatgtaacaacttgaaaaagagaaagctgtgaaaagcaatagccatcacaatcaaaaaaaagaaaacacggataaacaccaatcagcccgcttatcttggagtccaataaaaattcctacgattaaaaatatagacaggtgtaatatatatgcgccaatacaattagaatgttgtagcaattgacgattatgtgggattacgatggaaatcaaattgctactagtactactttgataaagcgagagatagtttgtatttttagaactcctatctagtgaatactattaaccgaatcaagcggttttgcatgtctgaaatattgtagaatgctttgagccaaaaacaaacttttcacgcgatcaaaatgctgttgcaatcttatctgaaccagcgattccaagaaatcgtatctcaatcgatctaaagtgattagcgcttgacagtaagcaaagacttgtttttttttaacaataataattctcctaatattggccgggatgggtcatcatcttgctgcatctatagtatacaccgtttccgcccgcttacaagttttgaatccacgatactgctgcgtggtgccgggcactcgaagtgccggctcgggtgccatgccggcggcgcccatgttgaccatgtacgccgtggagctggccggcccagagttgcgcatatcttcgtagttggcgtacacgggcgaatcctggtgcggctccattgctgtttctctgctccgttctggcctacgttcgttgctctccgatcggctatggattcgaaactgtcgccagcggtcagcgccgcaaaagccaaactgaatgcccaaaagcgttctcacgtgataagagcgcactggttctctcagatacgaagtatcgcattggcattatcgctacgctgagctgccgagcggcttaaatgcgattcaacagtgagagaaaagaagcactgcactgaaacaccacgaaccaagtgtgccgccactgaaagaggcgatctctagtccgtacatcctccacagcaattgagcacatgccatataagagaatgtaatggaatggaatgtaaatgcatcggctcgtaaattttcgttcagtgtagtgtatctacgaccggggaaacaccaagagccgctctgtaagtcgagagccatgggtcaccacggatgattcactgcactgcgccgaaagaattgccaactggaggcgtacactttcagattattccgaccgacgatcaatgaaagccgagtaagctctatctggcccaagtgcgtttagcactttaatcaatcggttatctcagctggagcattgagacgcagttctgctttggggtcacgggtcattggctggagccacccgatggtgactcaattctgatctggcggtcacattagcactgaagagcttatctgccacactcgctgaagtggcatgcaaatctgagttatttagataagcgaagagcaaatatgtacatacatatatatatatcatatataaatgtaaattttgttgtttcgaaaaagggggaagaactgaaaaaaaaaatgtgttttctgaatcatttggtttatttaaatggttagcttttaccctggtttgtagttagctattgttattaattcttaagatacaaacaaataatattggttattttaaatataacgtctctacttaaaacgactgtgaatgaagaaggaaaagccttggaaaagcctcagttactattgcatactaaattcgacatattagaataaattctaaaaaaaaaaaatttatttttaagtccgaac

SEQ ID NO: 16886 - DNA, 1133 bp, DROSOPHILA
ctgaccgctggcgacagtttcgaatccatagccgatcggagagcaacgaacgtaggccagaacggagcagagaaacagcaatggagccgcaccaggattcgcccgtgtacgccaactacgaagatatgcgcaactctgggccggccagctccacggcgtacatggtcaacatgggcgccgccggcatggcacccgagccggcacttcgagtgcccggcaccacgcagcagtatcgtggattcaaaacttcggagaacgagcccaagggctgcatggaatgggtggtcaccctgttctccgtgctgatcttcatcatcacatcgcccatcgccatcttcatatgcttcaaggtggtggcggagtacgagcgggcgatcatcttccggctgggcagactgagcggcggagctcgtggtcccggcatgttcttcatcctgccgtgcatcgatgagtaccgcaaggtggacctgcgcacggttaccttcaatgtgccgcagcaggagatgctgacgaaggattccgtgacggtcactgtggacgccgttgtctactatcgcatcagtgatcccctttatgcggtcatccaggtcgaggactacagcatgtccactcgcctcctggcggccaccacgctccgaaatatcgtcggcactcgcaacctgtccgaactgctaaccgagcgcgaaaccctggcccacaatatgcaggccacgttggacgaggccaccgagccgtggggcgtcatggtggagcgcgttgagatcaaggatgtctccctgcccgtttccatgcagcgtgccatggccgccgaagcggaggcagctcgtgatgctcgtgccaaggtgatcgccgccgagggtgagaagaagtccgccacagcgctcaaggaggcatccgatgtcatttccgccagtccatcggccttgcagctgcgctacttgcaaaccctgagcagcatctccgccgagaagaactccaccattatctttcctctgcccatggagctgcttactccgtatctggccaaatatgcccacttgatgggcccgccaccggaacttaagcaatcgccagaaaagtcagataacatagttttagacgcactggacgcttggccgaaaaccaacctatga

SEQ ID NO: 16887 - protein, 350 aa, DROSOPHILA
MEPHQDSPVYANYEDMRNSGPASSTAYMVNMGAAGMAPEPALRVPGTTQQYRGFKTSENEPKGCMEWVVTLFSVLIFIITSPIAIFICFKVVAEYERAIIFRLGRLSGGARGPGMFFILPCIDEYRKVDLRTVTFNVPQQEMLTKDSVTVTVDAVVYYRISDPLYAVIQVEDYSMSTRLLAATTLRNIVGTRNLSELLTERETLAHNMQATLDEATEPWGVMVERVEIKDVSLPVSMQRAMAAEAEAARDARAKVIAAEGEKKSATALKEASDVISASPSALQLRYLQTLSSISAEKNSTIIFPLPMELLTPYLAKYAHLMGPPPELKQSPEKSDNIVLDALDAWPKTNL

SEQ ID NO: 16888 - DNA, 2876 bp, DROSOPHILA
ccgtatcagagctaatgaaaaatttttcccatattaattagtagcctagtttcctatctattcacaaactccgaattttccactctcggtgattcaaagtgggctgaatttttatgacgccaacttagtcatcgccatgctgtctcggggactatgagtaattttccgctggcaaaaatcgtgcctccaagggccggagtcattaagtgcagaccgggaattaacagacaaataaaattaataaagaaataaagataatgcatgagaaagatgacgccaagagcagaacgggtaactaaagccgaccgatttaatgaaaacaattttccaaatttggcaaaactattaaccacgctacgttaatttcattagcaagtctgtctttcttgtttcggtgaccgtattttattcacatacaccaaaaagtacatctatgtggcagccattaaatgcgctaattagttggtcaattagcgtatgctttactggattgtttttggctctttgtttgttggcccaaagaggacggctttttgggtggcggagcgtcaaaatcacagtcaccatcgcattttggacgtcagcggttcaatcgcccaactgtcgccacattaataaatcagtttaatttaattcagttgacagctttaagtcaatattgttgattaattgttttcttttaatttcggttttttttttggtttttggttttggtaacctgcagctgttgccaaggggcaaatgaacacttcaccgttcattaacagcatttcatttttgttaattagctcactttggatccataattcttgtgcacattggacgggtttcccggcttcaggttttaaatggaaaataaatcgaaaccctattgttttaataattcataagcggcagtcagcttaatacatatatatggactatttttgcatttaagtttaattattacataaatacaaaaatttgtaattttgaacattcaattatcatgcttttattgctaggattcagtatgatttgaggaatcagtttcagattttctaatctcgtctagggcatcgctccaggacatgaaggcatccggatcatcctcgcattcactcttaattctctccgattcagaattttcgaattcggctagtttctgaagacgaatttgcatacggcgttccacttcctcagtgctactaggaattctttttataggattatccctgccgaaaaaggacgactcactttccgaaggaaatggtgagttcctcgcagagattggcgaatcgatggtgctgagatcactgacactggccgaataatggctagagtttatatcaaattgcctgcctgaacaagtaaataatgaaaagccatctccagctgcctttgtcggtggttcgggtggcaattggcctattttggccataagacaacgaccacggcacttaagcttatccattttgagcagacgaacgagatcctcgcgggaatccatttccacatacgcaaatcccttgggtcgctttcccttcttcggaatggttagagaacggatcgaaaaactggtgaacactttccgcaactcgccttcagtgcactccattggcaaattgctgaccaatgccacaaatggtggttccattgacacctcctcttccggatcgggtgtactgacctttttctgcagatctgaattcgattttttgggcccgtcgccgtacatgaaaagctctgcgttgtccacctgggaagttcgcacctttgtcacgtgcaacatgtcttccaatccttgcccggattcgctgccggagaccgaggacacggaagaggagctgactggtggcagcttgaagctacgcgatgacttggacatctttgccatcagttaccaacaaataaagaatatatgtattattgatataatgagaacgtgggtgtattttccttgaaaactgggaatgttttctgctacaaaaagcaatgccaatttcggcacaaaaatgtttctgtgtacattaaattttacaactataagtaaaggaattattgaattatgatgattataattttatattaaacgaatctttttgaattgtatatatttctagctgctaatgaactcgaattattgattcatcaacttaaaaatgaaaaaagatatgtcttaaatcctgataaaatcatgattgttttacataaagcaagctttatacttcattttctcagcataagtttcattcttgaataataaattgcttttttcgcgttctgtcaatgcataattatagttggttggccaggcaaaatgctcgattgaatattcccaggctgcggatcgcattcagtgcagcacctgctccacagattcagttatacacatatatcgaccatcggactagacaaatgccaaggttcgcggatcccaactggcaactatcggcgtcggttggaaaatatcaaaagttcagcaaacaagtggcatggagttgagttaggagtttcgtagtttgagtttgagtttggctaatgcacggattgtgtcgttttctgtttgctatttgttagtttggtcggtacggttggtttgttgggttgggttgggccgaaacgagcgaggatggaaggaggtttccacattaggcaactggcaacgggctacacccatattccgtggaaaattgggtgcgttggccaaacacaaactaaggtaaactgataaaaatcatggcctgcagcatgagtgcgccagtacgagtgttatgggctttcgggccaagtaacccagccaagtgcctgttgcccaggggcctcgagccacactcgtagtacgtgtctgggaccgggtattaccaacagacagcggacaggctaaaatattaggc

SEQ ID NO: 16889 - DNA, 876 bp, DROSOPHILA
atggcaaagatgtccaagtcatcgcgtagcttcaagctgccaccagtcagctcctcttccgtgtcctcggtctccggcagcgaatccgggcaaggattggaagacatgttgcacgtgacaaaggtgcgaacttcccaggtggacaacgcagagcttttcatgtacggcgacgggcccaaaaaatcgaattcagatctgcagaaaaaggtcagtacacccgatccggaagaggaggtgtcaatggaaccaccatttgtggcattggtcagcaatttgccaatggagtgcactgaaggcgagttgcggaaagtgttcaccagtttttcgatccgttctctaaccattccgaagaagggaaagcgacccaagggatttgcgtatgtggaaatggattcccgcgaggatctcgttcgtctgctcaaaatggataagcttaagtgccgtggtcgttgtcttatggccaaaataggccaattgccacccgaaccaccgacaaaggcagctggagatggcttttcattatttacttgttcaggcaggcaatttgatataaactctagccattattcggccagtgtcagtgatctcagcaccatcgattcgccaatctctgcgaggaactcaccatttccttcggaaagtgagtcgtcctttttcggcagggataatcctataaaaagaattcctagtagcactgaggaagtggaacgccgtatgcaaattcgtcttcagaaactagccgaattcgaaaattctgaatcggagagaattaagagtgaatgcgaggatgatccggatgccttcatgtcctggagcgatgccctagacgagattagaaaatctgaaactgattcctcaaatcatactgaatcctag

SEQ ID NO: 16890 - protein, 291 aa, DROSOPHILA
MAKMSKSSRSFKLPPVSSSSVSSVSGSESGQGLEDMLHVTKVRTSQVDNAELFMYGDGPKKSNSDLQKKVSTPDPEEEVSMEPPFVALVSNLPMECTEGELRKVFTSFSIRSLTIPKKGKRPKGFAYVEMDSREDLVRLLKMDKLKCRGRCLMAKIGQLPPEPPTKAAGDGFSLFTCSGRQFDINSSHYSASVSDLSTIDSPISARNSPFPSESESSFFGRDNPIKRIPSSTEEVERRMQIRLQKLAEFENSESERIKSECEDDPDAFMSWSDALDEIRKSETDSSNHTES

SEQ ID NO: 16891 - DNA, 10810 bp, DROSOPHILA
ttttcagaggcacttcatgaaataaatagaaacccattgatacatccataacttgcaggaatatcgtggccaccttctcggtgaactgtgaactggacctcaaggcaatcaactcgcgtacgaggaactcggagtactcgcccaagcgctttcgtggcgtcatcatgcgaatgcactcgcccaggtgcacagcgctaatctttcgaacgggcaaggtcatctgcacgggtgcacgaaacgagattgaggcggacattggatcgcgaaagttcgcacgcatcctgcagaagctgggattccccgtaaagttcatggaatacaagctgcagaatattgtggccaccgttgatctgcgcttccccatccgcctggagaacctcaaccacgtgcacgggcagtttagttcctacgaaccggagatgtttccaggcctaatctatcgcatggtcaagccgcgcatcgttctcctgatcttcgtcaacggaaaggttgtatttacgggcgccaagtcgcgcaaggacattatggactgcctggaggcgatatcacctattttactaagttttcgcaagacgtagttgtttctacacatccaaatgtttttgtttagcttagttatattccataactacaatatttttaatatatttaccttaacttttttagtataaaatgtgaaatgaaacaacttaattaataatttccatgggtaaattcatagaaattgtaagattttattttggccttactaagcaaattaatttttatttaaaaaaaactgttgttattttaaataaatttttatatattaatgtcttgtaatccatttcattctattctttgaattaataataaatttgtaagtaatttgaatttttatacatttttgtacccattcctggaatttgggaaaaatattcaaatccacaaattctgaagtgtaccaacacattccatgaaaagaaaacacatttggataaacattacttttatttattttcaggtttcgtttattacaaaagaaaacacaagacacttcatagagattcgattcgattcttatggtacggaaaggagcgacattcttaagttgtgtacaaaaatttccttgtttctcgcttagtagcttcatgtacatggctatgtgagatttgtgttgggaatttataaactaattgtggttcatatgaaggcgtatatacgtataaaacttacaaactatgcagattcattatttgcataaattaattggacggtttcttcaacgattttcacttcatttcgtttaaaaatgtattcaagagttagataatacaaattagataaatttccattcgatatgcttgcaaacttttgtcaagatacattcgctaatgatttctaaaatctattaaaggcattttgtgaaagacacattgtttgattttttcattccgcacttggagcccgctctatgataaggcatagtacggttcgttacgacttacaagatacattaggtggctacatgtggtctgctacgtgtggcagaagattctttgttcagcaataaaaataaaatctaatttacgtttaactgctgttttgtacattcaattatacagcgggtcagtggagtaaaactgaaaagaactaaaaataaaaccaaaatgttgaccagcatttttggacggaatgcaatttcgttggcaaacaaaaaaactacaactcaaaacaaaaaactacaaagtaaacacattcaataaatgaacaaaaacattacgaatcttagcaagttgtttcgagggtgactttgtgaatagcgtttcgttttctttctatgtgagcagttgcatcatgtttaggaccaggtgcgtgcgacttcgcagtaggtatatgaatacgctgaagaagagcagggacatggacatggaggcgcgccagcccatgttgtagatggagcagtacggacactgagagctgccgcacacctcacaaatgttcagcagatatgtgggcagggcatcgaatatggattcgttgaatcgttctgtaatcataaaagaaaatggaatttaattaatatttatttggattagctatacttggcaatggtggtttaaagatgttacttacccggtgcatagtagtcgtaaatgcgcaccggcagatagcgagacatattggccactggataccaacgctcaatggtgaagtttacacagatatcctcatgatcaagctgttaaaaattaacgaaattcaacattgaaaataatggataataataaaattgcaattgtatcttacataatcgaagtaaaagacaatcttgcgttctagataacgagctcttctcagatttctcacacggttgctgagcacataggtatccagtttttgctgctgtatccaatagccagtcggtatggccacatccaagaccgccatgcctgagcgctccgactcgttttggtttatccaactatgaaatttgtaaacttattacaattgtcttacacatttaatgcaaatagaaactcacttttgacaagccacataggagatatgcgactgattcctgccgtggaagattgccttggtatgaagtccgaaggctggcactggcggcttggtctggaacttctcaatgtccacattgtactgcacgtgcatctgcaggatggcatagccagcacccttggcctgaaccttgatggtgccccaggcatctggaatctaagaaagataatataagtttattaataatctattagaaatagttttggtaatgcctcttacctcgatactctgcaatttcgccagattcgtgtcatcaatgtaaagcgtttgtgttttgccgccctgcgaagaggcctcgatctccacggtcaacgaggaaacctcgcgcagcctagatcggactgtgtactccacaagagccttgagggcagcactggtatcctgggtggatgcccatccgccgtcgtttaagcgctgcgagttcaaccatcgcacaatgggatccacgaagaactcacggcgcgccacataaaccaatagcgcgtaggcggttgtctctatattcagcgaatcatattcgtatggcagacggggcagcgagaaccacttttgattctccagcttgcgtggaggttgaggtatttcctggttaccccagtacataaaatcgcctatagtcctggcctggcgacgcaggatggcgaatacttcctcggcaatcggagagttacaaagctgcagggcgtacgctgtaatggccacatcaaaaggttgcgcctggtgtctaaggaagtccatatttcgttctatatacgccaaggcacgctgcgtggccaaagcaactcgagagcccagagtgccagagatatcctttacggtggccaaggttatgagtacatgggacgttagcgtgatgttcttgtcaaagttggtgcgattcatcttcctatccggcagccacgtgacctcgaagaaggatccctgtggcgtctggtgttgcagaagccatctcatgttcttttcaataattgtggcatcgatccagatgaagttctcccattcgtagaagctggcctcttggaacacccttaagcagtagctagtcaaccagacggacgaatcggagttgttccaatcggaacggaacagtgagaagctgccatcgggccgcataaaactcaactgccgctgatagccaatgttcatgtggtaaaaggcattcttctccagcgttttgttgcgttgattaattaatcgcatgtacataatcgtgtagagattggcggcgaagctgaaagcattctgttcgcccgactccatgggcaaggaaagcagggagctggcatttacgggcatggtggggaaaatgggaccaaccacatcacccactacggatatcctagccttatttgagccgtacacaaagtaacgatccacttggtatggaatttctggcgtttgagttacattaacatgcatgtattctaggacataggcgcggttagagagatccagtagcacggattgatgacgatactgtggcagaccatccgattctacatgcagtgttcgcgttatggtatctgttccaagtaaagtggccacgtgtagggtcacatccacattgcctagacgctgaggtacaacgggcacgtaaaccaccgtcgtgccttgagcctccaagtagatgaaaaattgatgttcaccaaagctagttctggggttatacgatctgacgatgccatcctcctccacgtgcacaaacttgtagtccggactgtcgtgcagcacgacaatcgcctcgatgggagttatcatatagttgaaaacagtgacacggatgcccacctgctcgccttgtcggcaagcttccggcatttccacgtttatgaagaatggttggacaccaacgtactccaaggccttgttcatcattccaaagcctttcgatggactcacactaaacgcactgaccatccaataggcggggcgatcaggcacctccacattaaaaatgtatcgaccatgtggtccaatgttcacatccttccatagccacacattttcgtaatggcgaagcacgcgattaaatcggtactttctgtagttcaacagctctgtgtcattacgcgcatggcaattgatctcatccgttccatcatcacaatcaaacaaaccatcgcactgcttctccaggcgataacaacgtccactcaaacactctccgaaacccaaagtacgattgcaggtgtcctgccttctgggtacataaccatccgtaaatacgatcagtccactgtactcaaaagtgcgatttgcatcgacgccaaaggacgaggcggggaagtacaccagctcatcgggattgccttcgtgagagtaccaaatgtgcttatacgttccattggtctgctcgtcgaagttggacatcttagtgatgatcttggcgtaagtgagctcgttgccggcttgcattgtgtagaatgcactgtcgatgccagagagaccaacatacgagcccggttctccaaagatagccacctccactttttctccggttctcgctttgcgattgttgatatatacggtaaagttattccgggagatgccattaactgggaacgtaagggaatcggccacaacctgtccctgctggttaatcttccacactacaatcgtagccacaggtgccatttcggaactcagaacaacagcaatggttttaatgccctctgtaatggtttcgcggtcattcaccaggataacaccctttgacataatgagatagttgaactcttcgaggtagaaattcgtgcggatgtggaagatgatatactccccaaccactggtttctctgtgctggtggtgaccttaatgtgctgatttctgggcgaatagtgagacaccaaaaggagctccgtttgaatgcgttcaccacgcggatccacaaagttcgcctgcaagcgcatgttctgaacgccgttcaagaagtctcttgcttgtgggcgatcgtccaggttcagatcattcctgatgtcaatcttcacctcccaaatgccatcgctttgctgcgacataggcaatcgctgggcgggccagtccctcctgccaccattgcggctctccacgaaaccagagacttccattaaaccctggcgtaataggtttggatcaattggcgaaccatcatggtactcaacagccagatatgtggtaaatggcatggcgggcttgaagacctgcggcgaatcgccaaggaataccaccctcagactggaattatacaccctggccacggagtaaccactgatgatctcatcgtagaacttttcaccaacagtggccgtgatcagcacctcagagttggccagattgggcaccagaagctctagctccctcaatggccacttgaagtcaaaggtaccattgaagtagcgcaagtagggcagggtctttcgataagttccactccacgcctcgtagctgctgtcctgatactcgggtttcctaacccagaatggccactcctcgtcgaactgatagtgtcgctcgaccacatattgattcctgtacaaaatatcctgtgaaagatctgctccatcctgtggcagttgtccaggcacattatactgcacttgcggattctggttgggattattgtagcgccatcgctcattgtataggttagtttgctccaaaggtgaacgacccaggcgatacttctcatttagaacttggttgctgaagtatccaattgggcggatcgtggccttgattgtgagattgcctctaactggtaggccactggtaaagttagccatcacccttccgtagataaacggatccgttgtgaagaagtacgcaggcatggtaacattcacttcgaatcgggtctgatagtattcctccacggtgaagtgactctcctcttgctgtccctgagctattacacggatagtccattctccaaaagtgggctgatccgaaagtttgtactccagcgaaacggaacccaagtttgattgactgaaagttaaaaggaaataggttgtttatttgcaatttaatttgttgatggagaggaactattaagacgtatgaaatataataattccacttaccgcgatagccaacgtttaagaatatgcctgtttggatccagcatgtacacatcgacgggattgtcaaatcccttcagttcggtggtgatcggaatggtcctaaatcgcacagtttccccttgcatataaagaggcttatcggtctgcacaaatatcgtcatggagcgctgtgagaagtctagtcttgtttcgttcaggaaggcgaggccaccgaaaacgttctggtagaaaccttccactcgaagcttatagcttccagtcacactagttggtgggatcctcatgagcaacgtctccggtatgccctccttgacatccttagagtctccgctgatttggacaccatcgcacgcgatgctggcatgaacggttatcgggtactgagcttgaagaatggatacggacacctgatagattagaccaggtctgaccattcgagatgccacaatgaagtaagtgggctccctggaatgcagcgattccaggaaggtggccttgatgttataggacgactttccacgagtcagactcggctcctcgttgtcctgatagcctcctcccactcgtttattatagtcatcttgcccggcaatatcgttgtagctccccgaatcggtcctgtacggcgggcgatcactgggattcgtttggccaaagttttggttgttgttgctatactgattcgtctgtggattgttaccccactgctggttgggcagtagcggctgctggggattctgctggttctggttggggttgtagtagttgtcgttttgtccgaccgccggttgcagtgcatccaagacggcggctaccacgagcagggcgcgcagcaagtgccacatcattgctgagaggagaagtcagaagtgaatgaattagaatcgctgggcataaatgcatctcccaaatactataaatagaggcctctgatttgggtgatcggcctgttctttaatgcctgtcgaatagggtgtatcaatggttttcaaaacaaattttcgagtttattcgatttttcgataaaaaatagtaagctttgtatgaagtttttttgtgatattgaataagaatcacttttaacatccctgaataagctgctctttaaaaataagtgcataacctcctaccaatactttgttttaaatatagcctgtagttaagtacttaagatttttttaaatttttcgcatatatgtatttccaaagcaccctaatccctaagtcatggaccgcatctcatgttcgaggattgttgttggtcggttgatttccgcgtgatgcgaacaagtcgttaatgagggcgccgacatcggtattaatagactatagacgcgatccggcaggagcaatgaacgtatcttcagggagatctttttaaggggccagcggcaatatggaaactatgtcaaacattaagtaaaatgtcattcaagtgggcggcgcaattagacagcagagatgtatgccacgctgggatttgaggcgttcgaatcttcttttgaatgggtttttaatgccttcgttatttatggttgatttataagagattacgaaatctcagcttcacaaaccactttgattttcgaggaataattatgaatatacccatactatactatagacaatttttcatatcaataatgatgtgaacttttaatttaatctacttaaaattcaaaagtatgacaaattgtaaggaacgtttgaactcaattaaaacagttcttaggagttcttaaaaaattcatttttaaaaattatttattttttttttgcaaattgctggtggagaaatgtgtgcaacattaaaaaatgcgcatatttaagtattccagcttatcagcacacaatcagccggcacacagggaatacatcattcgagcaaggacctcgaaatcctccctactcaggtattaactccatggtgtagggtaagaagtcaacgcttaatggcaaccatacaaaaagggtccacgccaggagaacaatgaggcaccggcaccgacttctagacaagtgaggtgaaatgaaattgaaggatggatggagggagtgcgtgtgtgtgtgtggctggctgcatttgaaatgcattcactggcgagcaaatgaaggtaaaggtagaccactggaactgagcgaaacacgcaaatgaaacaaccggctacctgaccatagatatcggcctgggcgagatactctgtgcactgaagcagcagaagttactggcctataggccagtctctactctcggcggtgaaaacaaataccgaactcgtaataatttcaacaacgcgacttgtaatccaccctttgcgcacagctacacagagagaaaatagtttactagatttatttttttcaccttttgaaataaataagatcttgattaaatgggatttttcatattaaaaatataaatatttttcattataaaaaaaaatattgaattttgttatttaaaaaaatctttttatagagttttctttcgtttaaaaatgccatttcggtataacatttctatataacaaatatatttgacatcactttttccagtgcaagagggcgcaccagcaccagcgtaatacacaagtaaagtgggcattaattagccgagaagacccattcgaaatgagttgagagggcaaaagtgcaattgaaacagcaggcaggacattttgggcggccaaaggagcaactgttggcggaaattcgagagcttgaaggcagaaaaacgaaagaagacgccgcaatccaattggccagcaggtggccaaaacgccatcctcactcacatttccttttagtggcaaagtgttcctaacgaaaaacttcctttacaattactaattaaagcaacgagcacatagtacaaagttgtaaccaatatttgaggcacttcttcgtttttcggtcaacgcccatgtgccaacaacaacaacagcaacaacacaataacactggcttaggcattttggagacggccaaacacacgatttttgggcgggtcgccaagtggaagagctccgaaaagccatttctactcacctcggtactgaaattcgatctaatctggctgctcagcaggccatgcacattttattaaacaacagaaaggtaaataaaactaactcgggaactcaaagattcgaaaaaatgaaacaacacaaaaccaacagcgatccacacccgctttgatgactgatgcagtgtgaccgttcgcagagattggcacaataccagatttcaggtgtggccagaacgctaagaatttaacggtcgcactgcgagttcaaactgctgatgtgaaaattttataattcctaatgattttaatgtcataataaattaggaacaaaggaagtaagctcataacgttacaaaagtttatcagaaaagcgtatttttatttattaactaagtttaagcttaatctgcgaaccagttataatttacgtgtttccacagaattctaagaataacatattgctagaatatatgagggaatttagttcttagcctgggagtaagacagagatggcaaaacttcatccgctcagcgccagtgttggataatggcattctatagtctttttagtatatatcgttcagtatttttgctactatttgactataagccttggtcataccaccgcttcagttgtctgtgtgtgtgtgtattgtatgcatgtgatgtaaggtcattcgcgtgaaaatatcagcgaggaaaaaatcgaatttttgtgttttgtgtgctaggtaaatgcgaaaaattgtgcaaagtcgatcggtttaaggcccagtctgtgtgccagcggtgaaagtgtgagccccctcggtcatttacgtgtgaaaagtcgccaagaagtcaaaggtgctgggttgcccaacgcaaaaattatgacgaaaagcacaccagcacaagtacccatctctctctctctctcacacacacacactcgcacacgcagcagaagcaaaagcagtggagctgggagagctagaacctagagttgtcaacgctttgcgaggaatttcgtcattgagcggtggcatgtgtgtgtgtcagtgcgtgctcagtgagtgtgtgtgcgagagtgcgtgcgtgtgtattggtagtttgttctcttcattggtagtaaaacacaaaagaaaaatcatcggggaaaaatgtgaaaaatgtaca

SEQ ID NO: 16892 - DNA, 6240 bp, DROSOPHILA
tggatcgctgttggttttgtgttgtttcattttttcgaatctttgagttcccgagttagttttatttacctttctgttgtttaataaaatgtgcatggcctgctgagcagccagattagatcgaatttcagtaccgagcaatgatgtggcacttgctgcgcgccctgctcgtggtagccgccgtcttggatgcactgcaaccggcggtcggacaaaacgacaactactacaaccccaaccagaaccagcagaatccccagcagccgctactgcccaaccagcagtggggtaacaatccacagacgaatcagtatagcaacaacaaccaaaactttggccaaacgaatcccagtgatcgcccgccgtacaggaccgattcggggagctacaacgatattgccgggcaagatgactataataaacgagtgggaggaggctatcaggacaacgaggagccgagtctgactcgtggaaagtcgtcctataacatcaaggccaccttcctggaatcgctgcattccagggagcccacttacttcattgtggcatctcgaatggtcagacctggtctaatctatcaggtgtccgtatccattcttcaagctcagtacccgataaccgttcatgccagcatcgcgtgcgatggtgtccaaatcagcggagactctaaggatgtcaaggagggcataccggagacgttgctcatgaggatcccaccaactagtgtgactggaagctataagcttcgagtggaaggtttctaccagaacgttttcggtggcctcgccttcctgaacgaaacaagactagacttctcacagcgctccatgacgatatttgtgcagaccgataagcctctttatatgcaaggggaaactgtgcgatttaggaccattccgatcaccaccgaactgaagggatttgacaatcccgtcgatgtgtacatgctggatccaaacaggcatattcttaaacgttggctatcgcgtcaatcaaacttgggttccgtttcgctggagtacaaactttcggatcagcccacttttggagaatggactatccgtgtaatagctcagggacagcaagaggagagtcacttcaccgtggaggaatactatcagacccgattcgaagtgaatgttaccatgcctgcgtacttcttcacaacggatccgtttatctacggaagggtgatggctaactttaccagtggcctaccagttagaggcaatctcacaatcaaggccacgatccgcccaattggatacttcagcaaccaagttctaaatgagaagtatcgcctgggtcgttcacctttggagcaaactaacctatacaatgagcgatggcgctacaataatcccaaccagaatccgcaagtgcagtataatgtgcctggacaactgccacaggatggagcagatctttcacaggatattttgtacaggaatcaatatgtggtcgagcgacactatcagttcgacgaggagtggccattctgggttaggaaacccgagtatcaggacagcagctacgaggcgtggagtggaacttatcgaaagaccctgccctacttgcgctacttcaatggtacctttgacttcaagtggccattgagggagctagagcttctggtgcccaatctggccaactctgaggtgctgatcacggccactgttggtgaaaagttctacgatgagatcatcagtggttactccgtggccagggtgtataattccagtctgagggtggtattccttggcgattcgccgcaggtcttcaagcccgccatgccatttaccacatatctggctgttgagtaccatgatggttcgccaattgatccaaacctattacgccagggtttaatggaagtctctggtttcgtggagagccgcaatggtggcaggagggactggcccgcccagcgattgcctatgtcgcagcaaagcgatggcatttgggaggtgaagattgacatcaggaatgatctgaacctggacgatcgcccacaagcaagagacttcttgaacggcgttcagaacatgcgcttgcaggcgaactttgtggatccgcgtggtgaacgcattcaaacggagctccttttggtgtctcactattcgcccagaaatcagcacattaaggtcaccaccagcacagagaaaccagtggttggggagtatatcatcttccacatccgcacgaatttctacctcgaagagttcaactatctcattatgtcaaagggtgttatcctggtgaatgaccgcgaaaccattacagagggcattaaaaccattgctgttgttctgagttccgaaatggcacctgtggctacgattgtagtgtggaagattaaccagcagggacaggttgtggccgattcccttacgttcccagttaatggcatctcccggaataactttaccgtatatatcaacaatcgcaaagcgagaaccggagaaaaagtggaggtggctatctttggagaaccgggctcgtatgttggtctctctggcatcgacagtgcattctacacaatgcaagccggcaacgagctcacttacgccaagatcatcactaagatgtccaacttcgacgagcagaccaatggaacgtataagcacatttggtactctcacgaaggcaatcccgatgagctggtgtacttccccgcctcgtcctttggcgtcgatgcaaatcgcacttttgagtacagtggactgatcgtatttacggatggttatgtacccagaaggcaggacacctgcaatcgtactttgggtttcggagagtgtttgagtggacgttgttatcgcctggagaagcagtgcgatggtttgtttgattgtgatgatggaacggatgagatcaattgccatgcgcgtaatgacacagagctgttgaactacagaaagtaccgatttaatcgcgtgcttcgccattacgaaaatgtgtggctatggaaggatgtgaacattggaccacatggtcgatacatttttaatgtggaggtgcctgatcgccccgcctattggatggtcagtgcgtttagtgtgagtccatcgaaaggctttggaatgatgaacaaggccttggagtacgttggtgtccaaccattcttcataaacgtggaaatgccggaagcttgccgacaaggcgagcaggtgggcatccgtgtcactgttttcaactatatgataactcccatcgaggcgattgtcgtgctgcacgacagtccggactacaagtttgtgcacgtggaggaggatggcatcgtcagatcgtataaccccagaactagctttggtgaacatcaatttttcatctacttggaggctcaaggcacgacggtggtttacgtgcccgttgtacctcagcgtctaggcaatgtggatgtgaccctacacgtggccactttacttggaacagataccataacgcgaacactgcatgtagaatcggatggtctgccacagtatcgtcatcaatccgtgctactggatctctctaaccgcgcctatgtcctagaatacatgcatgttaatgtaactcaaacgccagaaattccataccaagtggatcgttactttgtgtacggctcaaataaggctaggatatccgtagtgggtgatgtggttggtcccattttccccaccatgcccgtaaatgccagctccctgctttccttgcccatggagtcgggcgaacagaatgctttcagcttcgccgccaatctctacacgattatgtacatgcgattaattaatcaacgcaacaaaacgctggagaagaatgccttttaccacatgaacattggctatcagcggcagttgagttttatgcggcccgatggcagcttctcactgttccgttccgattggaacaactccgattcgtccgtctggttgactagctactgcttaagggtgttccaagaggccagcttctacgaatgggagaacttcatctggatcgatgccacaattattgaaaagaacatgagatggcttctgcaacaccagacgccacagggatccttcttcgaggtcacgtggctgccggataggaagatgaatcgcaccaactttgacaagaacatcacgctaacgtcccatgtactcataaccttggccaccgtaaaggatatctctggcactctgggctctcgagttgctttggccacgcagcgtgccttggcgtatatagaacgaaatatggacttccttagacaccaggcgcaaccttttgatgtggccattacagcgtacgccctgcagctttgtaactctccgattgccgaggaagtattcgccatcctgcgtcgccaggccaggactataggcgattttatgtactggggtaaccaggaaatacctcaacctccacgcaagctggagaatcaaaagtggttctcgctgccccgtctgccatacgaatatgattcgctgaatatagagacaaccgcctacgcgctattggtttatgtggcgcgccgtgagttcttcgtggatcccattgtgcgatggttgaactcgcagcgcttaaacgacggcggatgggcatccacccaggataccagtgctgccctcaaggctcttgtggagtacacagtccgatctaggctgcgcgaggtttcctcgttgaccgtggagatcgaggcctcttcgcagggcggcaaaacacaaacgctttacattgatgacacgaatctggcgaaattgcagagtatcgagattccagatgcctggggcaccatcaaggttcaggccaagggtgctggctatgccatcctgcagatgcacgtgcagtacaatgtggacattgagaagttccagaccaagccgccagtgccagccttcggacttcataccaaggcaatcttccacggcaggaatcagtcgcatatctcctatgtggcttgtcaaaattggataaaccaaaacgagtcggagcgctcaggcatggcggtcttggatgtggccataccgactggctattggatacagcagcaaaaactggatacctatgtgctcagcaaccgtgtgagaaatctgagaagagctcgttatctagaacgcaagattgtcttttacttcgattatcttgatcatgaggatatctgtgtaaacttcaccattgagcgttggtatccagtggccaatatgtctcgctatctgccggtgcgcatttacgactactatgcaccggaacgattcaacgaatccatattcgatgccctgcccacatatctgctgaacatttgtgaggtgtgcggcagctctcagtgtccgtactgctccatctacaacatgggctggcgcgcctccatgtccatgtccctgctcttcttcagcgtattcatatacctactgcgaagtcgcacgcacctggtcctaaacatgatgcaactgctcacatagaaagaaaacgaaacgctattcacaaagtcaccctcgaaacaacttgctaagattcgtaatgtttttgttcatttattgaatgtgtttactttgtagttttttgttttgagttgtagtttttttgtttgccaacgaaattgcattccgtccaaaaatgctggtcaacattttggttttatttttagttcttttcagttttactccactgacccgctgtataattgaatgtacaaaacagcagttaaacgtaaattagattttatttttattgctgaacaaagaatcttctgccacacgtagcagaccacatgtagccacctaatgtatcttgtaagtcgtaacgaaccgtactatgccttatcatagagcgggctccaagtgcggaatgaaaaaatcaaacaatgtgtctttcacaaaatgcctttaatagattttagaaatcattagcgaatgtatcttgacaaaagtttgcaagcatatcgaatggaaatttatctaatttgtattatctaactcttgaatacatttttaaacgaaatgaagtgaaaatcgttgaagaaaccgtccaattaatttatgcaaataatgaatctgcatagtttgtaagttttatacgtatatacgccttcatatgaaccacaattagtttataaattcccaacacaaatctcacatagccatgtacatgaagctactaagcgagaaacaaggaaatttttgtacacaacttaagaatgtcgctcctttccgtaccataagaatcgaatcgaatctctatgaagtgtcttgtgttttcttttgtaataaacgaaacctg

SEQ ID NO: 16893 - protein, 1760 aa, DROSOPHILA
MMWHLLRALLVVAAVLDALQPAVGQNDNYYNPNQNQQNPQQPLLPNQQWGNNPQTNQYSNNNQNFGQTNPSDRPPYRTDSGSYNDIAGQDDYNKRVGGGYQDNEEPSLTRGKSSYNIKATFLESLHSREPTYFIVASRMVRPGLIYQVSVSILQAQYPITVHASIACDGVQISGDSKDVKEGIPETLLMRIPPTSVTGSYKLRVEGFYQNVFGGLAFLNETRLDFSQRSMTIFVQTDKPLYMQGETVRFRTIPITTELKGFDNPVDVYMLDPNRHILKRWLSRQSNLGSVSLEYKLSDQPTFGEWTIRVIAQGQQEESHFTVEEYYQTRFEVNVTMPAYFFTTDPFIYGRVMANFTSGLPVRGNLTIKATIRPIGYFSNQVLNEKYRLGRSPLEQTNLYNERWRYNNPNQNPQVQYNVPGQLPQDGADLSQDILYRNQYVVERHYQFDEEWPFWVRKPEYQDSSYEAWSGTYRKTLPYLRYFNGTFDFKWPLRELELLVPNLANSEVLITATVGEKFYDEIISGYSVARVYNSSLRVVFLGDSPQVFKPAMPFTTYLAVEYHDGSPIDPNLLRQGLMEVSGFVESRNGGRRDWPAQRLPMSQQSDGIWEVKIDIRNDLNLDDRPQARDFLNGVQNMRLQANFVDPRGERIQTELLLVSHYSPRNQHIKVTTSTEKPVVGEYIIFHIRTNFYLEEFNYLIMSKGVILVNDRETITEGIKTIAVVLSSEMAPVATIVVWKINQQGQVVADSLTFPVNGISRNNFTVYINNRKARTGEKVEVAIFGEPGSYVGLSGIDSAFYTMQAGNELTYAKIITKMSNFDEQTNGTYKHIWYSHEGNPDELVYFPASSFGVDANRTFEYSGLIVFTDGYVPRRQDTCNRTLGFGECLSGRCYRLEKQCDGLFDCDDGTDEINCHARNDTELLNYRKYRFNRVLRHYENVWLWKDVNIGPHGRYIFNVEVPDRPAYWMVSAFSVSPSKGFGMMNKALEYVGVQPFFINVEMPEACRQGEQVGIRVTVFNYMITPIEAIVVLHDSPDYKFVHVEEDGIVRSYNPRTSFGEHQFFIYLEAQGTTVVYVPVVPQRLGNVDVTLHVATLLGTDTITRTLHVESDGLPQYRHQSVLLDLSNRAYVLEYMHVNVTQTPEIPYQVDRYFVYGSNKARISVVGDVVGPIFPTMPVNASSLLSLPMESGEQNAFSFAANLYTIMYMRLINQRNKTLEKNAFYHMNIGYQRQLSFMRPDGSFSLFRSDWNNSDSSVWLTSYCLRVFQEASFYEWENFIWIDATIIEKNMRWLLQHQTPQGSFFEVTWLPDRKMNRTNFDKNITLTSHVLITLATVKDISGTLGSRVALATQRALAYIERNMDFLRHQAQPFDVAITAYALQLCNSPIAEEVFAILRRQARTIGDFMYWGNQEIPQPPRKLENQKWFSLPRLPYEYDSLNIETTAYALLVYVARREFFVDPIVRWLNSQRLNDGGWASTQDTSAALKALVEYTVRSRLREVSSLTVEIEASSQGGKTQTLYIDDTNLAKLQSIEIPDAWGTIKVQAKGAGYAILQMHVQYNVDIEKFQTKPPVPAFGLHTKAIFHGRNQSHISYVACQNWINQNESERSGMAVLDVAIPTGYWIQQQKLDTYVLSNRVRNLRRARYLERKIVFYFDYLDHEDICVNFTIERWYPVANMSRYLPVRIYDYYAPERFNESIFDALPTYLLNICEVCGSSQCPYCSIYNMGWRASMSMSLLFFSVFIYLLRSRTHLVLNMMQLLT

SEQ ID NO: 16894 - DNA, 6072 bp, DROSOPHILA
ttccggccgcttcttggccaccgcctgctacgactctagctggcggctgtgggatctggagcaaaagacagaggtgcttcaccaggaagggcacgcaaagccggttcactgccttagctatcattccgacggcagtgtcctggtcaccggcggtctggatgcctttggacgagtgtgggatctgcgcactgggcggtgcatcatgtttctggagggacacttgggcgccgttttcggcgtggacttttctccaaacggattccacatagcaacagggtcccaggacaacacatgtaaaatctgggacctgaggcgacgccagccggtctataccattcctgcgcacaccaatctgatttcggacgtgaagtaccagcaggagtgcggcagcttcctggtcacctgctcctacgactcgaccaccaagatctggtccaacaagacgtggcagccgttgaagacgctgcagggccacgacaacaaggtcatatcggtggacatcgcgcccaactcgcagtatatagccacgacctcatttgaccgcacatttaagctgtggtcgccggatagctgattttgataccattactttattgtactcacctgtgggcgtacgcagacaatctccacttgcgatctgcccgctgggcacgacttactcatcaactgtttttgttatttcagagacaatagcccaaaacatttcaagttttcgttttgtataacacaatttgttgtttttgttaggcgaaaggcagatgcagcgatgttgcatttcgtaaatttaagacttttttattgaaattgttaataaaaaatacatttttggtagagaattgaattttaaacgggtttaaaattgggaaaggatttactggcccaacaactaatcagcctacaacttgtttctaatttataagtaaggataactagcaacttttcctcttcattttttaattatccttgagcagcccatcctcatatttaaacatctgtttttattacttgtatatagttttccatttaatttcttttcgtatatatttgttgtatgacaaacttagacaattaatttgaattttaactaaaatttaactaccacagataggttgcaattacatacatacatgtaagtgtatgtctaatatattaattatagattacatacatcgcgatataactgttacatatagtttacacataaggattcataaattttcttgcactttgcacaattgtcgatcagtttgtagtattagctcgtcgattaactacgctcatgcatgacgttagataatgtctagaatttcatttcattgtttcgcgttgagatttacaaggattcaaatcgcaatccatgggcttcatgtagaatatggtgctgggatttggagcaggatcgggagcgggagctggacgagcgcgttctaatgtggatttgaatgaggtctcccgacgctcgaagatgccacttaactaaatacataactcttgcactaggctaacaaactagacaaatgataactaattaacaattaaggtaaacgtttattggaaatcctgcagcttgtgcaaggctcgtcgccgacccgctcctcctagaccgtcgtgtccggcgccggggtgatgggctgcttggactcggacacctccaaggtccttccgttggaagcgggcccgccctcctgcggatcctcgggcgcgatgtcaatgcgatgcgccttgcgccacaccaccagatccatcaggaatgccaggaacataatgccagccgtgattcctgggaattacagatagcttactaagtatttctgtttataaattaagggactattatcttgcatagtaaggtacataatcactcagagattagtaatttagatattttttttatattttcctatagattctgactcacctaggaaatattgccggaaagtgtccgcatcgtagagtgaacaggcgccgtgcttgccgcacaccgacttccagatgaggcaggcggagtccaccactgcgccgtagatgatgggacagggaacgttgccgaacaggccgatggccgactgtatcacacccatggccatggccttatctgcggggaattaagggttttgttatcgttagtgtaacatctgtttgccaatcctggttattacctttggggtgtgtgcagcgcatgacgagcagcatgctgcccacctcggaggtggaatgcataaatacgcaaatggcaaagatcagtataaagtagatgaagttcttgcagttattatcacagtaaccgttgaccgcctccggagctgaaaggtgcaaagggattaagatactgaatcttagggctatggcaatgggtgcatctcaccatctggaatgcaagcacaatcggagtagagtgtgcgattgtcgctgggccgcagtgaggagctgctgcatccggcgtggcaggccgagatgtacattttgccgtcggcgcagatgggcgcgaagttctccttatcacaggtacagttgagagcggcactgcacgtgggctcgatcaaggcgggactagcgatggattaaaataagttacatgttactagagttactccgtatatcaagtgtaaaaagtcgacttaacacgaattacattttggatttgatagctagcttatagccccactttcccgcagtcccacttagtgcaatatattaattctacatgtatccaaaaattaaaaggatactattgttgcggaaaaagtttgcatacttatgagggcagtggtattggttcatgttggttggatctctaccttttcaaatgctatctttatagtttacttatattatataattataactaatatgtaattaagcaagaacttcttcgatgacccacctgttgccatcgcttggcttgtagccggcaaagtcgttcatgctgcagccgatgaacatcaggatgatcatgcccgccgagtagacgagggctgtaaaggcgatccaggcggccacgcccctggcagtgggctttcgcttcaggatgaagagcccggaaatgacaatacctatgcccatgaccaggatgccacagaaggcggcgatcatgttggcatcataggtggccagccggaactgcgtctccagatacttgggcaggaacgtatagagaccggcgatgggcagcaggtggaacacgcacgaggcggtgcggaacatcaggatgtcgttgctcagctggcgacggactgtcttgggaaaatctgtatgggtaaattttaagatttagttccagatggagtaaggtgcattgattggctgatctgttgatgacagaggcatgattataatctaaaatctttatcatcaaatactaaagaccaagctatctttgacattctcaccttttagcttgggcttctcctccggctcaactggagctgctggagttgctgtctgccccggcggcttctgcttgcctctcaactgcttgggaaacgagaacatggcgatggaggccagcagcatgaggctgccaatggccacaggccccagccaccaggcgccaatccagcgcggatccgtggcgtcgaagccgggattcgagaagttgacataccagcgagtgcagaagctgccaaaaatgaaaccggatgccggtcccaggatcctcatgccaatggtgacggccatgtacatgggcgactgcttgctgcctacattgtcatcgatgtagggtatgcccagtgtggccacggcggtctggccaatgcccgagctgagcaggctgccaaagaagatgcacagcacgatgacggtgatcttagagtgggaggcctgttccagctggcgctcctcgttgcactcgctgcccgaatgggtttggttgccacccaaaatgcacaaattgggattaacctgttcactgctggcattcagccagtgtgatgagaaggaattattggggggggagacctgcgtctgctgcagaattacactggagtgcatcagctgctcgccgaagatgaaatgcggcagggcgcaggagaaggcggcgattgagaacaggaccatgccgcaggcaatccatctcggacgatgtcctctgccggcgaagtaggtcagcaacatggccgtgcatatctgacccatctcactggcgctcagcagaattcccgtggtcttcgacttgatctggaatagcttctcaatggtggtgatcacagagacgaagtaggtcatgtacatgccctgcaggatgtaggccagcaggaagaccaccatgaagacgtgcgtggacgcgaatcttctggcccacctgggccgacagccgaaaaggccgcaactggagctggattccgcggaggagccgccattgaggtcggaatcgaaatcggattcctcggactcactggagcgaggtggcaacttgtaacctccggtcaggggagcctgttcatgggcatacttttcgctcagactgtgcccattgccggtgccattattattactgctcagtatgttgcccaggccattcttcaggtgtcccagatcctccggggccttccactcgttattattgctcggggtgctctcgtagagcactgtactcggaggcggagtggtcacctcgccattggtggtgccattattgtgctgcgacagcagtggtgtgaaggcttgactggaatccctgcgtccgccgttctgatgatagccattcccattcagctggccatgtccgttgctgggctttccgcccagagattgcacctgggctgccgcctccacatcgccattgctcttcgtcattttggcttctaatggaactctaaaaaactagatggtttgatcgatcttcaatgggttttattgatctcaactgtgtaatctcaacggatccgtttagttaatctcctctatgtggtcttgcttattgcctgttccattttcctatcgggaaattgggttctggcattgagtttagttttattttgcttgttggcccagaagtcgaggtagattggttgatctggtctgtaaaacagttctatattctttgctttaatatggcagtggtgtgtctgaaaaaaagatatagaatttggtaaattcagattagtattggaataattaactcttttcgggaaaaaggctacctaaatatttaaaatactattttatgactttagaaatgttctcctattaacctttttccaacctgttgctccattttgtttatttgttaacttcaagtacaaacatacgacatacgtctatatttatatcaaaagctgtattattaagtgagtatttttacagagaagtaaatgctttgcacatgaaagtacatattgcaaaattaaactgtatattctgacttatcagaaatatacttaaataatataattcttttaatgatttgacaaaactcttaattgaaaactcactactggcatattttcctttactgattttctttctctggttaaagtcactcctcaccatccaattataatgaaactatggcgttgaaaccccaacgaagactaaagagaatcacacaaacacacaccttatcagtgccgaacacacacacacacatgcatttgaaacgcagtcgtgcgaacagcatgcgacaagtttctagcaaagctgcaagtattttagattgcaccacactttggcactatgataagagcgctgaaaaagttcaaggttgggctgatatgaaattttaatcgcccgaggagagtgtttggcttatttacgtcaatttaaacctaatttggctcttgctatcatataaaaactttacaaatttcccaaatgatgatttccccatttttagaaaccaactaaatatgtatgcatgaacctatgcttgtagtatataaaccaatttggatatgcaaagcaaatattaaaacagtttgtccaaatgctcctctactcgtatctcactttcggtttgtatattttttttttttgcacaaaaaatttcaatgtcaaatactcgcaaatttcgttctaagcatttgttgtttttgttcggcctcaacaatttgcgttggcgttggcttataa

SEQ ID NO: 16895 - DNA, 3333 bp, DROSOPHILA
cagacacaccactgccatattaaagcaaagaatatagaactgttttacagaccagatcaaccaatctacctcgacttctgggccaacaagcaaaataaaactaaactcaatgccagaacccaatttcccgataggaaaatggaacaggcaataagcaagaccacatagaggagattaactaaacggatccgttgagattacacagttgagatcaataaaacccattgaagatcgatcaaaccatctagttttttagagttccattagaagccaaaatgacgaagagcaatggcgatgtggaggcggcagcccaggtgcaatctctgggcggaaagcccagcaacggacatggccagctgaatgggaatggctatcatcagaacggcggacgcagggattccagtcaagccttcacaccactgctgtcgcagcacaataatggcaccaccaatggcgaggtgaccactccgcctccgagtacagtgctctacgagagcaccccgagcaataataacgagtggaaggccccggaggatctgggacacctgaagaatggcctgggcaacatactgagcagtaataataatggcaccggcaatgggcacagtctgagcgaaaagtatgcccatgaacaggctcccctgaccggaggttacaagttgccacctcgctccagtgagtccgaggaatccgatttcgattccgacctcaatggcggctcctccgcggaatccagctccagttgcggccttttcggctgtcggcccaggtgggccagaagattcgcgtccacgcacgtcttcatggtggtcttcctgctggcctacatcctgcagggcatgtacatgacctacttcgtctctgtgatcaccaccattgagaagctattccagatcaagtcgaagaccacgggaattctgctgagcgccagtgagatgggtcagatatgcacggccatgttgctgacctacttcgccggcagaggacatcgtccgagatggattgcctgcggcatggtcctgttctcaatcgccgccttctcctgcgccctgccgcatttcatcttcggcgagcagctgatgcactccagtgtaattctgcagcagacgcaggtctccccccccaataattccttctcatcacactggctgaatgccagcagtgaacaggttaatcccaatttgtgcattttgggtggcaaccaaacccattcgggcagcgagtgcaacgaggagcgccagctggaacaggcctcccactctaagatcaccgtcatcgtgctgtgcatcttctttggcagcctgctcagctcgggcattggccagaccgccgtggccacactgggcataccctacatcgatgacaatgtaggcagcaagcagtcgcccatgtacatggccgtcaccattggcatgaggatcctgggaccggcatccggtttcatttttggcagcttctgcactcgctggtatgtcaacttctcgaatcccggcttcgacgccacggatccgcgctggattggcgcctggtggctggggcctgtggccattggcagcctcatgctgctggcctccatcgccatgttctcgtttcccaagcagttgagaggcaagcagaagccgccggggcagacagcaactccagcagctccagttgagccggaggagaagcccaagctaaaagattttcccaagacagtccgtcgccagctgagcaacgacatcctgatgttccgcaccgcctcgtgcgtgttccacctgctgcccatcgccggtctctatacgttcctgcccaagtatctggagacgcagttccggctggccacctatgatgccaacatgatcgccgccttctgtggcatcctggtcatgggcataggtattgtcatttccgggctcttcatcctgaagcgaaagcccactgccaggggcgtggccgcctggatcgcctttacagccctcgtctactcggcgggcatgatcatcctgatgttcatcggctgcagcatgaacgactttgccggctacaagccaagcgatggcaacagtcccgccttgatcgagcccacgtgcagtgccgctctcaactgtacctgtgataaggagaacttcgcgcccatctgcgccgacggcaaaatgtacatctcggcctgccacgccggatgcagcagctcctcactgcggcccagcgacaatcgcacactctactccgattgtgcttgcattccagatgctccggaggcggtcaacggttactgtgataataactgcaagaacttcatctactttatactgatctttgccatttgcgtatttatgcattccacctccgaggtgggcagcatgctgctcgtcatgcgctgcacacaccccaaagataaggccatggccatgggtgtgatacagtcggccatcggcctgttcggcaacgttccctgtcccatcatctacggcgcagtggtggactccgcctgcctcatctggaagtcggtgtgcggcaagcacggcgcctgttcactctacgatgcggacactttccggcaatatttcctaggaatcacggctggcattatgttcctggcattcctgatggatctggtggtgtggcgcaaggcgcatcgcattgacatcgcgcccgaggatccgcaggagggcgggcccgcttccaacggaaggaccttggaggtgtccgagtccaagcagcccatcaccccggcgccggacacgacggtctaggaggagcgggtcggcgacgagccttgcacaagctgcaggatttccaataaacgtttaccttaattgttaattagttatcatttgtctagtttgttagcctagtgcaagagttatgtatttagttaagtggcatcttcgagcgtcgggagacctcattcaaatccacattagaacgcgctcgtccagctcccgctcccgatcctgctccaaatcccagcaccatattctacatgaagcccatggattgcgatttgaatccttgtaaatctcaacgcgaaacaatgaaatgaaattctagacattatctaacgtcatgcatgagcgtagttaatcgacgagctaatactacaaactgatcgacaattgtgcaaagtgcaagaaaatttatgaatccttatgtgtaaactatatgtaacagttatatcgcgatgtatgtaatctataattaatatattagacatacacttacatgtatgtatgtaattgcaacctatctgtggtagttaaattttagttaaaattcaaattaattgtctaagtttgtcatacaacaaatatatacgaaaagaaattaaatggaaaactatatacaagtaat

SEQ ID NO: 16896 - protein, 819 aa, DROSOPHILA
MTKSNGDVEAAAQVQSLGGKPSNGHGQLNGNGYHQNGGRRDSSQAFTPLLSQHNNGTTNGEVTTPPPSTVLYESTPSNNNEWKAPEDLGHLKNGLGNILSSNNNGTGNGHSLSEKYAHEQAPLTGGYKLPPRSSESEESDFDSDLNGGSSAESSSSCGLFGCRPRWARRFASTHVFMVVFLLAYILQGMYMTYFVSVITTIEKLFQIKSKTTGILLSASEMGQICTAMLLTYFAGRGHRPRWIACGMVLFSIAAFSCALPHFIFGEQLMHSSVILQQTQVSPPNNSFSSHWLNASSEQVNPNLCILGGNQTHSGSECNEERQLEQASHSKITVIVLCIFFGSLLSSGIGQTAVATLGIPYIDDNVGSKQSPMYMAVTIGMRILGPASGFIFGSFCTRWYVNFSNPGFDATDPRWIGAWWLGPVAIGSLMLLASIAMFSFPKQLRGKQKPPGQTATPAAPVEPEEKPKLKDFPKTVRRQLSNDILMFRTASCVFHLLPIAGLYTFLPKYLETQFRLATYDANMIAAFCGILVMGIGIVISGLFILKRKPTARGVAAWIAFTALVYSAGMIILMFIGCSMNDFAGYKPSDGNSPALIEPTCSAALNCTCDKENFAPICADGKMYISACHAGCSSSSLRPSDNRTLYSDCACIPDAPEAVNGYCDNNCKNFIYFILIFAICVFMHSTSEVGSMLLVMRCTHPKDKAMAMGVIQSAIGLFGNVPCPIIYGAVVDSACLIWKSVCGKHGACSLYDADTFRQYFLGITAGIMFLAFLMDLVVWRKAHRIDIAPEDPQEGGPASNGRTLEVSESKQPITPAPDTTV

SEQ ID NO: 16897 - DNA, 11477 bp, DROSOPHILA
tttcctcataacttggctaaaaatgatcgtaaaaatgaaagaataactgttttgagcagctagttaccaatgctaacgaccaatgtcacattttgaaggatttaggaaaattaatttttgtccaaattttcgcatcttttgtaaattcgcatcaaaatttgcaaaaaatggccaaaaaatagaatttccatttttgaacacagtttgattggaaatttaattacgagctcaacgaggcataacattccacatttggaccattatttcgaatgttatggccaaaatacccaaataacatgctggaatttttcatgaaattgaaaaaccacgcagtttgctgcaaataatggcagattgatagacttgtcaaacattgcaaacacatttttattgtaaaacttgctgcgcgttcaactttacaattcaaacgtataatagtaatatataaaatagggtcattttaaatatacaaaagttaaaacaatcgaaagtgttgtcgctgtaaaatagctgccagtacaaaaaacaaatctgtatccgagcagcatgggttggcttactaaatggattggctgggtggtgtggcggggttaggatcggttttttgggtgcagttttggagtatctttccaaggtctcaacacatacgtacatccatacatacataatgtacatatgtgggctaataccattttaaattggcttgcatttcattttcaatcgaaacaaaacgaatacgttaacaaagctttttttttttttgggtggtcaaaaaaaatatatacatgcgtctgctgactaaaattatcgttgggcttgggggtcagaggtcacaaagaaagagacatcagaaagaggcaggatcgatcgatgtagagagagacggagcgagggcgctaagctgtgtgcgagcgagcgggaacgagaacgagaacggacgtatccagtgttgcagagattttggcattacaattaagtgattaggtgaatggccaccggtttaggagatggcgcactccatctcgccgtgcttcggcacacagtcgagcacaagggccaccgcccgggacatataggtcatggtaccatagctgccgctgggagcactgtaatggagatgtttactacgattagtacatgaactatcagtttagaaggcccgactcacctgtcatacagatgctggcatatgtaggcggcaccgccgcagagtagcataccggaggcggcctgctgctgctccttgccgtccttaatcttggcgcagcacagcgttgcatcgccctgcaccttgcgctgatcctcgaggaacaactgattggccttgtgcaccagatgctccacgtagatgacgccacccagcgacggcaccatattgtgctcggtaacgagtgtgagcaccattaaagcctcgaccaccagctgcctgtactcgggctgcggtatctggttgagggccgtctccacctccagcgcaaatttcagttcgcccggcgtcatctcttgcgtgagactctgctgcaggacacgtccctcgatggccagaccctggcacttctccagtacggtccacacgcgcgaatagaaatcgcggggcacacgattgagggcgccgtccagacgtcgccggcgcagccactgaccttggcggtcgtcaatcgtggctatgagggcgtcttcgccctccggatcacccaggccgatttggctcttcttgctaacgcgactgctcttgcagctcacaatggacagattgccacgggcgactgcaatgggaataaatagtaagtttggaattgttttgaactatgccagctacgcaccgctactaacagcaaactccttgccgctgagtatgtgatacagtagatttttcatctcgaagggcgagaggttaagtaaatgctccgacgccgcctcgccgtcgcagttgagggtgcgggacagctccttggccattacctggatgatcaggccgacgcgcaggcgtagcatctcgtggaacagctgcggctcggtgcgtatgaacatggccagatagaccatcaactcctgcgtcaacatcgccgtactctcatcgtcaccataggcctgattgaacagttagcacacaagttagtggatatattccataccatattggattactcacatcgtggattagctgacgcagctcgacttccggcagcggcgccgtaatggtgtgctcattatttggtggcattcccacggtgacctgcttctgtcggacgagcagatctgttaccgctttggccaaatcctccacacgtttgcccagcatgccggccgtatgacggacgagtccccagagcttctgttggcatgccttctcgtagagtcccttcaacagatcccgcacggtcaccacgcgtccctcttcgagcatgccttcggattgggaagaatcgtggttattctcatgtgggctcatgttgttgtgattgctgatgttgctgctgctgctgctaatgttgctagtattgccgatgcaatggctattattgctgttggcggtggcggaactcggatgggcggcattatccggatcggtgccggtgccggctggaatagtagcagcatcgatgatcaccgtgggcaggacaatcgttggactcttcttggccccatcacctccacctgcacctgcacctgcgccaccaccaccatcagctagttccagcaccgcatcatccacaaacgcttgctcgagctctttagtttttttttttttacggtggtttcaattccgttttttgatttgaatggattggttggttagtcgggttaggattggtgtacggattgggggttttaagttttgattgagtttggcgtacaaaatgtggaatttttgtttatattttgggttagtgtaagtggtgagcgcgaggatcgtgcggtacgttagatgcgtggtcggtcgaagaaagtaaaaaaaaaaaatgttaaagaatttaagtacgttagaaaaacatggccaaaatgtgagattaataatgctaggctaagacataacttaaagcagagcggtttgtgtgtttaaatacagtggaacttcttgtaattacaactaaagcaattggatatttaatcataaatgaagttcgactgtactgaaaccatagtgaaactattattgtttgaaaatgataaagtataaaagcaataacccaaagcaaagcgatgatgcaattcagatggcatgtcagttgcgaaaaatggtacacatatcacaccataaaaatagaagaaaaaaaaaaaaagaaacaaagagtggataccatgggttggggtaacagttacatagagaacacaaatcgataccaatgtcaatcagtgggatcagtgtagtatacaagtgtatggagtcgggaataggatgtggaaagtggtaggtaaccatgggataccgtagggatttcaatggatacacgtacatatgtatagcccgcacaacaacaacatacaacacaacgacgaattgacgaatcgacggacttaccggcgttattcgcattcggagtggcattctcctccgacttattcttgaatcccaggccggctgttaagcgccgtgcagcaggagtacggtacgattacggatacggaggacggagaacggaggcacgagacaaaaacgacaggagtacggggttaaaaacaacggcgtgagtacagtaaatgccaaataaatggtacaatgaccacacttttagctccatttcaggattagttacctatcatcttaagatctactgcaacagttaagagttttcaaaacccctgctttgtatacatagatattattctcttaactgttgcagttttaacctttgggtttaaagtttttaaaattaatcgagtgttcaaaggtgagagcgtgtatttttggcaagtgcaagtgcttttttctttttttttttgtggcaattgttgagcagttgtgtgtaaaatgttaactaaatacaggttgtgttctctctctatctcaacccattgagaatcgaacaatccaattgcgaagcaaagctgccccagaacctagtttaaagtgaaatgtggcagcgttgattagaaatttgagagcttacccgtattgaagtccagaccctgtgtgtccaccaggtactgtaggatgtcgccctgctcctcgagattctccgtttcgcgcagcatcgcaatcagctcctccacttctgtgtccgcgaaatttgtttcggcacgatggcgttgtattagaatttttggcactgttactatcaaaatcgcaattcggaacgatgatggggccaatcgaaattatacatacaaaaaaaaatgaatgaaaacagaaggcaagagccaaaacgaaaaattagcaaaagtatagaaatcaagagaaaatattaactcaactaaactaatacattgattgatggcaaatcattggcattgcaaatgtgaaacaataatttacattaaaacctaagattaactataaaggcagactaactctcttgctggcgcacaaactcgctgcgtctgtcgatcgccgagcgactgtggtgcggatccaccggatagatattctcccggattagatcgttgcccaggctcagcggcgagctggtgggtccctcctccggcgtcgtggcgaacacactgacgtggctctgtttgttggcctgcagccatggtggtgggacaatcgaggacaggcgacgttccgtcagcggagaaggtccctccatgcccaggttatcagctgaaatacgcaaaaaaaaaaaacagcattagtattcagtactacgatgtggtatcaaaagcaatcaatcactcacaatccacgttgatggagcgcgtcttcttgatggctcccttgcaggacatgcgtcgcctcaatgttcgcggacgcaattgtccgccgcgcagattcatggtgctgcgattgctaaacgagcgcagcagatgctcatccaaataggtctgcacatccggatgcaggcggtccggatagccatcctcggtgctgcccaaaaagctcagatccgtgatggccgaggtgttgagaaagtccttcaggctgcccagcattacgcgtgtgccattgatgtagcccgatttgagtttcctcatcgtctggatcatggccagcgggatcttgtcctgatctgtgaaattccgcagcgcatccaatacatttgtgttagcttttcggtttttcacattgtgttcggttcatagcaatgaatatgtgggtctcatgatctggttgggatgctcggttgtggattggtttaggagcgccgcttaaatactacgggttagtcacacaaaaaaacaacatagtaaccgatagatagaagcacacgattccagccaccattggcaattagtctgcgtttcgcattttcagttaggtgcacaaggcaaatgcagtgcaaatacttaaggaaatgttttaatcacaggttggggttatttacgcaaagtagtaaataaagttattagcattaaagtagcactgtttttttttggaatatgtccgttttcggtctgtggcgtaatagtgtatagatgatagctcagaagtccagaaatcccaggatagcttaggcgtttttagcacagcagccaaaatggctatatcttgtggaaaatgattgaaaactaatggaagattgcaagctctataatttgttttgatctaaagatgattttcacaagatattggtgtatatagagtgtagaggtgtttaaagcatagtatttacactgagaaaagcgagcagaaagagcggaagcagtcaggccattttttacgaagcagacacaagcgggggtcacaggtcacagatcaaagatcacagatcgtaatatcaattgtttggctttttttttggtgtgtgtgtgcaggaaggtacatatatgtatatatatgtaatgcagtggatttcttggaatcgagtgttttttgttttgtttttttttttttccatttttgggtgcaaagtgggaatcggatttcgatttgggatcgggtagtttttttttttatttcgggtagttacctagcatatagtgggttgccattagtgtgattgtcggcctgcccaacatgtgacgccaattgttggtcaagaatgctaaatttgtggtaaaattgctggcaagcaaatcgggatcgcgtgttgtataatattcttcatagtcgatatgctgtgtatttatggttgttgttgttgttgttggtgttgcagttgcagttgttgttgttgtgtatatttattatatttattttgggataaaataaagagaagaaaggatgttttttgattttgattttcattctcaattttctttcaacaatttcattggccaattttcggagatttcgggggcatgggaatgaaaattatagggtaatacaagtccagagcagagcgttgataaatcaaatagctaaactaaagctacatttaacaaaaaaaaaaaaataataatatatatgaggtttcaacaatcgattggaatgtttgaaaggcgttcaaagtactagtaatcagaccgccattgtatgtacaaaatatttatggtaaaatatgtgtgattaactttagatagtatgtagcatatagtatatagcatatatatcatatagcatatatatagcatatatatcatatagtatatagtatatagcatatagcatatatggtcgaatatgtgcgtaatattaccataaccaaactatagctaactaaaagcaataaacaactaaaaagcggacagtaaagtaactaatttccagaagcagctgcccaaaaccggcaataaacttaagttcagcaacaattgaaggtttccaattcgttttcgaaagacaaagcatttgaagagtccaaaaaaattgcagatcttgagcaaccgattcggttcaaattgagttaacgagtcgcgagtgtgtgtgtgtgtgtgtgtgtgtgtgcatttgtgtgtttcgagtgtgcgtgtcaattaattgataaacaataccaataccaaaagcaaacccttgcaaattaaacaattcaacaaagcaattcacaaaaaagatatgcgaagagtacaacagtcgtgtgtggaggggggaggtggagcattaaaaaaaaaaacccgcgcacaataaacataataaaataaatcaaaagtaaaaaaaaaaaaacaaatagtaaaataaagacatggagtgaaataaacgatgcacggctctctctctccgttgaccgacctagatggatgcgcttcagcaccagggtgaccagcggacgacccagcagatcccaagcggacttgaggaaatttatctcgcccttgaggatgtcgatcatgagttcgttatcggaggcgatatagaagcgcgacaggtcggcaaactgatgcgtaataaacgatagaaatcataagtcaatcttgcagtcaatggatgcaaatcgatctataacataaacttgggtttctctacaatgacttgaatagtaacaccctctttatcgaactttttcaatatgatttatccaggcttagcgcaattctatgtattttccaagctaaaagagtatagttaattgtttaataagcttttctcaaagctacaattgttaatagatattattaggtactccttaaaacccaagccattacgattcccatgtctagagcggtttgcatccctgaccgaaaatacagtggataatatataaaaacatagagcacatgggagcatggggcaaatctgtgggattcagaggagggggctggccggtttgcttggataatccgagaggggccaactggacaccattctcactcacctgcggcgtgaaggcaaatatgcgatccttaagcgagtaaagcttactggtgctaaggatgcccacatcacgtgactttctgccgctcaaacccaatttccgattgcgtcccaaataggtgtacagatgactcagaactcgggcgggctgcacctcaatgggcgccacctctgcgatcgtctgcacgtgcagatcgtgttcggccagcttgtcgcggatttcgttgtcctcggcaatgatgaccacttggacgacgacgtccggcttcttttgagcgcccaggcgacgattcaatggatccaattcgcccacagccaggaaaccctaagcatataataaaaagttcaattaaaatcaatgcaaaaagataaggaagaaattgcactatcaaatgccctcagctgtgcatctaaacacaccaaagcgttcatctatctttagctgagaactacagcaatagaaatgctcacctcctgcagcaatctgccgaggatgaatagggactggccccagaggaacggacaccggccgaccacttcgcggacctgcgatcccggcttctgatactcgaagcccaccagatcctgcggcactgcatagctctcgggaacaagtagaatgccatcttccgaacgcaccatgatcttctccaaacggctggcgtactcctccaccgcccgcttgtcgctctggaaggcgtggaacaggattaggtagcagtagaatagcggccactcgcactcgatgttctcgaacatgcgcagctcccagcgctcgtagtatagcctcgagggatcctccttcggtgtgcgatagccatcgcgcaagaatctcttgcagccgtacttgccctgcagacgggatagaatggcatccttggtgttgtgtatcagctgggcatcgtccacagcaaaggcgggaaagccgatgacgcacagcagaccggaatccaattccttgctattcgactcgcgcggcagcatcgactgcagcaccgcctggcatttgtgggcctcgtcggccagcacatggatgacactagccggaccgccacgggctccgaacagatccagctcgttcatggcctccagcgccgccttggccatgccaatggagctggcattcagctcgggttcacctggaatatgcatatacattaacttttatctaatcagatttatttaattgcaaaatgtgattatgctgatttcactactttatgcgagtgataagataatgagcttattaatcttattttgcgttactattttatttcaatttgaattgaaatggtaataaacaatttgagagataagaatgtatacaaaaatattgctaagtcacaacccatttctttagcgcactatacaatatttatttataaataacatatgctcaccatgattggttttatcgccgcgctcccaaatgccatagtcgggaatcgagtacgctgactcgatgtagaagaccagattctggatgaatgacacctcgtccagggagaagacgatctgcaggccggaggccgtcatctgggccaggatcagcaggtacagggacacggcatcgatctgcagatgaccccactcattgtcatcgaccacgggcaagccgttcttgctggaatacttggcgtgcagcgaatcgtacgggctctgggtcatcttgaacttctctaccttgtccttctggttcatcatggccatgagcaggccacgcattagctttacacagctctgctccagctcatagcatttggcccgatcctcgtcctgatcggcaatcttcttgtacgccatggacaagccccaaacggccaagatgcagtacacattgtccctgatccaggcgtgcgagttcacattcgaggcgggaaacagaccggtgaccggttcctggtgggccaggatcagacgatgcacaatgcgctgatagtagtccaaacggacgcccgaattgctgcgagaacgcatcgtggatgtggataccttgccggtaagttctgcaaatggttgggatatattgtaagtatggtacagatacaaatttatgtttctattatatacatagatattaactatcttggattgcctacgtttctatagaatctatagcaatactttagctgacaagcatacatatgatcttgattcccttgcttatcgacatacatacacatacatatttgtttacaacgttggttattagagtttattttgattctagaaaaggtcagctgcgagggctatataatatgggattactgctgcttgggcgtatggaatagggtgccttcgatgatatgattgttgtttaccatccacgacgcgggcacgctcaacttacataatatcagatcggttgggatcgctgtggatcgtttgttgtggttcggcggagtggaggaggtggtgctagaatcccagagctcctcggaacacctcgcggccgctagaagccgttgaatccgtggaattcgccgcgaggacagcgcattctctccgggatgcggcggatggcggtgtggaccgttgccgttcgagtttcgacgttgggctgctcacttatttgcgaataaatcgaataaaattgcaattaaactaatgcaactaaagtcaactcaatgtcacacagtgtgaccagcgtgcgtgcggacgataaagctgctctaaaaataccggcgaaatactgtttttcatttatattttgcgtagtgaacaaatttgcaagtttaagaaaacataatttggaataatatatgtaggcagggtgacagtcaattactgttacatttaatcaagtaccttaggattggttatttcttaaatacattatttgcattcctattaatttaacggaattcaacggagtggtataacactacaaaaaaggtccgctagaaagcttattggcaaaagagggtcactttattctttgattataggcgccaaaaagatggtcatcatattttaaaagtttctatcatactattgcttattttgtattatattctagatccggaagccagtatccttgctccctcggcttataccttctcccgcatggatgcgcacgtgaagagcaatcaaaccatcgccgtatgtggtcacaccactgatctttcactgaccaatctgtgattctggatcggatgtgtgctgattgaggttcctccaagcgcacttatgccaaataacccgtaattacacattcatgtttatgtcaagatcctgtgattattattgaaattctcgccaagttgttggagtagttaaaaaaaacgtttgtttggttggtgaatggtgaatagtgtttgcaatgatgatgatgacgatacaacgatgattggtaatcctcacgctaaagcttttgtctaatcgcgcttgctgcgcttgcgatccgaatggctgctgcgctcgttgttcttctcctcggcacgcttgggcgcctttttggccatgttcaagaactgatcgagaccgaagggatcctcctccttctcgaactcaacgggtccactcctctggccagcggccgcctccttggaggcaccggagaactgcttgtctggcacgaaacgcttggtatttacaatggcatccagatcaccgccgtagttat

SEQ ID NO: 16898 - DNA, 3994 bp, DROSOPHILA
agttgactttagttgcattagtttaattgcaattttattcgatttattcgcaaataagtgagcagcccaacgtcgaaactcgaacggcaacggtccacaccgccatccgccgcatcccggagagaatgcgctgtcctcgcggcgaattccacggattcaacggcttctagcggccgcgaggtgttccgaggagctctgggattctagcaccacctcctccactccgccgaaccacaacaaacgatccacagcgatcccaaccgatctgatattataacttaccggcaaggtatccacatccacgatgcgttctcgcagcaattcgggcgtccgtttggactactatcagcgcattgtgcatcgtctgatcctggcccaccaggaaccggtcaccggtctgtttcccgcctcgaatgtgaactcgcacgcctggatcagggacaatgtgtactgcatcttggccgtttggggcttgtccatggcgtacaagaagattgccgatcaggacgaggatcgggccaaatgctatgagctggagcagagctgtgtaaagctaatgcgtggcctgctcatggccatgatgaaccagaaggacaaggtagagaagttcaagatgacccagagcccgtacgattcgctgcacgccaagtattccagcaagaacggcttgcccgtggtcgatgacaatgagtggggtcatctgcagatcgatgccgtgtccctgtacctgctgatcctggcccagatgacggcctccggcctgcagatcgtcttctccctggacgaggtgtcattcatccagaatctggtcttctacatcgagtcagcgtactcgattcccgactatggcatttgggagcgcggcgataaaaccaatcatggtgaacccgagctgaatgccagctccattggcatggccaaggcggcgctggaggccatgaacgagctggatctgttcggagcccgtggcggtccggctagtgtcatccatgtgctggccgacgaggcccacaaatgccaggcggtgctgcagtcgatgctgccgcgcgagtcgaatagcaaggaattggattccggtctgctgtgcgtcatcggctttcccgcctttgctgtggacgatgcccagctgatacacaacaccaaggatgccattctatcccgtctgcagggcaagtacggctgcaagagattcttgcgcgatggctatcgcacaccgaaggaggatccctcgaggctatactacgagcgctgggagctgcgcatgttcgagaacatcgagtgcgagtggccgctattctactgctacctaatcctgttccacgccttccagagcgacaagcgggcggtggaggagtacgccagccgtttggagaagatcatggtgcgttcggaagatggcattctacttgttcccgagagctatgcagtgccgcaggatctggtgggcttcgagtatcagaagccgggatcgcaggtccgcgaagtggtcggccggtgtccgttcctctggggccagtccctattcatcctcggcagattgctgcaggagggtttcctggctgtgggcgaattggatccattgaatcgtcgcctgggcgctcaaaagaagccggacgtcgtcgtccaagtggtcatcattgccgaggacaacgaaatccgcgacaagctggccgaacacgatctgcacgtgcagacgatcgcagaggtggcgcccattgaggtgcagcccgcccgagttctgagtcatctgtacacctatttgggacgcaatcggaaattgggtttgagcggcagaaagtcacgtgatgtgggcatccttagcaccagtaagctttactcgcttaaggatcgcatatttgccttcacgccgcagtttgccgacctgtcgcgcttctatatcgcctccgataacgaactcatgatcgacatcctcaagggcgagataaatttcctcaagtccgcttgggatctgctgggtcgtccgctggtcaccctggtgctgaagcgcatccatctagatcaggacaagatcccgctggccatgatccagacgatgaggaaactcaaatcgggctacatcaatggcacacgcgtaatgctgggcagcctgaaggactttctcaacacctcggccatcacggatctgagctttttgggcagcaccgaggatggctatccggaccgcctgcatccggatgtgcagacctatttggatgagcatctgctgcgctcgtttagcaatcgcagcaccatgaatctgcgcggcggacaattgcgtccgcgaacattgaggcgacgcatgtcctgcaagggagccatcaagaagacgcgctccatcaacgtggattctgataacctgggcatggagggaccttctccgctgacggaacgtcgcctgtcctcgattgtcccaccaccatggctgcaggccaacaaacagagccacgtcagtgtgttcgccacgacgccggaggagggacccaccagctcgccgctgagcctgggcaacgatctaatccgggagaatatctatccggtggatccgcaccacagtcgctcggcgatcgacagacgcagcgagtttgtgcgccagcaagagataacagtgccaaaaattctaatacaacgccatcgtgccgaaacaaatttcgcggacacagaagtggaggagctgattgcgatgctgcgcgaaacggagaatctcgaggagcagggcgacatcctacagtacctggtggacacacagggtctggacttcaatacgggcatgctcgaagagggacgcgtggtgaccgtgcgggatctgttgaagggactctacgagaaggcatgccaacagaagctctggggactcgtccgtcatacggccggcatgctgggcaaacgtgtggaggatttggccaaagcggtaacagatctgctcgtccgacagaagcaggtcaccgtgggaatgccaccaaataatgagcacaccattacggcgccgctgccggaagtcgagctgcgtcagctaatccacgatgcctatggtgacgatgagagtacggcgatgttgacgcaggagttgatggtctatctggccatgttcatacgcaccgagccgcagctgttccacgagatgctacgcctgcgcgtcggcctgatcatccaggtaatggccaaggagctgtcccgcaccctcaactgcgacggcgaggcggcgtcggagcatttacttaacctctcgcccttcgagatgaaaaatctactgtatcacatactcagcggcaaggagtttgctgttagtagcgtcgcccgtggcaatctgtccattgtgagctgcaagagcagtcgcgttagcaagaagagccaaatcggcctgggtgatccggagggcgaagacgccctcatagccacgattgacgaccgccaaggtcagtggctgcgccggcgacgtctggacggcgccctcaatcgtgtgccccgcgatttctattcgcgcgtgtggaccgtactggagaagtgccagggtctggccatcgagggacgtgtcctgcagcagagtctcacgcaagagatgacgccgggcgaactgaaatttgcgctggaggtggagacggccctcaaccagataccgcagcccgagtacaggcagctggtggtcgaggctttaatggtgctcacactcgttaccgagcacaatatggtgccgtcgctgggtggcgtcatctacgtggagcatctggtgcacaaggccaatcagttgttcctcgaggatcagcgcaaggtgcagggcgatgcaacgctgtgctgcgccaagattaaggacggcaaggagcagcagcaggccgcctccggtatgctactctgcggcggtgccgcctacatatgccagcatctgtatgacagtgctcccagcggcagctatggtaccatgacctatatgtcccgggcggtggcccttgtgctcgactgtgtgccgaagcacggcgagatggagtgcgccatctcctaa

SEQ ID NO: 16899 - protein, 1229 aa, DROSOPHILA
MRSRSNSGVRLDYYQRIVHRLILAHQEPVTGLFPASNVNSHAWIRDNVYCILAVWGLSMAYKKIADQDEDRAKCYELEQSCVKLMRGLLMAMMNQKDKVEKFKMTQSPYDSLHAKYSSKNGLPVVDDNEWGHLQIDAVSLYLLILAQMTASGLQIVFSLDEVSFIQNLVFYIESAYSIPDYGIWERGDKTNHGEPELNASSIGMAKAALEAMNELDLFGARGGPASVIHVLADEAHKCQAVLQSMLPRESNSKELDSGLLCVIGFPAFAVDDAQLIHNTKDAILSRLQGKYGCKRFLRDGYRTPKEDPSRLYYERWELRMFENIECEWPLFYCYLILFHAFQSDKRAVEEYASRLEKIMVRSEDGILLVPESYAVPQDLVGFEYQKPGSQVREVVGRCPFLWGQSLFILGRLLQEGFLAVGELDPLNRRLGAQKKPDVVVQVVIIAEDNEIRDKLAEHDLHVQTIAEVAPIEVQPARVLSHLYTYLGRNRKLGLSGRKSRDVGILSTSKLYSLKDRIFAFTPQFADLSRFYIASDNELMIDILKGEINFLKSAWDLLGRPLVTLVLKRIHLDQDKIPLAMIQTMRKLKSGYINGTRVMLGSLKDFLNTSAITDLSFLGSTEDGYPDRLHPDVQTYLDEHLLRSFSNRSTMNLRGGQLRPRTLRRRMSCKGAIKKTRSINVDSDNLGMEGPSPLTERRLSSIVPPPWLQANKQSHVSVFATTPEEGPTSSPLSLGNDLIRENIYPVDPHHSRSAIDRRSEFVRQQEITVPKILIQRHRAETNFADTEVEELIAMLRETENLEEQGDILQYLVDTQGLDFNTGMLEEGRVVTVRDLLKGLYEKACQQKLWGLVRHTAGMLGKRVEDLAKAVTDLLVRQKQVTVGMPPNNEHTITAPLPEVELRQLIHDAYGDDESTAMLTQELMVYLAMFIRTEPQLFHEMLRLRVGLIIQVMAKELSRTLNCDGEAASEHLLNLSPFEMKNLLYHILSGKEFAVSSVARGNLSIVSCKSSRVSKKSQIGLGDPEGEDALIATIDDRQGQWLRRRRLDGALNRVPRDFYSRVWTVLEKCQGLAIEGRVLQQSLTQEMTPGELKFALEVETALNQIPQPEYRQLVVEALMVLTLVTEHNMVPSLGGVIYVEHLVHKANQLFLEDQRKVQGDATLCCAKIKDGKEQQQAASGMLLCGGAAYICQHLYDSAPSGSYGTMTYMSRAVALVLDCVPKHGEMECAIS

SEQ ID NO: 16900 - DNA, 6361 bp, DROSOPHILA
aattgacaatttggctagtgtaaaactagccattaaagttttatttgctttagcacttgagaaattgaggctggcctggccataacaggcgaatgggtcaattggcatgtgacagcaagaagctgcaagctgcaggctgcaatttccacagacaatgcaaattgacgtcttggaaatatgagtgatgtgacaagtggatgcttatctgcggctcgacgcccctgttttttttcgaggggcttgcctccttcgtctgatgagcgcccattgaaatttatgacttcgtcgaaccgccaattgattggcttttaaatatccaaatgaaggctgccaatcgcgaattgtgcggccgtaattaatgtacaaaaatcatttgaacgcacgccccaaagcaacacctgcagctgttggtatctttatttatggaaagcttttaacacttttaattaattatgggatggaaaagttggcggcttagctatgttgcaaatttatgacactacaaattgataattgataagcaaaaatgctatctaaatgctaatttctcgaaaagcatataaaactagagttaagtggtatttaagtattgcaatgtacaattaatatattatatacaatcaactacaaggtgcgtaattgaaaggtgcgcagacatcatattattaagtagtagttgaagtattattttcttcgatttgatacatattcattgcgcagtactttattctttaaaacactattattttaaatatgactcattaaaataataaatcataaaagaaatacctattttttaatgtccttcaatggtagtttttactgtgcgcgattgaaatctcagcctgattccgaatttgtcagagctttccggcgaagatctcgcacgcatgggcacaaagctcgacaaagctggagagacgctctccaaaccgagcttcgcgcggtgccttcgcgtgacgcaggcggagctttcgacagtctgctcccacgagtgacgtagcgcagtatagaatgcagaacgtaacagaatcgtaatcggagccgcatagcataccgctaattagaagatagatgcccttttcatttaatcgtatctagctgcgatcgcttaaaccggcgccaattgtattcaaagttccgtaaccgaaagctttcacctagagttcttgccgtggggttattaaactcagaactgccggtcagagaaaaggagactttgtgtgacaggtgagttcattatgtacatatgtatctgttttcctaagataagcataggtaaataatggcgatgtggggtacatatgtttatatttaatttcaaagtattttgtaaaaggtaagaccacgcggctttgaaaggcaagcacaagttatccaaaaaagcttttccgtggatgtgcatcttattggtgcttttctacgtgcagcaaagcaagcttttattcgccagagcgaaagttcttggggtcactctaggttttcttttattccaagaaagaaaataagaaaataaataagatatatgtatgtacttattttaatggttttctaaactagagcttattaataaaatgataaaagaagcaataaccttaaattaaaatgagtgattttatccaattttaaaataatatttgatagatgacgaatacgataaccactcttcggatttgccaggctgtgtcgctaaatcctagcgcgaatgggccggaaccagtattgccaccttcctccaggatttgtctgatgggttgccaggatgtaaagcccaatgatctgcgtcgttttccagtccacgataccgatcggtgagtattatacacatacatacatacatatgtaggttcctcctgccaagaaccacattaaacctgtttttagagcctacggagagctttccgatcgattcgatcaccgaagcttgtttttgttgcgaatcacaagtgctcattctatattttaaacaccataccattaaagccataacaatccaaagctttggaccccgctcggtgctcctcttcttcgtctgataccgataccgatactcgcagtcaaaggtcattgaactttcgccctccctctctttctctgtctctgtctctctgtttttttctcggttcgcataaaagtgcatcattttcataggaatatttcaatgccatggcggctaagaacttgtgcagtgcagcaatcagaaatgcaataatgccgatgtgggcggggcagtgggtgggcgggggataggtcccagattccgactcccatttatttatagctctcacgctctcctgtaaatgcaacaaatgcgcgtggggctctgctctgctggccgtgaagtgaagttattttgtgtttctttgctgcttcttcatctccagtttctgcagttggtgcgcaaaaaaaaaaaatagagttccgtctgccaaagttacttggcattggccatggagtttagagtggaccactgttaagcgaattcttcctctttccgaggaaaccccagaatgttaagctttatttattatcaaggaaagctcatattttacctttcgtcggtattatcactaaatgtactttgagaccaaaaaagtgaaagtcacttttataagcaaaatcgaaataagaatgacgtttgctaagtttaattataatagttggttatctaactgtagtcattgagttccgtttaaaaattttcaagatatagtatgaaattttaaagtgaattatgacaataattttaatttcacacagttgtacgttggttttgtaagttaagcataaaccattcttatgaaaatggtttcaagcgattaaaatttatttaaaacttggctagtaagtcagattaaatatggtatgagtaggcaaatgattttgctgtccctgacctgcacaataatttcgcattcggtccaccctaaaggccttaattgttgttgttgtttcgcctagccataagcataaggcaaaaagaaaataagcctcattcccccatcttccacaaatcggcagaaacaacaaaaatagggggaagttgagcagaagctgcagcaaaagcaacagcaacaacaaacaataacaattccccgcgaaacttccgctgagcgagaaggagcgtacgaaagcgttgcttctcgttcgcactcgcaaaagaagcataaaaagagcttaattgcagcgaaaactttttcaagaacttttccaagagagagcgataaagagagcggagagcgaaagtcggatctaatttgaaagcgtcgcaagaaccagaacgaaactccaatgcagtttcattttgtcagtttaatcattaaacaaagaactgcgcaaccgatcgcaactagctcgtggactcttgttctcccaataattggtatgttttccattttgcgttaacatggaaaatgtgtgaaaagctttttccccctccaaaagaagcgtactgaactaagctttcggtggttagtaatagtagtcgttatatcttatttttcttatttacgtgcagctgcaatcattggctgcgtcactttggcgtcagctataaactggtggatcaactcggcggcctccaaaagctgcgcatctgctccagacactttagccaacgccaggagatggccaaaacccgcatcaagatgacgccgctgcgcaagtcctcgtcctccaagggcattgtgctacccattaatgccgctggagggtcggtcattgcaggcgccttagcaggaggaggaggtgcaggaactgggagcggtgctgtcaagtcggcggtggccagcagcaccaccattgaacttgttgaggtgagtggcagcacaaaagaaaacaaaagttcagctttcataggggttggtaattgacccaagctaaatttcagttcagacagaaattatgttttagactccgtaacgcaattttcgttgtttattaaccaattgaaataaatcgtataggtatttgagcattaaatggtattccaaaaacgggcatgctattagagttagtttaacaacaatacaagcatgtcttaaaaaaatacgtacaaagctatttattccgtaaaagtttaattttttataacgaatagcgacagatcctgaacttttaaaatttcagagaacccttcaacgttctttctctttaaatttcatattttaaagatatggttaaaactgcttgtatgcatatataaatatataccactataaatgtattttaatgaaccgcatttttttgcagagccccaatagacatcaggccaagaagcccaacaccggcattatgcccatgccacagcgttcccactccattagctcctcggcctccagcgatgtgctgtccataaactccgactacgaagcctcgttaccactatcagccttagaggattcccagaatggactgaaccgcttggagaacggtcaagccaagaagaggaaactgtacgtgatcaccgaaaaatcggatgagacgaaaggtcagactctggagacaaatggacagcccaagaagcgtaagatgttcgtggttgtggagcaggataaagatgtggcgggcaagaaactaatgattatggccgacaagccgcagaccaatcttacccagcatttggagaaactactgcccgagctattgaatcgcatacaggacaaagaacagaagcagatcaaaccagctccagtggtgactaaagccaagccggtggttaacaatcccagaccacatataacattgccgcccaaaaagaatccaactaattttgcaaagatcacgtccacaccaagctcagtgccttcatccattcagatgccactgccaattcagaataccaagatcctaaagtccgagaattcggaactgacaatgaattcggatgagatcgagacgaacataaatctatcgcccgacttccgcttcctaatgaaaatcctacccaaattggaacagctgcccgagccccacaagcagaacgtgaagcgttccatccagatcttcgtggagaagagctacagtatttacggcaacaaggattagttatcagtattttcgggcacagcgtttattttccatttcatgtgaagcagttccctttattttcgtacatacacatacatacatcaaaggcatttcataactttgtgtaagactgaagcagaaccaatttaatttctaagccaattgtaagagctgaagcagctccccatttagacatgtaagcttatcagaaatttgatattacccacctggagatgggtagattttgtaaaagttgagccataaaaacgaattaagattgaatttctttctatattgaatatatgaaagcttgatttaagccagaaagataaaccgtctaagagtcttatttttgggataagaaggtatataacgaggggatattaccacgacccacaattaataacactagtgtttttttcttatctttttggttttttttttttgcattgtaattccaaagaactttatttagtttgaaagcatttgtttacggtttctcttcttccatatttctttcttttttttttttagttacgttataataatatttagtaagtctaatgcggttttatttagtgtggtttagtttagttaatacaatggttagtgtgtctttacgatttccatgtaaattatgcagcttcacttcgtcctggagaaaggattgcatttggtaatttacaattcttgccggcccatttaccactacacgtgtatgttttgggtctcagtttcgttttaagttagtatatccgattaatgtggttaatacattacatatatacagttaaacacttcatgtttaatttagcttgcgggtcaaggaaaccaaattatgtgtaaagtattagggaactttgttgcgtgcctttactggatgaggatttctacatgattggagtgactccatttcgagtgctacattataatcgagtaatatatactttttacaacatttagcaaattttcccgtacacatacaataactcgtatatcatatttttgcgttaagcatttgccatcgatttttttttagagggtatagggtgtgttttatatggttttaaatcgtgtttgttaactacgttttggagtgtcctacattatagcgtttgcctttttgtcggttagcgtatcgagtgtttttacatgctacttataagaaaaaatatttgccttaatgttgtcctacgaaacagttatgtcatcatcatcatcaatgagaagcaatcacaaagttttctctaaatttatatacgacgattattactattatttatcattttctttagtatttacataattttttggagtgcacaaagcagccagc

SEQ ID NO: 16901 - DNA, 1805 bp, DROSOPHILA
tagcgcagtatagaatgcagaacgtaacagaatcgtaatcggagccgcatagcataccgctaattagaagatagatgcccttttcatttaatcgtatctagctgcgatcgcttaaaccggcgccaattgtattcaaagttccgtaaccgaaagctttcacctagagttcttgccgtggggttattaaactcagaactgccggtcagagaaaaggagactttgtgtgacagatgacgaatacgataaccactcttcggatttgccaggctgtgtcgctaaatcctagcgcgaatgggccggaaccagtattgccaccttcctccaggatttgtctgatgggttgccaggatgtaaagcccaatgatctgcgtcgttttccagtccacgataccgatcgctgcaatcattggctgcgtcactttggcgtcagctataaactggtggatcaactcggcggcctccaaaagctgcgcatctgctccagacactttagccaacgccaggagatggccaaaacccgcatcaagatgacgccgctgcgcaagtcctcgtcctccaagggcattgtgctacccattaatgccgctggagggtcggtcattgcaggcgccttagcaggaggaggaggtgcaggaactgggagcggtgctgtcaagtcggcggtggccagcagcaccaccattgaacttgttgagagccccaatagacatcaggccaagaagcccaacaccggcattatgcccatgccacagcgttcccactccattagctcctcggcctccagcgatgtgctgtccataaactccgactacgaagcctcgttaccactatcagccttagaggattcccagaatggactgaaccgcttggagaacggtcaagccaagaagaggaaactgtacgtgatcaccgaaaaatcggatgagacgaaaggtcagactctggagacaaatggacagcccaagaagcgtaagatgttcgtggttgtggagcaggataaagatgtggcgggcaagaaactaatgattatggccgacaagccgcagaccaatcttacccagcatttggagaaactactgcccgagctattgaatcgcatacaggacaaagaacagaagcagatcaaaccagctccagtggtgactaaagccaagccggtggttaacaatcccagaccacatataacattgccgcccaaaaagaatccaactaattttgcaaagatcacgtccacaccaagctcagtgccttcatccattcagatgccactgccaattcagaataccaagatcctaaagtccgagaattcggaactgacaatgaattcggatgagatcgagacgaacataaatctatcgcccgacttccgcttcctaatgaaaatcctacccaaattggaacagctgcccgagccccacaagcagaacgtgaagcgttccatccagatcttcgtggagaagagctacagtatttacggcaacaaggattagttatcagtattttcgggcacagcgtttattttccatttcatgtgaagcagttccctttattttcgtacatacacatacatacatcaaaggcatttcataactttgtgtaagactgaagcagaaccaatttaatttctaagccaattgtaagagctgaagcagctccccatttagacatgtaagcttatcagaaatttgatattacccacctggagatgggtagattttgtaaaagttgagccataaaaacgaattaagattgaatttctttctatattgaatatatgaaagcttgatttaagccagaaagataaa

SEQ ID NO: 16902 - protein, 419 aa, DROSOPHILA
MTNTITTLRICQAVSLNPSANGPEPVLPPSSRICLMGCQDVKPNDLRRFPVHDTDRCNHWLRHFGVSYKLVDQLGGLQKLRICSRHFSQRQEMAKTRIKMTPLRKSSSSKGIVLPINAAGGSVIAGALAGGGGAGTGSGAVKSAVASSTTIELVESPNRHQAKKPNTGIMPMPQRSHSISSSASSDVLSINSDYEASLPLSALEDSQNGLNRLENGQAKKRKLYVITEKSDETKGQTLETNGQPKKRKMFVVVEQDKDVAGKKLMIMADKPQTNLTQHLEKLLPELLNRIQDKEQKQIKPAPVVTKAKPVVNNPRPHITLPPKKNPTNFAKITSTPSSVPSSIQMPLPIQNTKILKSENSELTMNSDEIETNINLSPDFRFLMKILPKLEQLPEPHKQNVKRSIQIFVEKSYSIYGNKD

SEQ ID NO: 16903 - DNA, 8320 bp, DROSOPHILA
catggttgccagggaaatacgcttgttcctggttcagcagctggaggagatcttcgaacgaatggagcgcaacttgcacctggcattggcaagtctgctggacccacgctttcgaaatattcccttccggagtggggccctggtggcccagtacatgactcaactctatgacatgatgcaggcgcatgtggacagcggggagcaagctgttgcaaagcatccggagaaccgtgatcactacgatatctgggcggcattcaaatccttttcgcatgggaagcaaaggattgtaaacggcagcaacggtcccgaggcggacgatgagatagccagatacttttgcgccggcatgagtaccctgcgagccgatccctttcagctctgggaggaactggccgaagctcaccccttcctgcacaacgtagcacagaggtacctgcacgttccggccaccgcagagccggcggatcggctatttacggccgaaggagcggcggttgcggcgcagtacgccagactaatcgaaaacaacatggaaaacatactcttcatggcggaaattccaacgaaggagtggcagttatagcgtagtccataatcaatccaaacctaagttgagcactgtgtttttgtaccccttttattaactaatttattaatttacatttacaataatgcgaactataaaatacattttttaactttttagcttctcaagcgttaaggaactatttttgtattagaaaattagaggtagggaacgaataacgaacacatattcattaaagatttgtaagtactatttactacacatatttacacaaataatttattttaaatataactttattgtttacttttttcttttgttatcacaaatcgccgttacaaattcaaataacaataacaccagcaaattagcaaaaataccaaaaccgagagaataccaaaaacttcccaacactgccgacagctcagtaattttcgcttacacggtcacacttctgatgacgttttttcgtattttgaagggaatgtaaatgtggaaaaactgagagatttgcaacatgcaaacatccacgacacgctaaaaactcaccgagtgccgccacacgacaatccaaccgagaggagcactccgcacagctggcggagcacccagaaggcagcaggcgaaagttgcgtggctgttgtttccggaagcggtgggcagagggaaatccgaagcagtggtagtagggaaagaggcatcgaaacccacccagcgaaggcgaccttgggagtggcagcggcccaatatgcacaacaactccacaaaaaccaaggaaatgttcatcgtgcgtgctctagaaaagatccttgccgataaggacatacggcgctcccatcactcgcagctgaagaagtcctgcgattcggcgctggagcagattaaggcggagctaatcagtgccggccagatcgcagagggcaatgagctgccctgtgccgcactcccgctgcccaagaatgatgcagcgagcatcataaatgcggagacctactttctccccttcgagcttgcctgcaagagccgctcgcccaggatcgtggtcaccgcactggactgcctgcagaaactcattgcctatggccatttgacaggatccattcaggactcggccaatccgggtcacctgctcatcgaccgtatcgttgtgaccatatatggctgcttcagtggtccccagacggacgaggccgtccaactgcagataataaaggctctgctcacggtggtcacctcgcagcatgtggaaatccatgaattcacactgctgcaagctgtgcgcacctgctacgacatctatttgtccagcaagaacctggtcaatcagaccacagcacgcgctacgctcacccaaatgttgaacgtgatatttgcccgcatggagaatcaagtgtacgagctaccacctcccaattccaatcccaccaacggcagcatccactcggaggattgcaatggctcgggagaggagtcgctgcgggattccgacgaagtaattgcctcggaactgctggcggagatcatatcaggtgcgtggcactcggtggagaaagtttgataaacagatgtttcttgttaagctgaagttgcttattattctacttaactcgcttagatttaactatttttcaatattttcaagaaacgtaattaagttcataaaatatttcttatcggatgggaaaaaattgtatgaatcatttacagtacgatacgataaggtccaacataaaattccactcctccaaaccgtctaattatcattgcgcgaaaataatgacagttacgtttttcagctgcctacaatgaggcgatgaaggatcaggaatcggtcggtgagccagagccaacacttaatggaaacgactactcctcgcactcggatcacgacagtgtggagctgcacagcgaaaacgatgcggttgtaacggctaagtttacgcacatcctgcagaaagatgcttttctcgtgttccgggcactgtgcaagctatcgatgaagcctttgccggatggacatccagatccgaaatcgcacgagctgcgttccaaggtgctgtcattgcatctgctgctgctcatcctccagaatgccgggcccgtcttccgctccaacgagatgttcatcatggccattaagcagtacctgtgcgtggccttgtcaaacaacggagtcagtctggtgccggaggtcttcgagctgtcgctttcaatcttcgttgccctactctcgaacttcaaggtgcatcttaagcggcagatagaggtgttcttcaaggaaatcttcctaaacattcttgaggcgaactcaagcagcttcgagcacaaatggatggtaatccaagcgctgacacgtatttgtgctgacgcccagtccgtggtggatatctatgttaattacgattgcgacttttcggctgcaaacctttttgagagactggtcaacgatctttcgaaaattgcccagggtcgtcaggctctcgaactgggcgccaatccgatgcaagagaaatcgatgcgcattcgcggcctggagtgtcttgtctccattcttaagtgcatggtagagtggagtaaggacttgtatgttaatccaaacatgccggttccacctatgcaagtccaatcgccgacaagcactgagcaggatcaggcggacacaactatccaaacgatgcacagtggttccagtcatagtttgaactccaatcaggagcaactacaggatcttcccgaggcattggaggagcgcaagatgcgcaaggaagtgatggaaacaggcattgagttattcaatcgtaagcctcagaaaggagtgcaattcctgcaggagaagcagttgctgggtgccacatgcggggacattgcgcgctggctgcacgaggacgaacgactggacaagacagtgatcggaaactacattggcgagaatgacgaccactccaaggaagtgatgtgcgcttacatcgatgcctttgactttcgccaaatggaggtggtggccgccttgagatttcttctcgaggggttccgcctgccaggagaagcacaaaaaatcgatcggctgatggagaagttcgccagtagatactgcgaatgcaatccgaagaaccagctattccaaagcgcagacaccgtctacgtgctggcattcagcatcattatgctgaccacggatcttcattcgccgcaggtcaagcacaagatgaccaaggagcagtacattaaaatgaaccgcggcatcagcgacagcaagtccgatttgcccgaggagtacttgtcgtccatctacgacgagatttctgaacacgaaattaagatgaagaacaactccggtatgcttcaacaggcgaaacccactggaaagcaggccttcataacggagaaacgcagaaagctgttgtggaacatggagatggaggtcatctcgctgacggccaccaatctaatgcagtcagtttcgcacgtcaagtcacccttcacctcagcgaaacacttggagcatgtccggcccatgttcaaaatggcttggacaccatttctggccgctttctctgtgggtctccaggactgcgacgatcctgagattgctacactctgcttggatggtatacgttgtgctattcgaatcgcatgcatcttccacatgtccctggagcgagatgcctatgtacaagccctggccaggtttactctcctgaatgctaactcgcccatcaacgaaatgaaggccaagaatatcgataccatcaagacgcttataatggtagcccacacggatggcaattatctgggcagcagctggctggatatagtgaagtgcattagccagttggagctggcccaactgatcggcactggggtgcggccccagtttctttctggagcgcagacaacgctcaaggactcgcttaatcccagcgtgaaagaacacatcggcgagacgagcagccagagcgtggtggtcgcagtcgatcgtattttcaccggctcaatgcgactggatggcgatgctatcgtggacttcgtgaaggccctgtgccaggtgtctgtggatgagcttcagcagcagcaaccgaggatgttctccttgcaaaagatagtggaaattagttactacaacatggagcgtattcgtctgcagtggtcacgcatttggcaagttttgggtgagcactttaacgcggtcggatgcaatagcaacgaggagatctcatttttcgccctggactcactgcgtcagttgtcgatgaagttcatggagaagggcgagttcagtaatttccgcttccagaaggatttcctgcgtccctttgagcatatcatgaagaaaaacgcatcgccggcaatacgagatatggtggtgcgctgcattgcccagatggtaaactcacaggcgcataacatccgttccggctggaagaatatctttagcattttccacctggcagcgggagacaacgaagagccaattgtggagctggccttccaaaccacgggcaaaatcatcggtgatctgtacaagcgtcagttcgccattatggtggactcgttccaggatgcggtcaagtgcctgtcagagttcgccaccgccagattccccgataccagcatggaagccatacgtctggtccgtacctgcgcgcagtgcgtccacgaggcaccacaactgtttgcggagcatgccggcatggagaacgacgcctcggtggccgaggaggatcgagtctgggtgcgcggctggtttccgatgctattctcgctttcctgcgtggtcaatcgctgcaaattggatgtgcgtactcgcgccttaaccgtgctttttgagattgtgaagacgtatggtgagagcttcaagccccattggtggaaggatctcttcaatgtgatcttccgtatcttcgacaacatgaaattgccggagcacgtcaccgagaagtccgaatggatgacgaccacatgcaaccacgccttgtacgctattattgatgtcttcacgcagtatttcgatgttcttggtcatctgctgctggaggagctcttcgcccagctgcattggtgtgttcagcagagtaacgagcagttggcgcgatctggcaccaattgcctggagaacctcgtcatttcgaatggattcaagttcaacgagtccacctgggacaagacgtgccagtgcatcctggacatcttcaacgccactttgccgcaggatctcctcagttggcggccgaaagcacattccagtaacaatataccccaggagcacaaccactttgaggcgctgcatatccgctgcgtagtccagctggaactgatacagaccatggataacattgtctttttcccggccacgtcgcgcaaggaggatgccgaaacgctggcccaggcggcggcagacttaacaggcggcaggagcggttcgcagtcgcagctgctggagtgccagcgggaggagcagggaatgtacggctatctgagaacccgccagctgctcaccctggccgactgtctgatgcagtcgcaccgttttgccaagcgcttcaacgccgatcacgaccaacgcagcctgctttggcgggcgggattcaagggatctgttaaaccgaatctgctgaagcaggagacctcgtcgctggcctgcgtcctgcgcattttcttcaagatgtacggcgacgagaatagacgcagcgattggcccggcatcgagcaggaactggtgcaggtctgcaaggaggcactgggctactatttgagtttgcagagcgaggcacaccgagatgcgtggacatcgctgctgctgctcatcctgacgcgcctgctcaagatgtccgatgccagggtgagttggtttaatacactatatcctctagttccgttgttaataaaacgcacatatttcttttgctagttcgccacccacgtttccaactactacagcctgctgtgcgagatgatgtgcttcgacctcaagcccgaactgagaagtgtccttaggcgtgtgttcatgcgcatcggtccagtattcaatataatgagcgttaaatagtcacggaggagccgcagccacctggctagctgactcggccatgttaatagatcgattcccgatccacccgaaatcccctcaaatcgtagttcatagtgggccctctggttccctcggctttgttgttatgttggcactaatcattcatacaagtatatatatttttattatatttataaacaatacatagtcagaatgtaatgtttactaggtttaacgagaaatgttgttgtttttatatatatatataaatatatatatatatatatatgtatatgtatatgcatatgtacatacccctgggtatgctatgtaaggctttaacgtgtgcgtgtgtatagtttccttcagttacgaatttggattttgtttccccggtgtaacattcacccactatcgattagtgtgtagcgtagattaatggattaaaccagcattgtgcgccgcctgtatattgctagtgttaatttaaatcaaaatctatatataaatatatatatttcaaatatacaatataaatctattaccaatgccagttgcgaaccattgatttaatcgacgctgggatcgcctcttccatgcatattaagatgaagttcgaggtatgtgatcttctcaaatgctctccatctatagcgttagtagctttataataaaaaatctttatgttccgctcgcactgttgccaatttatattttaattcaaatatctagaaaaaaaaaacagacccaattaagtgtttgggactgggtgctcgttcttttgcatccagtccagtcttttggggcacagatttatggcgtttttattatgcccgcaatatgtgcgacgaattcatttaattttcgacattttattggctggatttcggcggtggaaaaaatggaatttgctggcgcagtgagcatcttttcatcgaaaagtctgcagattattttgattaaataaattctgtaggtaataaaaagaaatgcaggattcttgtgcttctgttgcttgctaaacttatttttaaagacatatatttagatatattttcaaataaaggtatataaatacctgtcaagtatttttcagataacttttaatgaatctctcttaatatacgaattattaggacttttactcacataattgtagcattaataggaagtttatttttcagagaaatccccgtttcaaatggccttaatgagcaattttcactgtgcgcattggagtttaagccatgtttgagtaagaaaggccattggaaatatttcgagccggtcttagcgttttggtttttgccaaaattcgtaccttagctagtgtccacatgacacggagtgatatttttcgtgctgctttgtttgtttgccatttaaataaatcgattaacacgcagcggactgctaaccgaccaaaactgagatgatcgggtaggattcaatggagctttgtgcggaaaaaatggtatagatacccgtacgtctacgtatatgtattaatgtgtgatctgggaattgttaaccctatgctaatagatctagttaatatgtcaatttccagtagaaacttaatcacgctctcgatttcagaattcgatttgccaagtatcacattggtagctgctaattggaggcgcttacgcgcagagcaagcaaatattttgcacacagaaagtatctctatatctttaatgaaaagtaccaaaaatcccaaccgaatcccacttgagcca

SEQ ID NO: 16904 - DNA, 5805 bp, DROSOPHILA
acttctgatgacgttttttcgtattttgaagggaatgtaaatgtggaaaaactgagagatttgcaacatgcaaacatccacgacacgctaaaaactcaccgagtgccgccacacgacaatccaaccgagaggagcactccgcacagctggcggagcacccagaaggcagcaggcgaaagttgcgtggctgttgtttccggaagcggtgggcagagggaaatccgaagcagtggtagtagggaaagaggcatcgaaacccacccagcgaaggcgaccttgggagtggcagcggcccaatatgcacaacaactccacaaaaaccaaggaaatgttcatcgtgcgtgctctagaaaagatccttgccgataaggacatacggcgctcccatcactcgcagctgaagaagtcctgcgattcggcgctggagcagattaaggcggagctaatcagtgccggccagatcgcagagggcaatgagctgccctgtgccgcactcccgctgcccaagaatgatgcagcgagcatcataaatgcggagacctactttctccccttcgagcttgcctgcaagagccgctcgcccaggatcgtggtcaccgcactggactgcctgcagaaactcattgcctatggccatttgacaggatccattcaggactcggccaatccgggtcacctgctcatcgaccgtatcgttgtgaccatatatggctgcttcagtggtccccagacggacgaggccgtccaactgcagataataaaggctctgctcacggtggtcacctcgcagcatgtggaaatccatgaattcacactgctgcaagctgtgcgcacctgctacgacatctatttgtccagcaagaacctggtcaatcagaccacagcacgcgctacgctcacccaaatgttgaacgtgatatttgcccgcatggagaatcaagtgtacgagctaccacctcccaattccaatcccaccaacggcagcatccactcggaggattgcaatggctcgggagaggagtcgctgcgggattccgacgaagtaattgcctcggaactgctggcggagatcatatcagctgcctacaatgaggcgatgaaggatcaggaatcggtcggtgagccagagccaacacttaatggaaacgactactcctcgcactcggatcacgacagtgtggagctgcacagcgaaaacgatgcggttgtaacggctaagtttacgcacatcctgcagaaagatgcttttctcgtgttccgggcactgtgcaagctatcgatgaagcctttgccggatggacatccagatccgaaatcgcacgagctgcgttccaaggtgctgtcattgcatctgctgctgctcatcctccagaatgccgggcccgtcttccgctccaacgagatgttcatcatggccattaagcagtacctgtgcgtggccttgtcaaacaacggagtcagtctggtgccggaggtcttcgagctgtcgctttcaatcttcgttgccctactctcgaacttcaaggtgcatcttaagcggcagatagaggtgttcttcaaggaaatcttcctaaacattcttgaggcgaactcaagcagcttcgagcacaaatggatggtaatccaagcgctgacacgtatttgtgctgacgcccagtccgtggtggatatctatgttaattacgattgcgacttttcggctgcaaacctttttgagagactggtcaacgatctttcgaaaattgcccagggtcgtcaggctctcgaactgggcgccaatccgatgcaagagaaatcgatgcgcattcgcggcctggagtgtcttgtctccattcttaagtgcatggtagagtggagtaaggacttgtatgttaatccaaacatgccggttccacctatgcaagtccaatcgccgacaagcactgagcaggatcaggcggacacaactatccaaacgatgcacagtggttccagtcatagtttgaactccaatcaggagcaactacaggatcttcccgaggcattggaggagcgcaagatgcgcaaggaagtgatggaaacaggcattgagttattcaatcgtaagcctcagaaaggagtgcaattcctgcaggagaagcagttgctgggtgccacatgcggggacattgcgcgctggctgcacgaggacgaacgactggacaagacagtgatcggaaactacattggcgagaatgacgaccactccaaggaagtgatgtgcgcttacatcgatgcctttgactttcgccaaatggaggtggtggccgccttgagatttcttctcgaggggttccgcctgccaggagaagcacaaaaaatcgatcggctgatggagaagttcgccagtagatactgcgaatgcaatccgaagaaccagctattccaaagcgcagacaccgtctacgtgctggcattcagcatcattatgctgaccacggatcttcattcgccgcaggtcaagcacaagatgaccaaggagcagtacattaaaatgaaccgcggcatcagcgacagcaagtccgatttgcccgaggagtacttgtcgtccatctacgacgagatttctgaacacgaaattaagatgaagaacaactccggtatgcttcaacaggcgaaacccactggaaagcaggccttcataacggagaaacgcagaaagctgttgtggaacatggagatggaggtcatctcgctgacggccaccaatctaatgcagtcagtttcgcacgtcaagtcacccttcacctcagcgaaacacttggagcatgtccggcccatgttcaaaatggcttggacaccatttctggccgctttctctgtgggtctccaggactgcgacgatcctgagattgctacactctgcttggatggtatacgttgtgctattcgaatcgcatgcatcttccacatgtccctggagcgagatgcctatgtacaagccctggccaggtttactctcctgaatgctaactcgcccatcaacgaaatgaaggccaagaatatcgataccatcaagacgcttataatggtagcccacacggatggcaattatctgggcagcagctggctggatatagtgaagtgcattagccagttggagctggcccaactgatcggcactggggtgcggccccagtttctttctggagcgcagacaacgctcaaggactcgcttaatcccagcgtgaaagaacacatcggcgagacgagcagccagagcgtggtggtcgcagtcgatcgtattttcaccggctcaatgcgactggatggcgatgctatcgtggacttcgtgaaggccctgtgccaggtgtctgtggatgagcttcagcagcagcaaccgaggatgttctccttgcaaaagatagtggaaattagttactacaacatggagcgtattcgtctgcagtggtcacgcatttggcaagttttgggtgagcactttaacgcggtcggatgcaatagcaacgaggagatctcatttttcgccctggactcactgcgtcagttgtcgatgaagttcatggagaagggcgagttcagtaatttccgcttccagaaggatttcctgcgtccctttgagcatatcatgaagaaaaacgcatcgccggcaatacgagatatggtggtgcgctgcattgcccagatggtaaactcacaggcgcataacatccgttccggctggaagaatatctttagcattttccacctggcagcgggagacaacgaagagccaattgtggagctggccttccaaaccacgggcaaaatcatcggtgatctgtacaagcgtcagttcgccattatggtggactcgttccaggatgcggtcaagtgcctgtcagagttcgccaccgccagattccccgataccagcatggaagccatacgtctggtccgtacctgcgcgcagtgcgtccacgaggcaccacaactgtttgcggagcatgccggcatggagaacgacgcctcggtggccgaggaggatcgagtctgggtgcgcggctggtttccgatgctattctcgctttcctgcgtggtcaatcgctgcaaattggatgtgcgtactcgcgccttaaccgtgctttttgagattgtgaagacgtatggtgagagcttcaagccccattggtggaaggatctcttcaatgtgatcttccgtatcttcgacaacatgaaattgccggagcacgtcaccgagaagtccgaatggatgacgaccacatgcaaccacgccttgtacgctattattgatgtcttcacgcagtatttcgatgttcttggtcatctgctgctggaggagctcttcgcccagctgcattggtgtgttcagcagagtaacgagcagttggcgcgatctggcaccaattgcctggagaacctcgtcatttcgaatggattcaagttcaacgagtccacctgggacaagacgtgccagtgcatcctggacatcttcaacgccactttgccgcaggatctcctcagttggcggccgaaagcacattccagtaacaatataccccaggagcacaaccactttgaggcgctgcatatccgctgcgtagtccagctggaactgatacagaccatggataacattgtctttttcccggccacgtcgcgcaaggaggatgccgaaacgctggcccaggcggcggcagacttaacaggcggcaggagcggttcgcagtcgcagctgctggagtgccagcgggaggagcagggaatgtacggctatctgagaacccgccagctgctcaccctggccgactgtctgatgcagtcgcaccgttttgccaagcgcttcaacgccgatcacgaccaacgcagcctgctttggcgggcgggattcaagggatctgttaaaccgaatctgctgaagcaggagacctcgtcgctggcctgcgtcctgcgcattttcttcaagatgtacggcgacgagaatagacgcagcgattggcccggcatcgagcaggaactggtgcaggtctgcaaggaggcactgggctactatttgagtttgcagagcgaggcacaccgagatgcgtggacatcgctgctgctgctcatcctgacgcgcctgctcaagatgtccgatgccaggttcgccacccacgtttccaactactacagcctgctgtgcgagatgatgtgcttcgacctcaagcccgaactgagaagtgtccttaggcgtgtgttcatgcgcatcggtccagtattcaatataatgagcgttaaatagtcacggaggagccgcagccacctggctagctgactcggccatgttaatagatcgattcccgatccacccgaaatcccctcaaatcgtagttcatagtgggccctctggttccctcggctttgttgttatgttggcactaatcattcatacaagtatatatatttttattatatttataaacaatacatagtcagaatgtaatgtttactaggtttaacgagaaatgttgttgtttttatatatatatataaatatatatatatatatatatgtatatgtatatgcatatgtacatacccctgggtatgctatgtaaggctttaacgtgtgcgtgtgtatagtttccttcagttacgaatttggattttgtttccccggtgtaacattcacccactatcgattagtgtgtagcgtagattaatggattaaaccagcattgtgcgccgcctgtatattgctagtgttaatttaaatcaaaatctatatataaatatatatatttcaaatatacaatataaatctattaccaatgccaaaaaaaaaaa

SEQ ID NO: 16905 - protein, 1643 aa, DROSOPHILA
MFIVRALEKILADKDIRRSHHSQLKKSCDSALEQIKAELISAGQIAEGNELPCAALPLPKNDAASIINAETYFLPFELACKSRSPRIVVTALDCLQKLIAYGHLTGSIQDSANPGHLLIDRIVVTIYGCFSGPQTDEAVQLQIIKALLTVVTSQHVEIHEFTLLQAVRTCYDIYLSSKNLVNQTTARATLTQMLNVIFARMENQVYELPPPNSNPTNGSIHSEDCNGSGEESLRDSDEVIASELLAEIISAAYNEAMKDQESVGEPEPTLNGNDYSSHSDHDSVELHSENDAVVTAKFTHILQKDAFLVFRALCKLSMKPLPDGHPDPKSHELRSKVLSLHLLLLILQNAGPVFRSNEMFIMAIKQYLCVALSNNGVSLVPEVFELSLSIFVALLSNFKVHLKRQIEVFFKEIFLNILEANSSSFEHKWMVIQALTRICADAQSVVDIYVNYDCDFSAANLFERLVNDLSKIAQGRQALELGANPMQEKSMRIRGLECLVSILKCMVEWSKDLYVNPNMPVPPMQVQSPTSTEQDQADTTIQTMHSGSSHSLNSNQEQLQDLPEALEERKMRKEVMETGIELFNRKPQKGVQFLQEKQLLGATCGDIARWLHEDERLDKTVIGNYIGENDDHSKEVMCAYIDAFDFRQMEVVAALRFLLEGFRLPGEAQKIDRLMEKFASRYCECNPKNQLFQSADTVYVLAFSIIMLTTDLHSPQVKHKMTKEQYIKMNRGISDSKSDLPEEYLSSIYDEISEHEIKMKNNSGMLQQAKPTGKQAFITEKRRKLLWNMEMEVISLTATNLMQSVSHVKSPFTSAKHLEHVRPMFKMAWTPFLAAFSVGLQDCDDPEIATLCLDGIRCAIRIACIFHMSLERDAYVQALARFTLLNANSPINEMKAKNIDTIKTLIMVAHTDGNYLGSSWLDIVKCISQLELAQLIGTGVRPQFLSGAQTTLKDSLNPSVKEHIGETSSQSVVVAVDRIFTGSMRLDGDAIVDFVKALCQVSVDELQQQQPRMFSLQKIVEISYYNMERIRLQWSRIWQVLGEHFNAVGCNSNEEISFFALDSLRQLSMKFMEKGEFSNFRFQKDFLRPFEHIMKKNASPAIRDMVVRCIAQMVNSQAHNIRSGWKNIFSIFHLAAGDNEEPIVELAFQTTGKIIGDLYKRQFAIMVDSFQDAVKCLSEFATARFPDTSMEAIRLVRTCAQCVHEAPQLFAEHAGMENDASVAEEDRVWVRGWFPMLFSLSCVVNRCKLDVRTRALTVLFEIVKTYGESFKPHWWKDLFNVIFRIFDNMKLPEHVTEKSEWMTTTCNHALYAIIDVFTQYFDVLGHLLLEELFAQLHWCVQQSNEQLARSGTNCLENLVISNGFKFNESTWDKTCQCILDIFNATLPQDLLSWRPKAHSSNNIPQEHNHFEALHIRCVVQLELIQTMDNIVFFPATSRKEDAETLAQAAADLTGGRSGSQSQLLECQREEQGMYGYLRTRQLLTLADCLMQSHRFAKRFNADHDQRSLLWRAGFKGSVKPNLLKQETSSLACVLRIFFKMYGDENRRSDWPGIEQELVQVCKEALGYYLSLQSEAHRDAWTSLLLLILTRLLKMSDARFATHVSNYYSLLCEMMCFDLKPELRSVLRRVFMRIGPVFNIMSVK

SEQ ID NO: 16906 - DNA, 6805 bp, DROSOPHILA
tgacactgtctggtggcacattaacttgaatgtcgtcgacaggcatttaaaataaatttggagggaagaataaaatataattctgtcgggcggtcgttaaaaaaatagacaccagccgtgtttacctataaaaaatactaaatacatatagcgtggtaaatgtttcaatatcttgctagccaaagggggatttccgtgggagttttggcattttaacacgcaagtttttattaccgagacaatgaaaacgcggagtgggctcaaaaccagccgcacagtgaggtggaaaagtctgtgttcccgcaaaaaagcgcgcataaaaatggcataaaattcaaagcgcaccgcgaaatggggaacctgtgcaaaaaagtcgtaaacaatattcataatcatattgcgcaatagatgcagatggttcagattcaaaatttgtcaattttcttcaaccaaagaactttgaaatatttaaacaaattttgaaatatatatgttagttgtttctaccaaatatttttaaagtttgccgtttaaatatgtatgtacaacaaaaactagtggaataaagtccgtcttctagtttcgaaagctttgctatgatattaatttcgaaagtttaaagacttttcgtagcctcagatgcggtttgtgcaaccctcgcaccgaggggaaattagcttttaacacccaaagagaaaaatcgggagagtgggtgggggggagcggtgtgacagcggcttatttgaaacgaattttaattaaaacacaacggaaaagtttcggctgggacaggaaacttcccctgctctcactggcccgtacacttaaagttaaatcccaggactgtcaggcactgttctctttcaggacttttcgtagcggaagatgggacttacattcaagagataactaggatgcaatttaagaaatacattaaatcaagaagatggctggtatacataaggatataattgtgatttaatcgaaatgcattcagttatcatgctgtggagacaccattgatcatattcaaacgctgcagattatcgatgcgttgcaggaccgatggccgtagacgatgccacatgaggtagcactggtctacatagggaaattcgtaatcatccgaaaaaagtttgagcaaagcggccctcatcggtagtccgtaacctcggcgattgacataggcatcggcggcgtactcaaagtgacgtatacaaaagaacactatccaagtggaaatgtcatgatagatgggcattagatacttgtacaccagccaaaagcccaccgaactgggatagaatgtcgtaaagcccgcggccgcatacaacgttatccacctgttacagattccgaagagtagtagatatatcaagagataaaagtaaatcaatgccagtccctttgccacatgccacagttgccaatgggccagttgatgggccacaaaggcagccaactgctcatcattcagaccagcacccatctgaccccagtcgaaatcatcggagctaaatccacggttccacttcagattatcgtggatatctaaacgcaggcaacagcagcatcccattacccaggccgtcggacgacccacatggaaggtgtgaaccatatagacccggccgggaaaattaaagtcgtccaataccgctttcaggctattatccatatcggtactattcattttgcgactcttgcccaaacagggcactccaaacagtccaacaaatgccaataccagtacggacaaacccaccagacccagccaaacgaatagtgtgaaataccactcgcttaacatatgaatagccatgaaaatcgcagtcagcggaatgacggcaacctgaggaaaatcgaatttaagaatgtatatttttcgaaaaattagaataacttgcctgtaggaaaacgacgacaaaaaccagcgcacaaatcaaacccaacaagggcggcgtcttttcaggatccacattgtatcgcggatccaggaccaatttctcgtaaaacagtgatggcaacttccggacaaccaagtacgttgaaaatacagtcataaatgtcacattcagccaagtgctgtccgcatagtgataccaacctaccgtcaatttccagaggaaagccagagtgcaaagatacagatcaaggcagctatataatgtatctattgctatattgaatatctcaagggatgaggcatgaagctgtttatccttggaggcctgtaacaaatgtcaactgtcattttaaagtatataaataaataaatatataccatatctttgaagaacccacctgaaaggcttcttgcgacaaaatgccctccatttgcttcggcggaacggaagtccttttgcacaatttcaactgcctgcaacagaggatgagatgaaaactgttgtgcaccactatcaccagacagaggatgtgccgcaaaagaatcggatccgagaaactaagtttccggggaaccacactcatgccgatctgatttcccgatatttttaggacctcaccacgcaaaggatcttgataaagtgcgaatgagttcatattttttaaatcaaactatgtatgtggtttttaaaacaatatatgtacataaataaatccgaaaatgaataaaatctaaaggacaactgagcaagcagtagaaagctttttaaagtgctatatgctatatatttttagaaaatctaaatatttcattttgattgaaacagaatatcgaaaaaagaatatgtgtatcgagcttttttatgtggttatcaatgttaaccaacattcttagcataatcctgatttcgtggacaaacacggattaccatgctctcgaaagccgttgattagtgaaggccaaagattataatggcgccaaagaaattacatatttgtaaccggaaaagaagccgtatgtgttggtttactgtggatgtcatggttctttgtagtttgtttcgaggatttgaacttcttacgcttggcatatcaataatgagtcgagggcttggcgggattctatggggaattgtgttgccaagctggctgctttgatggtttcggttcaacgccattacttaacccgcacccccaactaccccacacacacacccacatatccccatacttaaccacacacacacacacacatatgcgcgaacattcacttggcatctctaattagtagaatttaatcttcacactatggcaacgtcaaacgtcccgaactgagactccccaaaccacccacaagccatcgtatattccacccattgcgctgctcattatgaaaaatttcaaattaaaaagacgaggggagtggaaattgcacagagaaaaatgtaatatataatatatataaatatacatatgaatttagttttaatatgtacaaaaatatataaataactagcaggattataagacacagcgaaaaaaacagcatttaaatctgtcaaataattttttcttataatacgttattataaagagaataaaaaaactattttatgattctatagaatgttatccagaaatacctacaaaaaatagttatagttcactgccccctgattttgcgccgtgtagaacagcgtaaaagtttattgtaagaagtaacggtaggatttgcataaataccaggacatgtgtgggcgtgtgtgtgtgggcgtgtgtgtgttagtatcacacatcatgattacataatttagctattaaaacagcgccaagtggctgactgaaccgagcggaagggagagaggagaccaaagagcgagacaggaggtagtggcaaagaaggcgcttatttatgcctcaacacgccgtttggcgcagtttcaaaggatccgaaacaggggcgtgggatccgaaaaggacggtgggggcgtctgccgacgaagggctagtggctaagaggggtattccagttcaacggcacacatgtgcacttgatttactcattagcgttacttttctgttcataatggggcgcttaccaagccggaaaccgcagccacccccgcaccaccagtcgcattttccaaaggcaccaacccccgcacccccccccccccttacccattccaaccccaacgctgactgccacatttggtttcatttcgaaccgttcgggatgcgttggtataagccgcttaggcgtatcctttgtgcatgtgtaattgtgctagccctcacacactgaaccccttccccacttctcggtcagcccaaccccctaccgttctcacacacactcacacgcaactaagccctaataatccccactatttggccaaaaggaggagggaaaaaaggtaaaacactgctacaaaatttcacttcaaacattcgctaatattttctttaataattacaattgtatgtaagctacaagaaaaaaaaccaaaaatttgaattttgaaaaaaaattacttacaattattttaatttatcaacaacttgcatattaaggtgatcaatattggtacttattttaggtattttaggatttatatttctttcaaatatttttctcagtgagcatgcgtaaataagtagctactcaattcgttgtgcccatttttgattcccaaacttgatacttgggtgaagtcaaattttagcatttcacatttgccaaaggctaaaaatgtttctttatgcagatagtccttgtgaatagttatcctgaaagcagggttttctggaagaagctctttgatttcatgtgaaaaaggggcaagtaaatagagaataactttaagtagagttgagccatgacaaattgcagaacgctcagtagttatctcaatgccatgttctatccatatcaaatggaaatggtcttaaaaagtctcaaaggagaaataatactatttcttcttcaaaatataggtttgcttcacatataacatttatatggaatgagtacttgggttccaaggatttatggacctacaattaaaagacgtgtcccatatttttaagaacaagaaaacatgagatttaaggataattcttaacttcttacccctcgagttaccaaaacacggtccgatttacttgaattatagccgagttaatcctaagccttataattatgcggttttgactccagactccagaggttgaacaatttacctgaggctttgatatatttcctcagctccttgggccttccaccaaatccgagtggtttgatatatatgtatatatatgccctgctacctcaattatcttgtgcaattgtgtaggagataatccgaaactaattcggattggttgcggtcaacttgtgtgccgtcatcttgggcaatcgataggctcctgagtttggagagcacttgaataatctctgagggatttgttttcgttggccatctattatacgcgataagatcgcaacgtgaatagaagtttccgttccgtgataaggggggattttaaattaataattcactcttgctgcacgaacgtgaaaaacgacggaaaattgctcaattttccatgcgcacaaggtaaaacgatgaaaagagcaggaaaagaaaaacaaaaaaaaaaaattaaagagaaatttatgctaattttcgacaactatcactgctcaacatcggtggaacgtggatgtggacgtggtcgtggaggggcaagcaacccacccgaaaaagcagacccaccaaacctgatggtcatgtaatgtcgaccgacggaggcagcgtaacgaagtaacctaattaatttgtggcactcattagcaacaattgaaaatgccacagcagaagcagctcctccaaccatctgccccccctttttttattcccaaccccccagtcactcgtcgtcaactcaaccagaagttgaaaatgtccataatgagcgaggggggtacgactaacgcccctgccccgcccacagttactccaattctccccatttcttccatcgaaaagagaaattatggggggaataaaagtgcttatgcatattccaattgacgactatttggtactctaatttaagcaggcaaaggataggattctatatatttttactcattttctaagtcttgttttatgttgaactatttaaaactttaaatttcaacagaaagttttgaatctaattgttaggcagcacggcttaccattttttttttttttttttcatacgaaccttaaataattataattggtactcacgatttcttaagcgacatatttatgttcttcatattgaaatgcattacacttttaaatgtttcaagtgtgacgtgatctcaatttcaatatggacatacacgatcccagtgttttgaaaccaatttaagtttatgaatatgctataaatgtacttcaaatgcacaacgtgaccaaacaatttcccacactttcattcgcattgcgagcctaacaaacatacaagcctcacgatctaaaatatatagctattcttgaattctacacgatttcttttttcaacaaatttatgttattatcaaattgcagttagcatggccaacagaagattcccatcaaatgtcactttttcaattagccagccgataatttgttctcattgtgactgtagcacacataaagacgtttccgcacattcttcagtagtcgtcctgagatacttttatactcctcccaatccatcaattaagattaatgtacatttccatggattcaacgatcatttacaacgattgtttcggagacaacttcatcgaagcgaggccatcgatcatcgatcaaatcttaaatgttgtctaagcagcttgcctaatgatcttttt

SEQ ID NO: 16907 - DNA, 1515 bp, DROSOPHILA
atggttggaggagctgcttctgctgtggcattttcaattgttgctaatgagtgccacaaattaattaggttacttcgttacgctgcctccgtcggtcgacattacatgaccatcaggtttgatcctttgcgtggtgaggtcctaaaaatatcgggaaatcagatcggcatgagtgtggttccccggaaacttagtttctcggatccgattcttttgcggcacatcctctgtctggtgatagtggtgcacaacagttttcatctcatcctctgttgcaggcagttgaaattgtgcaaaaggacttccgttccgccgaagcaaatggagggcattttgtcgcaagaagcctttcaggcctccaaggataaacagcttcatgcctcatcccttgagatattcaatatagcaatagatacattatatagctgccttgatctgtatctttgcactctggctttcctctggaaattgacggtaggttggtatcactatgcggacagcacttggctgaatgtgacatttatgactgtattttcaacgtacttggttgtccggaagttgccatcactgttttacgagaaattggtcctggatccgcgatacaatgtggatcctgaaaagacgccgcccttgttgggtttgatttgtgcgctggtttttgtcgttgccgtcattccgctgactgcgattttcatggctattcatatgttaagcgagtggtatttcacactattcgtttggctgggtctggtgggtttgtccgtactggtattggcatttgttggactgtttggagtgccctgtttgggcaagagtcgcaaaatgaatagtaccgatatggataatagcctgaaagcggtattggacgactttaattttcccggccgggtctatatggttcacaccttccatgtgggtcgtccgacggcctgggtaatgggatgctgctgttgcctgcgtttagatatccacgataatctgaagtggaaccgtggatttagctccgatgatttcgactggggtcagatgggtgctggtctgaatgatgagcagttggctgcctttgtggcccatcaactggcccattggcaactgtggcatgtggcaaagggactggcattgatttacttttatctcttgatatatctactactcttcggaatctgtaacaggtggataacgttgtatgcggccgcgggctttacgacattctatcccagttcggtgggcttttggctggtgtacaagtatctaatgcccatctatcatgacatttccacttggatagtgttcttttgtatacgtcactttgagtacgccgccgatgcctatgtcaatcgccgaggttacggactaccgatgagggccgctttgctcaaacttttttcggatgattacgaatttccctatgtagaccagtgctacctcatgtggcatcgtctacggccatcggtcctgcaacgcatcgataatctgcagcgtttgaatatgatcaatggtgtctccacagcatga

SEQ ID NO: 16908 - protein, 504 aa, DROSOPHILA
MVGGAASAVAFSIVANECHKLIRLLRYAASVGRHYMTIRFDPLRGEVLKISGNQIGMSVVPRKLSFSDPILLRHILCLVIVVHNSFHLILCCRQLKLCKRTSVPPKQMEGILSQEAFQASKDKQLHASSLEIFNIAIDTLYSCLDLYLCTLAFLWKLTVGWYHYADSTWLNVTFMTVFSTYLVVRKLPSLFYEKLVLDPRYNVDPEKTPPLLGLICALVFVVAVIPLTAIFMAIHMLSEWYFTLFVWLGLVGLSVLVLAFVGLFGVPCLGKSRKMNSTDMDNSLKAVLDDFNFPGRVYMVHTFHVGRPTAWVMGCCCCLRLDIHDNLKWNRGFSSDDFDWGQMGAGLNDEQLAAFVAHQLAHWQLWHVAKGLALIYFYLLIYLLLFGICNRWITLYAAAGFTTFYPSSVGFWLVYKYLMPIYHDISTWIVFFCIRHFEYAADAYVNRRGYGLPMRAALLKLFSDDYEFPYVDQCYLMWHRLRPSVLQRIDNLQRLNMINGVSTA

SEQ ID NO: 16909 - DNA, 8441 bp, DROSOPHILA
ttgtttctcgggtacgtttgtattatttgctttgattttactccggtctagttttagttttagcatcagtttagtttggtttagcttaattgaattggattggattatttagttgggacttgactaaaagcgaaatccacacacgaatataaggacaaattcttgaacgagtggttatgcgcgttttatgattaattataatacaaaacagttcgaatgccaaaaggaccaagactggcttaaggcattttcgtatagaatcattccactccatttcccccttctatatcccagctctcttcccctcttctcctcccgggcactaagcaactcgttgcgctgttgtgtagattttcctggcattttcgtgggtgcggattcggtttttccgtttcgttttgtcttctttttgggtatttataatacagcgatatgcctttaatttaatcgtaatttaagtgaaactctgcttgtacacatatttaacattaacgagcattggcaaatatatatgtatatattcagttacatattcagattcagcagtattagccccccaagtcaaagtccttgtcccgcttacaatcttcgttcaaatttagtttaggcagcggtttgttgtgtcattaaagcggcaacaaaggaaagccttgtacagtatacattaagtatatagaatacaggtagaaaagtgggtggtgtgtgcatataaaacggggggttttaaggattcggattttggggctaggaaggggctggcaaattaaatgcaccgatctctcagctggctcggtgggttcaagtaactcgcaatccggattcagttcgcaacagtctcgtaggggaaagcaaagtgtggatgaagtgggcggttgggtgctggaaaattaacttgggtggcctgacctcgagggggaggggtgccgcagtggtgctcctgatctcctgcgggttattgtcactctggccctcggaaggtgttcgatagggaattcgggcaacaaaaactgctagtacctctatgtgtagctgtgggtctggctggtactctatgcgatacatgtatatttgatgtatatatttcttttatcatttgcaacacattaaaactttccatttcactacataaatacatacgtacataataataataatcataatatttaataatagcggcttaccactcagccgcttttgtttgtgtttgctagaatttttcaagccggggatttttggtttaactacatccgtttccggcgtgtgtgtgtgtatagtgctctttgtttgtgtttgtgtgtgtatccatacatatacatgggtgtgtgtgtgtgtgtgagggtggaggggtgtactatataagtagttagttgtctgttcgatttcaccgattcgctagctttgtgcgtttcgtcaagcatctcaaactgtacagtttagccagcgtatatacatgtggatgtggagaacggttcgaaatactcgtgctgactgacctcctgacctcttgacccccttgtgttggggtcgctaatcaaatgactttaatcagcactcggggtgcatgcttaattagtgccgaattaccgtcaaatcggactttcgttaaattctttgctcttttttctgaatctcgtcgatctcgcaattcgaataaattcaactcaatacacacactcaacaaatatttcatcgctgcggtcagccaattaaattacaggttataaaataccaattacaaattacaagatacaattcaaatatcggattaaataacatttgacatttacactgaggcgagcttacgcaaaggatatacatacacatatcaatacaaacacagggccacgcccccacggaaaggggaatgcgcgcctatattatcattatctcttcatcggtattcgaaccgtcatcgtcggcttactgagggattagcttcgaagccctgttcaatgttgactaattagctagtttccaaattctgttgtctattgttgttacgaatatggttgttgcggtgctgcaggatccacccgtcctccaattcatccatcgaacctctaacaattgcagttggcattaggcgtgccctgcggctgatccgtcaacctctggcccttctggccaccgcctactaacgtcggatccgcgtccaggctctcggacatcttatcgcagatgatgtccaccaaacgctcgaaaacagcctgaaagtaaggtggttcattcggacatctatgagcaattgaagaattcccactcaccttgacgttgacgttctccttggcagaggtctcgaagaactcaacacccaattgatcggccaactggcgaccacgttcgaagctgattacccgctggtcctccatgtcgcacttgttgcccaccaggatcacctgggcattgtcccacgaatacgttttgatctgtgtcaccctttggagaaataaatataacaccataagaggtgatccagttttaaggaatagattcacttaccaatcctgaaccgagttaaaactgtcctcattagtgacatcgtacattaggatgaaacccatcgctcctcggtagtaggctgtggtgatagttctgtaccgctcctgtccagcagtgtcctataaaagcgaaattacagtttaatgggaaatgaggctacgagtttaaaatccctttagagccgatacttgacttataactcaataaatagcagttaagccctaatgaatgaatccccaacatagattaacggcttaaaccacaagcctctaccgtattccactcattgattatattatcttaatggatgactgaaaacacgactggcatcgcacagcaaggactctcgagaggacgctcacctgcgctctcgtccgtagcgattgccaatcaataaatcaatgtgtcagctttccggtttaatgctcttctccggacgattcattcccccccacaaaactaatcgaggtcaaacaagttctacacatctcaacagcaaggcagcacatgctgcgacccgattatatgtcttagaaagaacatcaatagatacttacccagatctggagtttcacgcgcttatcgtgccgaaatacggtcttcaccttaaagtcaatgcccaccgtggagacgaaggcggatgtgaagctatcgtcggcgtagcggaagaggaagctggtcttgcccacgctggagttgccaatgatgagcagcttgaacatgtagtcaaagttctggtcggcggcatccttctgccacttggggtctccgccactcgccattttatccgtttagagcggtgctgcacggagggaatggaaacaaggattagaaacgattaggattagtagtcttgcaatatcttactactccctaagacatttgtttgggacttatttaaattttgtacactttattataactaatccacatgatctatttaacgtctcatgatatcaagatgagattaacaaagtagcaggctagatttgactgtcacctggtatataagacaacagaacctttaagaactcagtcacataaacacattctcaaaacgtacagtcataaaactacgaagcggaaagttttgtaaaataacttggaaatctaaaaggagttgagcattttgtttccgcgtttttgtttggacatttctgcacttgcagattctttttatcccataactggctttctaatgcaagtccgcgtctactaaaaggcaacatgtttgataccgcattgggaacagtattgagcgttatggtgcagttgataatcctagtatttggtcagattctgggacaagtggtccagcatccattgattactactggactttgcctgttgggagcatttgcataccacgcggatcaggaaacactcaaggagatatatcagcgtgtactccttttgattaggactccacttcaatttgggaacacatcttgctcaagaaattctgctccagtatacggttacgacatgcaacatggtccgcatacttggttgccgaagtccaggtcatcttccagttctgtggaggaagcgactttcttccagagcccagtcaacatcgatgaatctcaaattcaacgcatggccataagagagctgctgagctggaaccactatgatgatctgcccgccagcatcactctggagaatacgggtcagacacttatcctccgtgcccagttccacggtaatgcacctactatcagtggagctgatctcctggccagctatacgtttctggaactgcgcttccactggggctggtgcaacagcgagggatccgagcatacgatcaaccaccgaaagttcccacttgagatgcaggtgatgcacaaaacgggatcgggtattccccgtacttgcaccagcagctatgatctcctgatgatcggatacgtctttgagctatccgcgcacaatccgttcctggatcccctggtgcagaatttgcgattggttcagaagcctggaaagcgtgtccagatttctccatttcccatatcctacttgatgtatcaatttcgatctggattctattcctacggcggttcgctgacccatccgccctgttaccagggcaccgaatggttcatctttcccgaatccctagccattagcgactttcagctgcgtcactttcgtttgctcctaggtccggatgggatctcgcccatagcccgtaacagccgaccagtccagcacatgggcaatcgagttgtaagcctaaactgcttctgcccatacgatgccgcccagttgtccagaatgcatgtggagctatgccaggctcaagctcaggaggagcacgaagaggaacgtatcgagcaggagcagcaattggaactagagcgcgaactggagcggcaaagggaaagcgacttgaaagctcagcaggagcaagcaagcgaggcggccatcgctgcttccgaggatgaaggtcagctaattgagaccatagataccacgaccataataactagtagcagcaacactagcatatgcatgactacgctgatgcggaaggattcgcctaggcaactggaacagccatctcagatgcctatgatggctcccaatcagggtaacttttgcaatcctggcattgtgatattcagcggtgtcaatgaatccaagtccaagtgcggcatccatcaggatacaccggaggagctaatgatccataacagaggaacgggaagaaacatgggtgtacagaatggctgcaaggccgatgccttttgcggcgtgggcgatggcgtcaacatcggaattcgcatggagctggtcgagtagctaatgtgctattatcaacctttatgtcatccatagacactccatttgtggtccatgctgcacgaagaaccggtggggctagatggtgcacatgaaacaccggtcaaggccaactggtggccaaccggagttctctctgtgcccggaagtgattgaatcgcgtgcgtgtggattaaacaagttgcgtttatattttctaaagcataaccccccaattcccttgacttttaatccttggagtaggcgggaggggttggctttagcggcctgacttgggaaaggacccacttgattatccctgtcacgtcactgggaaaactcaaagcgaatttcagagctgaacggcgggttggtgggctggtgggctggtgcggccttgaaaactttcagccttggcttgggcaagtgacaacagtctcggcttacagtttgccattcgggatggttggctgcctgttttccatatgcaatgaaggcggcgacattgtgtcgataatttgtgtatatagcctggttctcctggttccgtttccgctcatccttatttcccccgtccagaatcagaagttgcgcagcggcaaaacgctgtcagattgctgatgaacgacttggtgtagaaggaccgagtgcgcgcgtcatcgtcaaggattttgctggcaaaaggacaggcttcgctcctgtcaagcctcttcaggcccagaaatatcctggaggggcccgaacccaaacccaaacccaaacccaaacgcagacaccaaagaggggccgcaataagaggtcttcaacggcagacggcccttatcacaggcgctgtgtggaaatgtttttatctgctcgactgcgtgtaattatcgatttttctgttgttttccccctgcgtgggggtggctgccagaccctgcccccattacccacccccttaactgctctttcatgtttcaaatttccaatgatttggcagctgttcagcggtcggcagctgcgggcttgtttaattattgataagaaacccaatattggccaaaacgagaactcaatcctgccttaacggttccaattggaaaagtttcaatttaaggtttgttgtcaaacgtaaatattaggcatgtgcataaataccgagttatcaatcaatgggaataaacaattaactctttcctggaagttgtaaaactacatatgtattatttggccacattcatatgtatgtatagcccatatctattgtcaataagatatgatacactaagctgaaatccatcagaagtttttttggaactactataaaagtaacattgagttattaaataccttttaaatacttttaaaaagttgatgtgtaatctttataatgtcaaaatcaatgaagtttaatgtaaaaataataaattccaaccaacggcctcattatttgacaatatggaactgatactgcaaagtttttgatgcgaaaactcaggtattttggttttagctggaactagtacccccattcacccattttggtccatcatggcggatacttaatgtgtcagataaacttactctttcttgaggttattgcggttacagtagtatctgctgctaatatctcagttgctgtttatgatggtgctgctgcagatcctgctgtcacaagaatatcctgctgttttcgatgtgtgggtgagaggtacgccgtgttgttgctcgcacatacacacaaatcgataatggcagctcctttcgctgaagggataaggaaaaggactcgactcagccttggcactggactgacatacgccgcgatttcacgtcgattgattcgtcgagttgtttacggttacccaatcaactattcacacgcccgcggacccactcgtctggccagaattgaactgactccggctgcagtggctcaattattcagcaaatgcaacgcaccaactgttctacctttttgcctcgacacgtcgacaccaaaggacacacaattttcaattttttcttcgctctcaggcggcgaattgactggtgcggcgaaaacgggccagttttgtatacgttttcataattcaactgtttcaacctggctgactggctggctaactgactgactggatgactggctgctgcccacacaatttccctgctgcttttcctgctgctgaaaatcgatgggtttccgtgcctggggtgtctgtgtgtgggcgtagctttcgcggcgatttcgggcgagctttccattcatgcgccggtcatgcgcacttcgcacttccgcagccttgtggagcactggcccaggggttcatttgaatttattcgtgggcgcgaatttattcgttcactttgtgaacccatgttcttatcctgaaacaatatagaccaaggaactcataaaaacagtaaataaaatttataagaattgtttctttaaatattctaaatattccttcttgaaacctttggaactggcgcatatcgcaaccttgagaactgcaattagtttattgcacaataaaaaatccaaatcaaatctgggttcaaagattctgagtataaagagtttaatgaccaacaattaacaacgattttaccacctacagtttactgtttcccgctagtagatcgcgtaccaatcgaactgcgtacatagccgttccaggagccgtggtcacaccgtagccgccgtggccgtagttgtggactaccttcagccgcctgccttccggattcgtgatcagttctggctccacccgaacgacggagcggtgtggccgcagaccaacacattcccgcacgatctccgctttccggagactgggcagcaaatcgtagcaacgctctcgaatggccatgctatcgtatttgcaccactcggtgttgtagctgtcgaattggcgacatcctcccagggtcacagtctcaaatccgggaagaacgtaggtgtcgtaatcgccgtagaaagccgtctttacccagggagcacgcactttgagcacttgaccccgaatgggaaccaagtgctggtccccacacaactccttggctcccattccggtgcagttaaggagcaagtcaatgttctgcggcacttcgaaaaagctgttcacatgctgacggacaacctctcctccgttctccaggaatct

SEQ ID NO: 16910 - DNA, 2309 bp, DROSOPHILA
cagggaaattgtgtgggcagcagccagtcatccagtcagtcagttagccagccagtcagccaggttgaaacagttgaattatgaaaacgtatacaaaactggcccgttttcgccgcaccagtcaattcgccgcctgagagcgaagaaaaaattgaaaattgtgtgtcctttggtgtcgacgtgtcgaggcaaaaaggtagaacagttggtgcgttgcatttgctgaataattgagccactgcagccggagtcagttcaattctggccagacgagtgggtccgcgggcgtgtgaatagttgattgggtaaccgtaaacaactcgacgaatcaatcgacgtgaaatcgcggcgtatgtcagtccagtgccaaggctgagtcgagtccttttccttatcccttcagcgaaaggagctgccattatcgatttgtgtgtatgtgcgagcaacaacacggcgtacctctcacccacacatcgaaaacagcaggatattcttgtgacagcaggatctgcagcagcaccatcataaacagcaactgagatattagcagcagatactactgtaaccgcaataacctcaagaaagaatggcgagtggcggagaccccaagtggcagaaggatgccgccgaccagaactttgactacatgttcaagctgctcatcattggcaactccagcgtgggcaagaccagcttcctcttccgctacgccgacgatagcttcacatccgccttcgtctccacggtgggcattgactttaaggtgaagaccgtatttcggcacgataagcgcgtgaaactccagatctgggacactgctggacaggagcggtacagaactatcaccacagcctactaccgaggagcgatgggtttcatcctaatgtacgatgtcactaatgaggacagttttaactcggttcaggattgggtgacacagatcaaaacgtattcgtgggacaatgcccaggtgatcctggtgggcaacaagtgcgacatggaggaccagcgggtaatcagcttcgaacgtggtcgccagttggccgatcaattgggtgttgagttcttcgagacctctgccaaggagaacgtcaacgtcaaggctgttttcgagcgtttggtggacatcatctgcgataagatgtccgagagcctggacgcggatccgacgttagtaggcggtggccagaagggccagaggttgacggatcagccgcagggcacgcctaatgccaactgcaattgttagaggttcgatggatgaattggaggacgggtggatcctgcagcaccgcaacaaccatattcgtaacaacaatagacaacagaatttggaaactagctaattagtcaacattgaacagggcttcgaagctaatccctcagtaagccgacgatgacggttcgaataccgatgaagagataatgataatataggcgcgcattcccctttccgtgggggcgtggccctgtgtttgtattgatatgtgtatgtatatcctttgcgtaagctcgcctcagtgtaaatgtcaaatgttatttaatccgatatttgaattgtatcttgtaatttgtaattggtattttataacctgtaatttaattggctgaccgcagcgatgaaatatttgttgagtgtgtgtattgagttgaatttattcgaattgcgagatcgacgagattcagaaaaaagagcaaagaatttaacgaaagtccgatttgacggtaattcggcactaattaagcatgcaccccgagtgctgattaaagtcatttgattagcgaccccaacacaagggggtcaagaggtcaggaggtcagtcagcacgagtatttcgaaccgttctccacatccacatgtatatacgctggctaaactgtacagtttgagatgcttgacgaaacgcacaaagctagcgaatcggtgaaatcgaacagacaactaactacttatatagtacacccctccaccctcacacacacacacacacccatgtatatgtatggatacacacacaaacacaaacaaagagcactatacacacacacacgccggaaacggatgtagttaaaccaaaaatccccggcttgaaaaattctagcaaacacaaacaaaagcggctgagtggtaagccgctattattaaatattatgattattattattatgtacgtatgtatttatgtagtgaaatggaaagttttaatgtgttgcaaatgataaaagaaatatatacatcaaatatacatgtatcgcatagagtaccagccagacccacagctacacatagaggtactagcagtttttgt

SEQ ID NO: 16911 - protein, 220 aa, DROSOPHILA
MASGGDPKWQKDAADQNFDYMFKLLIIGNSSVGKTSFLFRYADDSFTSAFVSTVGIDFKVKTVFRHDKRVKLQIWDTAGQERYRTITTAYYRGAMGFILMYDVTNEDSFNSVQDWVTQIKTYSWDNAQVILVGNKCDMEDQRVISFERGRQLADQLGVEFFETSAKENVNVKAVFERLVDIICDKMSESLDADPTLVGGGQKGQRLTDQPQGTPNANCNC

SEQ ID NO: 16912 - DNA, 2439 bp, DROSOPHILA
cagtcgcctgatgatgaaattaacaaattctgggctctatttttttcttctttttttttgcacgatccgtggaagtctcgggggcagtcaaaccagttcacccggccttcgaaaacaattatatttttggggttgggcgtgttgttgtgcaaacacctacgaaataacacgatgaccctgagaccgaaaaaagcacgagtacgttctagcacccaaaatattacacatataatgtacgtgacgtcactgcctcgaggagtgctccaaaaaccatagaactgaaacaagatgcaaggtggcttgtggtagttattattaatccttagcgtacattacattatgagatatattaaacactaaactggatccatctacgtgacagaaaagctgcgaaaattgtttttcagcagcatgaccacgaagaaaatgcccacggcaatcgacaaaagctgcacgttgaccacctttgagtccaccagggcctgtagcatgttgtggatactttcgctgcgcacttcgttaccgcagcagtccattaatgcactaatatcggatcaataaccaattagaacgccaatattttgcttgcaaacagctgtgcggtggctagaggtggggctatttacttttctcactcatcgattgtttcgggtgactttcgatgattgattctctgcaactctagcgggtgactatcaatgctaagaccgttaccgaatattaaaaacaagtaaaatttttattttattattaaaacgtaatatattgcctccatgtcgtgttttttctttgaaattctcatcatatgaattttttgttattttattttgagacattgcagggcgagatagcttggactcaaaccaagactggggaacagctgatgcagctgctcatccagaaaaacaaattctctctagaattgtttagcaaacagagcaataaaactgataaaatagaacataaaattatcccatgtgtaacgtatgagtacaaagcctttggtgtttagccttccagcaaccgaaacacacaactctcttgaactgtgggtttagttttattaattagtttaacataactatctgctagttgggacgcttattcgtcgttcgcgtagtcagcggggttcttgcgcagcagggcggtgtgcttgcgttcggtcagatcgtagatcaggtatcccacgatgaaggctgaaaaattgggtattagaatacgattcgacgggaatcctgagcgatttacttacggggagtaacgatgaagacgttggagcggaagcgacgcaccatgttgggcagtcccttgctgatcgctccagcgaaggcgcgctgctcgaagggcgacagcttgtaggtgacgatgccgtgcaccttggccaagttgccaaaatgctggccattcaggatcgaggatagacgcatggttgtggggctgcggatggggaaagctttgattagcaaccgcagaggaagtgcaccaggatttgtatgaagacacagatcgttattataaacattatggcctaggtggtgctcctatatttgctgcacccggaggttatgtaattttcgcactgctccgcggatgaaggcggccgagtacgtctaacactgggcgcgatctctgcacttttggcagcccataattgtgcatatttttagagccagcacctgccattgtaccgattatgatgccaaatttttaccttgaaattcgacttttacgctgcaatttcctctcgactcgtctcaaccagtgtgaccgtggacgggccgcttgaacataccaagcagttaggctttatttttgaaaaatgtcctaaaagtgccgctttttaagattgatgtcttggacagaagctaagtgcaggccaccaccagaatgtgtaactttgtagactttcagcgtggacttgaacctaatttgtgtggatagcggatctttaaactattagtggattcttattaaaatataacaataaaataatgtaaaacataattgcttacctttgccgtaataaaatatgtgagcggcttaaaaacttaaatttcgtgaacgaaaagattatatttattcaaattaatagacagaatagacacatggaattgtaaaatcgagggctacttatctttttaacttcattttctgtgattaggcatacaaagtattcaaacttgcccactaaagatggcacattcatctcaatatatgtaaaatatcatataaataattttattgtattcaaaatgcattagattaaaatgagttgtcaagcaagaatacttttcctgccattattagccttttatacgaatgttgagatatagtttatacctttattaatgattaacatttatacagctatgagatgatgcatcttacactttaacaattatttgcgcgatcaggactacgcaaatagacaagatttca

SEQ ID NO: 16913 - DNA, 383 bp, DROSOPHILA
agccccacaaccatgcgtctatcctcgatcctgaatggccagcattttggcaacttggccaaggtgcacggcatcgtcacctacaagctgtcgcccttcgagcagcgcgccttcgctggagcgatcagcaagggactgcccaacatggtgcgtcgcttccgctccaacgtcttcatcgttactccccccttcatcgtgggatacctgatctacgatctgaccgaacgcaagcacaccgccctgctgcgcaagaaccccgctgactacgcgaacgacgaataagcgtcccaactagcagatagttatgttaaactaattaataaaactaaacccacagttcaagagagttgtgtgtttcggttgctggaaggctaaacaccaaa

SEQ ID NO: 16914 - protein, 89 aa, DROSOPHILA
MRLSSILNGQHFGNLAKVHGIVTYKLSPFEQRAFAGAISKGLPNMVRRFRSNVFIVTPPFIVGYLIYDLTERKHTALLRKNPADYANDE

SEQ ID NO: 16915 - DNA, 2551 bp, DROSOPHILA
tttttatcgcattgcaattttcatccggttcgcttttcttttcctctcaagattttcctcttcgtatgccagtttgtgtgcgttttaagccacatttaagatacttggctggtattattgacttgcgagttgataaagtgccataaatgtcaccccattaaaagcgggtaacagccgaggcaaagctaaaaggtaaaggtaagtcaaaggtaaaaatacgcgacgctcctgggggttgttgttgtcctggttgtcctggaaaaaagggagggagataaatgcggttgcttgccaggataatgcgcctcaactcaattgggatttcaaaagtaaagttgaaattcatgttcggctgcggcaattgtcacagatggtttaattgaagtaattacatacgagacccgtcaggatttgcccctccaccgacactttgcacttattattttattatattatcatatatatgtatatacataggtactaagcagcatcatcataatccagccatttggggtttgggcagaaaagggttaattgagttgtttgccattgttttatctgcttttccggcactttgcctttccgacttctctaatgagctaatgacaacagtgtgtaattatttaccaggagaaaaccggaaaggtggacacatatttatgccataacattttaagtgggtttttgttggtttttcgactattttctatggggctgccgtttaggggtttgaaagcgggttaaactggttactgacctattagggatcgttaaaggaagctgtttgagtggctaaatttagtttccccaattcgaacagaattttccaacgaattaaacaaatatttgatcaccatattgtttaagcgcctatcaataaattcgtacccaaaattgcatctgagcaaacagtgaaacgtcttctttagcggagtataaaaagctgcccagcagccgaagtttcaagcagtatcattaattgcacgatcaatcgcctaaaatgttcaatattatccttctggcaacaatcctagtgagcgtggctcaggccacaatcatcattaagcccgaaaatcccgtggaggagaccaccaagtgccagatctactggcgcgaacacgcctgggctcttgaagattgtgtgtgccgggtcttccagaacggctgtcttctgaacgaggagagcaatcggcgggaaaaggctggaaaaacccgtaagatgatatgctattaaaacactatcatttagttataccttatttttgtttatatttttcagctctaattccggtcaccgagcaggtgtgccagaagttcatcaagcgcaagtgcttccttggatggcctgtgctggccaagttcccgattccatcgccatgcggatgcaatggcaaacagggcagtctggaaatcaagaagtttttgagtctgtgcgaactgcagaagtacgcagctgaatgcaacaaacgtaagttgatgtttgtatagaaatatagttaataacataaataattatatctttcagcctatatcagctactcgaagtgttaaaagatgacttgtaattgatgatgataatttgactacctcgaacgcgtccttgttaaaaataatgaataaacattttaaagcagcaaacgtttttgttacatttgtcttaagagttgattgactaagcgcctaaaacggtgcattattacctgattttataagtcttcgttgcttatgttttttagagtctgtttttaggaacctgtgtgataaagcttttttttggagtggaaaatttatggctgtgtttttttggccagtcaaggttgtttgcgtacgttctgcaaacattttactttcagatgcactaagtcaataaagcgctttgccacaactgctaaaacagtggagtgtattcaatataaatagccaaatgagatattatggggacagttatattcttagccacttttacgacatgttcaatattaaattgctgcttttgttattggccgtttcgtggttccaccatggacaagccgtccaggagacgaaaatcgaagaaaaaccagtatcagagcctgaaattgaatccgaaataaagaactctacgagcgtcccaagtaaatgcaatatttactataggaactaccaatgggctcttcaggattgtgtctgccgttgtttccaaaacgaatgccttatgcaaatcgagagcgaccagcgcaaaaaggagggtagatcccgtaagtaaattaaccagttaagtaaaaagtattttatttatatcttgtaaatacagcatttgtgcccgttacggaggaactctgccgttccttcatctgcaaaaagtgcagcgtgggtttccccgtggttgctgaattccccattccggctccctgtggatgcaatcgaaagccaggatcgattgccacagagagattctacagtttgtgccacctgctgaaattctcagcggagaacagcaaacgtaagtcaaaagaattggttccaaattttcggtaatatatacattttgtatctttacagcattcctgac

SEQ ID NO: 16916 - DNA, 429 bp, DROSOPHILA
atgttcaatattatccttctggcaacaatcctagtgagcgtggctcaggccacaatcatcattaagcccgaaaatcccgtggaggagaccaccaagtgccagatctactggcgcgaacacgcctgggctcttgaagattgtgtgtgccgggtcttccagaacggctgtcttctgaacgaggagagcaatcggcgggaaaaggctggaaaaacccctctaattccggtcaccgagcaggtgtgccagaagttcatcaagcgcaagtgcttccttggatggcctgtgctggccaagttcccgattccatcgccatgcggatgcaatggcaaacagggcagtctggaaatcaagaagtttttgagtctgtgcgaactgcagaagtacgcagctgaatgcaacaaaccctatatcagctactcgaagtgttaa

SEQ ID NO: 16917 - protein, 142 aa, DROSOPHILA
MFNIILLATILVSVAQATIIIKPENPVEETTKCQIYWREHAWALEDCVCRVFQNGCLLNEESNRREKAGKTPLIPVTEQVCQKFIKRKCFLGWPVLAKFPIPSPCGCNGKQGSLEIKKFLSLCELQKYAAECNKPYISYSKC

SEQ ID NO: 16918 - DNA, 2455 bp, DROSOPHILA
catttgaataaatccccaaaatagttgccttcacttgctacaaaaacactgacaacttttgacgcgaaataggtattaaataatattaaagccatatagtaaagaggcttaccgatcagcaccgatacgattgacatctttaaattaacttaatatgagttcccattttaactgcatttatagagttggaccttaaaattactttgtttgcctttattaacttttgataaaacaatgcgtttattgccagactgttattgcttaagcttttgttaatatcttctgttgctaaacaaaagaacattttttatccagacttgattacaattccaagacatctgcaatgttgttacaggacatatcatcacagcgtcgaaaaatcactaaaatataaaatcagtgagcgctgaataagacttaaattgaaaatgtgactcacgaagacaggtggctttttccatttcacatcgagacacactgttccaccttcctctgcgctcccgacgacaatgacgattaaaggaatctatagtctcatcaaatcgtcctattctggatgtaaatcgttgacaatcgttatagatattctcacagtacactcgactccattgagcatcaatgtggcacaattgcaggatacaaagaactgcaaaaaaaaaatgtgttgttagaaatataaacaatcgttgacaaaataaaactcttacccaacagcaagaatattttccacatttttaagttttccaatctgatatgatctacactatctgcgcggttgtatttatattggcaatcggatcaagatttcttaccatgataaaaggaacaccttttcccagtttcattttattcagatgattcttttgttgtacatgctaatcgatgtcagtaggactatccttgctctaatttgactttcattattatacaagtgttttttctctgttcgcccgtgtataaaacgagttatctcagtttccagctatcagttgtaataaaaatgcggtatctgtgcgttttttccttaacacttatcctttgctgcctttcaataaaggctcagagcttaaattgcaccaggcttcgagaaaattgtcgtccttgcacccgccgcttggtggatcctattaacgacctggaattcattaatagcgattgtagggagaaacttagaggacgttggatttggcgggatgtaaggcgttgtgatatgcaaattgttgcgtgcgaaagtaagtataatatatataagtatttaaaaagtatagtatatagtatgaatgttttaaattgcagatcatgaaacccgactggattgcgagaatgtggctagactaacaggcatgagacggattcgttgatttttcttagctcttgagagaaatttaaagctatttgtctttttaaacaatatttttagacataaataaagaattatgtgtgtacgagcaatgtaagtacttgtgtgtattttattttccgcaagtccatagttggacaaaatcgagctaaatcaagctgaaaaacgacctttgtccaagtttttaatatatattgttatctatcttctacttagcaaaggtaaccaaaagaataacctatattttgggatttgagattattaaaatatttcattaaaatattgtagcaagaaaatatacatttattgaattacaaaatatatcaaagttttgcagaaagaacaacccattcgattgcaatatttaatgagagctagaacttaaaatattacttttaaataaaaataaagaatacaaaattgaatcttgttaaatatcatttctcgctttcagtttatttagggtggtttaaaattttcaccaaagacgcatgcggtgggcaacattcttgcaagtcggtgtttcgcaatcgcgcacagtagctgaataattagaaaaatattatatttggtccttcttaagcttttggagatgttcactcacataaacaggctattcgcagaagatcacatcggctaacatctgaccatccagaatccgaacggcgacagtagtcgttaaagaactttgaagtatcgtcctgttttcccaacctagcttcattttcaatacacttatcgtaggtgcgaatgcagattttatgacgcctgttagcttcttcgggattggcttgtatgtgagccataaacaggcacacaatagctgtgagaaagtagctttattaccactttataaatacctattgatagaacttacctaatggcagcaaaagttttaacatggcgtaacgcttgaaatagttttaaggtctaaactggctacactggaacgtgtcccgtggtatttatacccataactatacacttaaagctgtcatttgtaattgtccaaaaagcgctacagaattaattaaaaacccaactgcattaaacacatgtattgggatcatatctgtttctttgtccagattcaat

SEQ ID NO: 16919 - DNA, 391 bp, DROSOPHILA
atgcggtatctgtgcgttttttccttaacacttatcctttgctgcctttcaataaaggctcagagcttaaattgcaccaggcttcgagaaaattgtcgtccttgcacccgccgcttggtggatcctattaacgacctggaattcattaatagcgattgtagggagaaacttagaggacgttggatttggcgggatgtaaggcgttgtgatatgcaaattgttgcgtgcgaaaatcatgaaacccgactggattgcgagaatgtggctagactaacaggcatgagacggattcgttgatttttcttagctcttgagagaaatttaaagctatttgtctttttaaacaatatttttagacataaataaagaattatgtgtgtacgagcaatgt

SEQ ID NO: 16920 - protein, 98 aa, DROSOPHILA
MRYLCVFSLTLILCCLSIKAQSLNCTRLRENCRPCTRRLVDPINDLEFINSDCREKLRGRWIWRDVRRCDMQIVACENHETRLDCENVARLTGMRRIR

SEQ ID NO: 16921 - DNA, 5672 bp, DROSOPHILA
gcagaggaagtgcaccaggatttgtatgaagacacagatcgttattataaacattatggcctaggtggtgctcctatatttgctgcacccggaggttatgtaattttcgcactgctccgcggatgaaggcggccgagtacgtctaacactgggcgcgatctctgcacttttggcagcccataattgtgcatatttttagagccagcacctgccattgtaccgattatgatgccaaatttttaccttgaaattcgacttttacgctgcaatttcctctcgactcgtctcaaccagtgtgaccgtggacgggccgcttgaacataccaagcagttaggctttatttttgaaaaatgtcctaaaagtgccgctttttaagattgatgtcttggacagaagctaagtgcaggccaccaccagaatgtgtaactttgtagactttcagcgtggacttgaacctaatttgtgtggatagcggatctttaaactattagtggattcttattaaaatataacaataaaataatgtaaaacataattgcttacctttgccgtaataaaatatgtgagcggcttaaaaacttaaatttcgtgaacgaaaagattatatttattcaaattaatagacagaatagacacatggaattgtaaaatcgagggctacttatctttttaacttcattttctgtgattaggcatacaaagtattcaaacttgcccactaaagatggcacattcatctcaatatatgtaaaatatcatataaataattttattgtattcaaaatgcattagattaaaatgagttgtcaagcaagaatacttttcctgccattattagccttttatacgaatgttgagatatagtttatacctttattaatgattaacatttatacagctatgagatgatgcatcttacactttaacaattatttgcgcgatcaggactacgcaaatagacaagatttcacataaacggcggcatctgcctacatccgcttacaaaacatagacgaaggtccaatacagagcgttgaaggcgaggaacatggccggaaaaagaaatcgcgaccgccggtctatccacatggcgatctcctgcggtgtcatggtggtaaaggtgggcggcgtgtcctttttatccttgtccacatccacgatatgatcgttgttcgtacgcgcactgcagatagacactgtatctgcctcggcgcactccgttcttatgatgggtaaattgggctaaggacatgagaaatgttaaaatacagaaagctcatgaaagacatcgatctggagtacttacatgcactgtcaaatagttgttgaagccctgattcacagtgccattgccattgcgcacgctctccgtgctggaaacaatgttgtccaaactggaacacgatctagccctggactcgttgctcaaacttccgccaatttgacggcgggccggtcgtggtgtcaatgtggattttatgatgtacttgctgttgaccttcttcagctcaatgttctccttgcggcgccaaatggtgttgacaaaggcaaactccaccaggctgccgaagatgaagaaggtgcagcccaggaaccacacctccgacacctttatgtagctcaccttgggcaggttcttgctctgcgatgaggaaagcgtgatgaacgacaacatggtgctggttcctaagagcattggatattagttacaagtgagtcatatcataatcatttcgagttactaaattctttctaagatgttgtaattattcctttaatttaagcaatcatttattctatgactcaacatgacgtatgcgcaatgttctaaatgaatataacacatacgcactgtgttgcaggtcaacaaattaattatggatttcgaatacgaaatgttgcttaagttaatagtatttaaatgtaattacccagcataatccttggaggagatgcgtccgcctgaagccagaaggacacccaagagatggccacgatcatcatggagggcaggtaatagtcgagcaaatagaagccaatttctcgcttcagattgaccgtaaagctcagcgaactatagttaccagctgcaaggaaacagtattaagaaatattcctccaacaaacacctcgtatgctaaccaaaagctccatgccgcagattgtccccatccgactgcacaatcgtagtgttgtgccagaactgggccatattgtactcagtgagcctcatttccgggtcaaaggagatgggcgtgtgcggctcccactccagaatcaaatcggaagtgttgtacatccctagtatacatataagtaatggaagttaatatatatgctttaatcctatgatgaaaccgcataacttacagctctccaggaccgtggagcagaactgctggtcaaagggaaacttctgaaagttcatccagcagtagagactggcctgcatgcgcgtggagatgatcacgtttccctcgggcgaaagcgaagtcaggacgtccttctcgtccgtgcccaggatactggactctcgttcgttggcaaagaagatgtgcggcagccagaggcgttcgctcaggtgcttctggcccaggatgttgtcgctgcgattgaaggccttgtaagccagccgcttgtcctgaaatcgcagctgcaacagcgcgtgcatcttgaactgcagcaggtcggagttgaggttctgcaggaagtacacataaatacgcgtcttcaccacaatgggcagtcgttttccatcagagtcgtattctgcgaacagaaacatgtattaaactgacttatatacattcgaatattcaaaatttataccaaatggtctttccagtcgatcatagcggcagacatgtgttaatcgctggattagctgggtctgttgcaggcttcccgcgtccgccattgaaggacattcctcttcctcggctttgaccctacaaaaaatgtatttagcttagtgttattccttaggcaaggatatttaataaatgagctgtcactcataatttattagatgggaatgcaatgttgccttcctgtaattgtagaacccatttacttggcagaacaaaacttcaagactgcctaactgaaaattatttaaccaaggcaaattttaactgttttcttaataagaggtttgttttgagagcgatcttaaatgacagtatttggtaagcttaaaaaacgctaatacatttcagatcacaatggtaaaacatagactttttgcctcctaataacagcttgaactgagtacaatttttattttacaaaaggaagtagtgtttagcaacttacagtagctcaaaaagaatcgcgacttgaacaactcgttatccgcccttttaagcaatgaatctatctgagaacatttacaatcagtaataaagacaaagtaattaaagtatgtacattttttggaataacttcgattaaaacaattaaatgaatttgtaggcccattttccgatagcactcaaaatgatttcactcggctccactcgattttttaatgggggagttagcatgactgagcagtgagcacctttaagcagctgtgcaagctcatttgcagctaccttaaaatgtcaaacagcagaataaatggctgaataaaaataaataatagcaaaatatttgtctcctcatatggcgctcgttatttaacttgcattttatttcgttacttcgttgtttgtatgtgttggcttgcttgcgcaacaacaaaatgttttaattcaattaatcgagttgacctggtcccgtcccatcagagcaggaaactaattatagccctgttgataaagcgcttagatcttgaacttatccgataagaaaatttcaccgtttcgcgacctttttcgcacatcaaaggagtagtgccgactgtaaatacttttcgagaaaatcttaattaaattctaatctaaagatttgtttacgcaattcggtgaagatttttaaggggctttgggggaattccgaaagcataagaatagaagacctgaaaaaaacacgcgcatctgaaatttcccaagggaacaggttacaggaaatgttaaaatgaaaagttaccacatttttcatgcgtaacccttttttttatcagcctccatgtaaacattttcacttgaatctctttgggaaacgttatcagacatactttctgaagcacccctatcaaaatgatctagatgggaattttcgacgaaatgttgtttattcatttcgactatatctgttgacatcttatgcttatgtttaattgcgtgtttagtttaaagcctttctcagtggctttctaaacaaatacgagatggaaatttggcaagatattgttttttccagaatggaatatcttctgccgtgagtaaagttctcatcgaacgaaggtgcactgtttgataatttttgggaaagttacttccacttacggcgaaaaaaaaaaaatgaacgtgagagcaaattattatctaaatttagacagttccaccaaaatgtatctttatcggagcattgctgaaggttgaatgatttgtaagatgttttgcgtgctggatgtttcccggtcaaaacttacccaactgaagtccatatgctgaggaccaagatcagcgtgatccaaaagatttcactcagatgcagattcatcatgtggcttgattctttttttatttgttttttttttttgcaatttaaacagtgtttcttgatttggtgggaggtttacaacttttactttggctggccgctagcgaaatgattcgatttcgttggcttgtaaaattatatgctcatatttcacacgatctcctcgcacattcacttcacacattcactttgcaattaatgcaaatccacgtcgatcggcgactttatttacgaatttcccgcaactccctcgaggacgagtcgctctgtccgctctgcgttcgtcggcggtttgagatcgcgccgcgtttgcgccctctagtggttgagaaatactaggtaacgctctgcctctgccgctgccactgccactgccactgcctctgccactgcctctgccgacggcccaaaacacactgacttgtgggcggagaggctctcggcttttttcgggcctgataagaccggcagatacgatacgatggttctcctcccaagtcgcaactcccaaccgaaccactcaatacaaacagcagcagcagtagatattgttagctggtcaagagctggaaggcaatagcgcagggtcgattggggatcggctaacttataagcattctatagaccatatactagacgtactcacccgcgtgcgtttgccactcggagaaaaactattaaagatgtagatacatttctcatctggatgtagggcgatcttttcgactggcaccttaactctgcccgggaaagctgcacttctgcaatccataccaattcttaagtaataaaaaatattcccttcttactaaatagtagtaatctaatatcaaaagattaattttattttcttgtattcaataaataatatccataagatgtatctcatatacagtgggttcggatcaagcaggccatgaaagaaggtttgcttgacaactatttgttttcaaactcatactcaaaacagcaaaggtagtatttaaccttttattagactcgc

SEQ ID NO: 16922 - DNA, 1530 bp, DROSOPHILA
atgatgaatctgcatctgagtgaaatcttttggatcacgctgatcttggtcctcagcatatggacttcagttggggtcaaagccgaggaagaggaatgtccttcaatggcggacgcgggaagcctgcaacagacccagctaatccagcgattaacacatgtctgccgctatgatcgactggaaagaccatttgaatacgactctgatggaaaacgactgcccattgtggtgaagacgcgtatttatgtgtacttcctgcagaacctcaactccgacctgctgcagttcaagatgcacgcgctgttgcagctgcgatttcaggacaagcggctggcttacaaggccttcaatcgcagcgacaacatcctgggccagaagcacctgagcgaacgcctctggctgccgcacatcttctttgccaacgaacgagagtccagtatcctgggcacggacgagaaggacgtcctgacttcgctttcgcccgagggaaacgtgatcatctccacgcgcatgcaggccagtctctactgctggatgaactttcagaagtttccctttgaccagcagttctgctccacggtcctggagagctggatgtacaacacttccgatttgattctggagtgggagccgcacacgcccatctcctttgacccggaaatgaggctcactgagtacaatatggcccagttctggcacaacactacgattgtgcagtcggatggggacaatctgcggcatggagcttttgctggtaactatagttcgctgagctttacggtcaatctgaagcgagaaattggcttctatttgctcgactattacctgccctccatgatgatcgtggccatctcttgggtgtccttctggcttcaggcggacgcatctcctccaaggattatgctgggaaccagcaccatgttgtcgttcatcacgctttcctcatcgcagagcaagaacctgcccaaggtgagctacataaaggtgtcggaggtgtggttcctgggctgcaccttcttcatcttcggcagcctggtggagtttgcctttgtcaacaccatttggcgccgcaaggagaacattgagctgaagaaggtcaacagcaagtacatcataaaatccacattgacaccacgaccggcccgccgtcaaattggcggaagtttgagcaacgagtccagggctagatcgtgttccagtttggacaacattgtttccagcacggagagcgtgcgcaatggcaatggcactgtgaatcagggcttcaacaactatttgacagtgcatcccaatttacccatcataagaacggagtgcgccgaggcagatacagtgtctatctgcagtgcgcgtacgaacaacgatcatatcgtggatgtggacaaggataaaaaggacacgccgcccacctttaccaccatgacaccgcaggagatcgccatgtggatagaccggcggtcgcgatttctttttccggccatgttcctcgccttcaacgctctgtattggaccttcgtctatgttttgtaa

SEQ ID NO: 16923 - protein, 508 aa, DROSOPHILA
MNLHLSEIFWITLILVLSIWTSVGVKAEEEECPSMADAGSLQQTQLIQRLTHVCRYDRLERPFEYDSDGKRLPIVVKTRIYVYFLQNLNSDLLQFKMHALLQLRFQDKRLAYKAFNRSDNILGQKHLSERLWLPHIFFANERESSILGTDEKDVLTSLSPEGNVIISTRMQASLYCWMNFQKFPFDQQFCSTVLESWMYNTSDLILEWEPHTPISFDPEMRLTEYNMAQFWHNTTIVQSDGDNLRHGAFAGNYSSLSFTVNLKREIGFYLLDYYLPSMMIVAISWVSFWLQADASPPRIMLGTSTMLSFITLSSSQSKNLPKVSYIKVSEVWFLGCTFFIFGSLVEFAFVNTIWRRKENIELKKVNSKYIIKSTLTPRPARRQIGGSLSNESRARSCSSLDNIVSSTESVRNGNGTVNQGFNNYLTVHPNLPIIRTECAEADTVSICSARTNNDHIVDVDKDKKDTPPTFTTMTPQEIAMWIDRRSRFLFPAMFLAFNALYWTFVYVL

SEQ ID NO: 16924 - DNA, 4951 bp, DROSOPHILA
tgtgaaattttagaaattttagacttaaaaatgctagcttgacaattttcctaattttttcgaagtgatttctttcatgaaaaaccaagtgtagaaatgtaatattttagattatatttaacttatatggactttcaatattatatgaaaaaatggtgaattttcattaaaggaatatttccaaacaatagtgaacggtatattcgacatcatcgactgtcatagttttaatgcctgcgcatgtttatgggcaaaaaaaaagtaaaatcttaaaaatcctaacattcaaaagtgtgggcgtgacagttctgggcggtttgtgggcgttagaatggccgttgcaacaaataacatctaaatgcctaatcttaaccttctagcttttatagttcccgattctgacccacactttatatactttatatggtcggaaacatctccttggacctgtgacatatttttcaatgaatatagcatgcccttttacaatatacgtctatcatatatatgtatacctaaaacgttcgggttttcaatcatataaaaacacttccaagcataaaagttagaaaaaacacaattttaaatttggacaaaacgtgaaaaggtaattatattacccagtattgtatttcattgctatattgctatatgagtctatattcataaatgtatccattttaataaaaaaatattacatgaaaataaacgtttttcaaatgtattgtccaaatctattcattaccttgatggcaatttgaaaataacgtacttttgcggaaatggtctcttttgttgagttgccaaacagacttctacacatgttgggtgttgccatcctaatattttacacgagtccggggctgccagccataatctctaatatattgagagttgccatcttgatttccgccaattgcttatcgattccaacattgtcatcgttgtgttcccatctctatatttcaaggtaaatataaacctaaaattaaaagtaatattttactgcagttccgtgcatttcgtctttaaatcgtcttatttagatacaccggtaagttaaggggagcgataaaccaagaaagggttaggcttaccgtggcgtacgaaattcgtcgtttttttgaccacaaactaatgcgtcatcgccaaacagacaactatgtgcaatattttgttgtggttcgttgtaattgtttagccggcactcattcctgggttgtgtgtgtgcgcgtttgcgcttggctcgaatgtttttcgcaatgtttgattagaaagtcggcggcgccagtggaagaagaagaaacggggagcaacagtggcagcagcaaagtaacaaatttcacatccacatgctctctctctctctcttttgtttcaccgccagccacctaacttgcatcagaataccctgtaaaaatgagggtttgctggactaatcttagtattcgtctcctatttaaccgttacattttgtcagttacagttttgtaaaaagtattggtatatttatctatatctgtacactttaaaatcttaattgcagaatggtacaaaggatatttatgttggccaattatttacagggtatcccctagcccattaccgtattatgaccaattctatgaatcctatttaatgaactttcgcaatttcaggcgcttagaaccgttatggacttcgctagcgtactcggtaagagcgaggcgcatcagcgcaccattatccacctggacatggactacttctacgctcaggtggaggagattcgggatccaacgttgcggtcgaaggccctgggcattcagcagaagaacatcgtggtcacctgcaactatgtggcgcgggccaaaggagtgacaaaattgatgcttattgcagaggcacagcgcatctgtcccgatttggttcttgtcaatggagaagacctcgccccttatcggcagatgtcgcaaagaatctttgacctcctgcttaactacactcccctagtggagaagctaggcttcgatgagaactttatggatgtgactgcacttgtagaactgcgacaggctcacgttgctgaggccctgttgagaccaccggtgggtcatacgtatccggcggatggtactcccttgtcaaattgcgattgtggctgtgcccagcggctggccatcggcactcggatcgcccaggaaatcagggaggagctcaagctccggctgggaattacctgctgcgctggaatcgcctataacaagctactggccaagctagtcggcagtagtcatgagccaaatcagcagaccgttcttgtttccacctatgcagagcagttcatgcgggaactgggcgacctaaagcgagtcactgggattgggcagaagacgcagtgccttctcctggaggcgggtatgtcatccgtcgagcagctgcagcagtgcgacatggacgtaatgcggaagaaatttggatttgaaactgccacccgactgcgagatctggcctttggccgtgacacgagcttagtccgtcccagcggaaaacccaagaccattggaatggaagatgcctgtaagccaatatccgtgcgtaccgatgtggaggaaaggtttcgcatgctgctcaagcggctggtggagcaagtaagttgacagtcatctataagttcagtaacagccaacttacgaacacattttgattccccaggttgcagaggatggacgcgttcccattgccatcaaggtcgtgttgcgcaagttcgactcgcaaaagaagagcagccaccgtgagaccaaacaggccaacattctaccctccctttttaagacctccatgtgtccaggagaaactggtgtgagcaaggtacaactggcggatggcgcccaggataaactcctcaagattgtgatgcgactttttgagcgaattgttgatatgagcaagcccttcaacatcactctactaggcctcgcattctccaagttccaggagcgcaaggttggctcctcatcaattgctaatttcctgatcaaaaaggcggatctggaggtgcagtctatcacctcactgacaaatacgagtctcacaagtcccacagcggagagtcccacatcagacgagtgcgccttccgctcctcgccaacaacattcaaacccagcgatcagttctataggagaagagccactactgcatcacctgtgcccatgctacttgataatggttccgaatcagcggccaccaattcggatttcagcgacttctctgagactgaggtggaaccctcgccgaaaaagagtcgcattggccgattacttgtttctaagcgcagccgcttggcggcggatgtgggagattccgccgccgaagtagcttcgcccagcaaactgcgtgtctgtgatctgcgcctcaactcgcgggatagcgagaaagactttcccatgagcaccacgccttctacctctacgtccgcgcctgcgcctcgcttccgcaccgtccagccaccaaacacgttgctgcaacggatcgacggcagtctacgctttgttacgacgcgcactgccagtcgcttgagctcaaatgctagttctacggcatcctcgccgcttccttctcccatggacgactccatagccatgagcgcacccagcacaacaaccttgccatttccctcacccaccacgacagcggtggtcaccagcagtagtagtacggccacgtgtgatgccctaacgaatatagtttgtccagcgggtgtggatgccgaggtgttcaaagagctacccgtggagctgcagacggagttgatcgcatcgtggcgcagctccctggtggcggctgttgagcaaacgaatgggaccggtgccgctacaagcgcagctatcgccagtggagccccagcaactgccacaaccgccagcggacaaaagaacactttgtatcgctactttctccggaataagtgatgcagtgtatccgagcatcacatcgtttttagttataatggtaaagagaataaatttgtttaaatatatgatatatttttgtaggtatacggttacagagtgcatgctttagggtgccgcattggacgaacataagctaggataaataactagtgggtttcttgaactgaatgagtgattttgttaagtttataataccgaagaatgtcattagataaccgcattttcatttaacaagttttaatcttcgctaatttataaaacattccatatgtgttaacatattagatatttatatattttttccagcattgttttccattcctcagcctagtacattgattatcatgctctcatgggctttaatgaattacgttcaaatgcattgttcagaatcttgcctagaaaactagctaccataagaaataatatacgaatataaatactcaacgcggtattatcgctatcagaggcttactcaataccttacttcttacatatcctagcggcattcagtccaaagcggtctcccagctgtgagatccgagaaacaagtcgcgtccttgttgtacattcactattacatttattacttcatttacaattcatatcatacatattcaattggttgggtcccctacttaagcttagttaatacacaatatctgaatcccgacatctcacacaaaggaacaacacttattgtaattgagcttgacttgatacaagtaaattgattttcagttttgtagtttttaccttgatgaaaatgccaacgacagttgaacagtataaaaatgtctttaacctattctaactaatacaaaaataaagtgaagtccttggaaatgcatgtggctcttaatcgaaggggagcgggaagttggaagatgttcagtggctcagccagccgcacttgataaagaacttgcgcagcgaagtctccataggactacccaacgatggtgctccgctcaagcagacagtcttaaccgagagg

SEQ ID NO: 16925 - DNA, 2283 bp, DROSOPHILA
ttttactgcagttccgtgcatttcgtctttaaatcgtcttatttagatacaccggcgcttagaaccgttatggacttcgctagcgtactcggtaagagcgaggcgcatcagcgcaccattatccacctggacatggactacttctacgctcaggtggaggagattcgggatccaacgttgcggtcgaaggccctgggcattcagcagaagaacatcgtggtcacctgcaactatgtggcgcgggccaaaggagtgacaaaattgatgcttattgcagaggcacagcgcatctgtcccgatttggttcttgtcaatggagaagacctcgccccttatcggcagatgtcgcaaagaatctttgacctcctgcttaactacactcccctagtggagaagctaggcttcgatgagaactttatggatgtgactgcacttgtagaactgcgacaggctcacgttgctgaggccctgttgagaccaccggtgggtcatacgtatccggcggatggtactcccttgtcaaattgcgattgtggctgtgcccagcggctggccatcggcactcggatcgcccaggaaatcagggaggagctcaagctccggctgggaattacctgctgcgctggaatcgcctataacaagctactggccaagctagtcggcagtagtcatgagccaaatcagcagaccgttcttgtttccacctatgcagagcagttcatgcgggaactgggcgacctaaagcgagtcactgggattgggcagaagacgcagtgccttctcctggaggcgggtatgtcatccgtcgagcagctgcagcagtgcgacatggacgtaatgcggaagaaatttggatttgaaactgccacccgactgcgagatctggcctttggccgtgacacgagcttagtccgtcccagcggaaaacccaagaccattggaatggaagatgcctgtaagccaatatccgtgcgtaccgatgtggaggaaaggtttcgcatgctgctcaagcggctggtggagcaagttgcagaggatggacgcgttcccattgccatcaaggtcgtgttgcgcaagttcgactcgcaaaagaagagcagccaccgtgagaccaaacaggccaacattctaccctccctttttaagacctccatgtgtccaggagaaactggtgtgagcaaggtacaactggcggatggcgcccaggataaactcctcaagattgtgatgcgactttttgagcgaattgttgatatgagcaagcccttcaacatcactctactaggcctcgcattctccaagttccaggagcgcaaggttggctcctcatcaattgctaatttcctgatcaaaaaggcggatctggaggtgcagtctatcacctcactgacaaatacgagtctcacaagtcccacagcggagagtcccacatcagacgagtgcgccttccgctcctcgccaacaacattcaaacccagcgatcagttctataggagaagagccactactgcatcacctgtgcccatgctacttgataatggttccgaatcagcggccaccaattcggatttcagcgacttctctgagactgaggtggaaccctcgccgaaaaagagtcgcattggccgattacttgtttctaagcgcagccgcttggcggcggatgtgggagattccgccgccgaagtagcttcgcccagcaaactgcgtgtctgtgatctgcgcctcaactcgcgggatagcgagaaagactttcccatgagcaccacgccttctacctctacgtccgcgcctgcgcctcgcttccgcaccgtccagccaccaaacacgttgctgcaacggatcgacggcagtctacgctttgttacgacgcgcactgccagtcgcttgagctcaaatgctagttctacggcatcctcgccgcttccttctcccatggacgactccatagccatgagcgcacccagcacaacaaccttgccatttccctcacccaccacgacagcggtggtcaccagcagtagtagtacggccacgtgtgatgccctaacgaatatagtttgtccagcgggtgtggatgccgaggtgttcaaagagctacccgtggagctgcagacggagttgatcgcatcgtggcgcagctccctggtggcggctgttgagcaaacgaatgggaccggtgccgctacaagcgcagctatcgccagtggagccccagcaactgccacaaccgccagcggacaaaagaacactttgtatcgctactttctccggaataagtga

SEQ ID NO: 16926 - protein, 737 aa, DROSOPHILA
MDFASVLGKSEAHQRTIIHLDMDYFYAQVEEIRDPTLRSKALGIQQKNIVVTCNYVARAKGVTKLMLIAEAQRICPDLVLVNGEDLAPYRQMSQRIFDLLLNYTPLVEKLGFDENFMDVTALVELRQAHVAEALLRPPVGHTYPADGTPLSNCDCGCAQRLAIGTRIAQEIREELKLRLGITCCAGIAYNKLLAKLVGSSHEPNQQTVLVSTYAEQFMRELGDLKRVTGIGQKTQCLLLEAGMSSVEQLQQCDMDVMRKKFGFETATRLRDLAFGRDTSLVRPSGKPKTIGMEDACKPISVRTDVEERFRMLLKRLVEQVAEDGRVPIAIKVVLRKFDSQKKSSHRETKQANILPSLFKTSMCPGETGVSKVQLADGAQDKLLKIVMRLFERIVDMSKPFNITLLGLAFSKFQERKVGSSSIANFLIKKADLEVQSITSLTNTSLTSPTAESPTSDECAFRSSPTTFKPSDQFYRRRATTASPVPMLLDNGSESAATNSDFSDFSETEVEPSPKKSRIGRLLVSKRSRLAADVGDSAAEVASPSKLRVCDLRLNSRDSEKDFPMSTTPSTSTSAPAPRFRTVQPPNTLLQRIDGSLRFVTTRTASRLSSNASSTASSPLPSPMDDSIAMSAPSTTTLPFPSPTTTAVVTSSSSTATCDALTNIVCPAGVDAEVFKELPVELQTELIASWRSSLVAAVEQTNGTGAATSAAIASGAPATATTASGQKNTLYRYFLRNK

SEQ ID NO: 16927 - DNA, 4218 bp, DROSOPHILA
ttttaagtttaatttattctcgtttttatttttttgttgtggattttctttgtgtttttatttattttttttattttgtgtagtacgcgctatacatttaataatatataaaaatttgttaaaatcctaaaatttgttggttttaattaatattaattaataatttaaaaaatttttattgcagcaagctgcgtctaactaaaattggagcgtgtgatcatctacctctttcacagttcgaggccctcatctctctcagttttaaagttaaattttaaatttaccaagatcaagtttgtttgttttgttggtttctttgtttattactatatagcatacaatttttaaaaaaaaatctgttcttttgtattgtggtttttgttgtgtatggggtgtttgcgtgtttgtgtgtgtgtgtgtttgtattttcttgtgttgtgtgttatgtgtaattttatcaacgtcttttgccggactttggtgcatccggcaaaaaactcttagcatcttaaacagtatcacatattcatgagttgtcgaccggcgagccccaaagcgaatgccccagaaatatgattctggggattgattcgtggggctgtcgtctttgaatttcatgttggtttttttctttacttttcttccgctcttgtcgccttgttttgtttttcttgcttttgcgtttttgaaaaaggagaaacaacttaaaactctagttatttgttatagcactacgcatctaagtaaaatggtggtgagagtcacaattacaaaaatcgggccttacggtcccatatatagtattagtatgagagtgtggttggcgtaacctaatgtgtatgtgtgtgtgtgtgtgtgtgtttgtgtgtatgtatgtgtgtattaaaggtgtttgtgtgtgtgtgtgtgtggtgtaggtggggtggcttcgaatacttgcttcgttgttgcacttcaaactgcaacaaactactgctctcgatcatcacaggggtggtgttttttttgtttcgcgcagacacatatacgaacatatgcatatctgacagatcaagctgatcaccattagttggtgggcgtggcgatggccgcactgggtctatgggcgtggctgccgaagctatagctcctgcgtgcacccaaaccatcagcggaatatagcttattcttggtgatcgtatactccggactgatggtgatcgtgcgggccaaactcttcatgaactgcggcaacagcgacgtccagccgcgatgatcctgcctgagggtcagatacacttcgaatgtggacaccgtatccgaatcgaccttgatcgaggcaatgcgacgcgaattcttcggctcatcctcgaactcaatgtagatggtgcagccgcgtatgccgcggggctccttctccgacacgcggattatttcccgggccacgctcggcgtgagatcacagggtagcgacacttccgtacaggtcaaatgacgcgacttggccgccctcagttcgtcgagcaatcgcagggacagctcctcgacagccttcttatcgtagttgctcagtgcatagtcagcgctaccgccctcctcctcgtcagcagcgtagtagtagtagttgctattgctattatagctgccgctgggctttgtcttcttgctctgactttggccaacattgttgttgctgctgcccgccggctgcttgtgcttaatactgctggatgtggatgtggttgtggatgtggcggtagcattgctgccattgctgctgcccccggttgtcgtcttggccttcttggacatcaggtccagagtgtatgccgacggcggtggcagtctgctggtccaatctggaatgattgaaaaggaggaaaaacgattgattagtaaaaggttttggtaataaaacgaggtagaatactattaagtttcatagagtgtaaaaatgtagtgacgaatgttactagtcaatcttaaaacacctcttaaattctattgctacatctggcaaaaattaggaataacgcaacggaagccaaaaacaaacaactaggcaatgaggaaacagccgcttggcaacagcgaacgagagttcaaagcgcagcacgcaaacgtgaagcagaggcaaaagcaacgttaaaaaagacggagggccagagagacgaaaagaaaacgaaaaatcatttttttattgctgctgggagttttttgttgttgctgcaatttgcgtacgtgacgaacaatttaacatgattttttatgacatttttcctttttgtaattgcaaattgattttttatgcatttttttgtgtaaatgtaaattacaaagttaattgctgatgaaatttcaaggagctttgtacagcagttgttgttcatctttttttttatttaaattatacacaagttcaagaacagtttaagtattcaaaaaacatttaaaaatatgtacgctttatacacaaatttgataaaagtagactgcattttgggaaacacatgttttattttaagttttaaaatctttctggaactttcccgattcttccctatagacacaaatttctctccgaattttcggtacacttacctttatttttgtttgatccctgcaggctaccgtagatgatttgttcccgagcaataacatccattttcatcggtttttctgtgttttgttggcttggaaagtcgaatcgaatcgaaagtcgttcgttcgctcgctcgctcgcaattttccgacggcttttgtcgccttctttgtatatcacttttacaatttaattaagcttatttaatttatcacaatttgctgtttgttttcttgctgattgcttaaattcttcctctttacgttctggttgcagtttaaattaacatttgttgttgttgttgttggttggttggttggttggttggttgttgttttgtagtggaaatcacagcacttatgttgtttaaacttttatttgttttgttgtatcacttaaatggcgttggtccgttgcatttgtttgatggcaaatttaaatgtttagtttagtttaaaaatataacgtcagtagcatagaattcttcgtgaaacagtgttgaatgattgaactttttggatttgtaaaattttagcagtggaaaaagtctggctatgcacgtttttgctgctgctgcttcatttgattttctggctgcgagagtctgttttcttgtgtactgtgttcagtgtttttttcgaagctactatgaatttctcgccggtgcgcccgccttttatactcatcgacgctacagctgtttcactcatctctgcgtccgccgtctcgctcatgcgcgctcatgccggcgaaagagcacgagagcgcaagagcgcaagagcgcgagagagagggatataacaaacggcgtacgtgacgcgaaaagaggaaaagaaaaccccgaatttgagagaaaaccacgaaaaggatgaaaattggaaatgttctcccgcaaggaaacgaataaagcaacaacaacaacaacaactacaaatgcaatggaacgaagtgaattgaaaaagaggcaagaacaaaaatccaccccggcattactggcaggctaaaaaaaaaattttccactccgaaaacgaaaactcagttgcaagttgcaacatgctgcaaatagcggctgttgccaggccgcaaaaaaagatacgaaacgatacgagagataccagctacaagatacgaatgtatcttcagaatttccttttcgccttttccacggaagcgggcgaatgcaaattttacagcgctcgccgcgcttcggcaaccaaaaaagtaaatctcgagagaaaaacccatcaagtcgcaggaaaatccctatgaggaatattaaatcaaagtttttgtgcaaacgttacttccattaaatatttaataaaagcgctgcctgtgtgcatttccttttagttttcatgtttgtttgtaacgctcgaagttaacattctgataaaataaaataaaatattctgtgcccgtttttatggttattcgtaaaaataaatttcggttcaatttcataaaattcttctatttttataccataatgactttcaaaaaatgtaatcaattaaattattctaatctggtagtaaattggttccataaaacagcaaatttatttgaaaaacgagctggaataggtgtgaaatatcaggccactattattttattatgcttttattttgcttttt

SEQ ID NO: 16928 - DNA, 1476 bp, DROSOPHILA
aaaaaacactgaacacagtacacaagaaaacagactctcgcagccagaaaatcaaatgaagcagcagcagcaaaaacgtgcatagccagactttttccactgctaaaattttacaaatccaaaaagttcaatcattcaacactgtttcacgaagaattctatgctactgacgttatatttttaaactaaactaaacatttaaatttgccatcaaacaaatgcaacggaccaacgccatttaagtgatacaacaaaacaaataaaagtttaaacaacataagtgctgtgatttccactacaaaacaacaaccaaccaaccaaccaaccaaccaacaacaacaacaacaaatgttaatttaaactgcaaccagaacgtaaagaggaagaatttaagcaatcagcaagaaaacaaacagcaaattgtgataaattaaataagcttaattaaattgtaaaagtgatatacaaagaaggcgacaaaagccgtcggaaaattgcgagcgagcgagcgaacgaacgactttcgattcgattcgactttccaagccaacaaaacacagaaaaaccgatgaaaatggatgttattgctcgggaacaaatcatctacggtagcctgcagggatcaaacaaaaataaagattggaccagcagactgccaccgccgtcggcatacactctggacctgatgtccaagaaggccaagacgacaaccgggggcagcagcaatggcagcaatgctaccgccacatccacaaccacatccacatccagcagtattaagcacaagcagccggcgggcagcagcaacaacaatgttggccaaagtcagagcaagaagacaaagcccagcggcagctataatagcaatagcaactactactactacgctgctgacgaggaggagggcggtagcgctgactatgcactgagcaactacgataagaaggctgtcgaggagctgtccctgcgattgctcgacgaactgagggcggccaagtcgcgtcatttgacctgtacggaagtgtcgctaccctgtgatctcacgccgagcgtggcccgggaaataatccgcgtgtcggagaaggagccccgcggcatacgcggctgcaccatctacattgagttcgaggatgagccgaagaattcgcgtcgcattgcctcgatcaaggtcgattcggatacggtgtccacattcgaagtgtatctgaccctcaggcaggatcatcgcggctggacgtcgctgttgccgcagttcatgaagagtttggcccgcacgatcaccatcagtccggagtatacgatcaccaagaataagctatattccgctgatggtttgggtgcacgcaggagctatagcttcggcagccacgcccatagacccagtgcggccatcgccacgcccaccaactaatggtgatcagcttgatctgtcagatatgcatatgttcgtatatgtgtctgcgcgaaacaaaaaaa

SEQ ID NO: 16929 - protein, 280 aa, DROSOPHILA
MKMDVIAREQIIYGSLQGSNKNKDWTSRLPPPSAYTLDLMSKKAKTTTGGSSNGSNATATSTTTSTSSSIKHKQPAGSSNNNVGQSQSKKTKPSGSYNSNSNYYYYAADEEEGGSADYALSNYDKKAVEELSLRLLDELRAAKSRHLTCTEVSLPCDLTPSVAREIIRVSEKEPRGIRGCTIYIEFEDEPKNSRRIASIKVDSDTVSTFEVYLTLRQDHRGWTSLLPQFMKSLARTITISPEYTITKNKLYSADGLGARRSYSFGSHAHRPSAAIATPTN

SEQ ID NO: 16930 - DNA, 2485 bp, DROSOPHILA
caaaagaataacctatattttgggatttgagattattaaaatatttcattaaaatattgtagcaagaaaatatacatttattgaattacaaaatatatcaaagttttgcagaaagaacaacccattcgattgcaatatttaatgagagctagaacttaaaatattacttttaaataaaaataaagaatacaaaattgaatcttgttaaatatcatttctcgctttcagtttatttagggtggtttaaaattttcaccaaagacgcatgcggtgggcaacattcttgcaagtcggtgtttcgcaatcgcgcacagtagctgaataattagaaaaatattatatttggtccttcttaagcttttggagatgttcactcacataaacaggctattcgcagaagatcacatcggctaacatctgaccatccagaatccgaacggcgacagtagtcgttaaagaactttgaagtatcgtcctgttttcccaacctagcttcattttcaatacacttatcgtaggtgcgaatgcagattttatgacgcctgttagcttcttcgggattggcttgtatgtgagccataaacaggcacacaatagctgtgagaaagtagctttattaccactttataaatacctattgatagaacttacctaatggcagcaaaagttttaacatggcgtaacgcttgaaatagttttaaggtctaaactggctacactggaacgtgtcccgtggtatttatacccataactatacacttaaagctgtcatttgtaattgtccaaaaagcgctacagaattaattaaaaacccaactgcattaaacacatgtattgggatcatatctgtttctttgtccagattcaatgaataataaattctttatgttcaataaattggggacacttaagacctcgcttccttgttggccatcatatataaggccctattctgaatatggttttatcagagtgtatatcaccaataagtgatttgaaaatgaagttgactgtctgcttcctggtgatcctgggctgtgtgatagtccatggccaatcgcccgactgcaaggaaataaaggatatttgctcgaaatgcatccaaagacttaatgatccctacaacaaggtggacttcataaataaaggatgtagaaacagagttagaggcagctatgtatggaaggaccagaatctttgcgaacttcaagcgatagcttgttcgggtaaaccaatatcttttcattaactttaaacactttcatcaatgtttaattggttattttcagctccgaatcgagcaatgaattgtgttgtcatcgccgatgttgccaaaatgcgcagagtgactccaagacctccaggataataaatgtagcatatggccaaagcatatgatattcactttcgggactggataatatttgtttctcattttcttgaagcaaatatattgaaattcaataaaatgcatttatcaggaattctgtttgtttatatagatttactaccattgccaacgcttttaaggagtataatataaatctcacaaatattaaaacagctagcgaagtaatatataaagttaactacactagacttgcaggcttaattacgacaaatgtaattcatgcttattcacgttctagaaaaataattaacttggaataattatctgttaagtcaaagtccagttaaagttaaaatttaaatcaatacgttcaatattacattaacacaatattatggatctccaattctggtcagatatttatagcacatatagaaataagtacatgagtaacagctgtggaattgccttgaatatcattactatatatatagcggtattttgagcaaataattttccttttccgattcaaatgaaatcagatttttgtaagtccgatatagtttgagattcgctttgtggttgattatcttatttgatgcgcgtccccaagatgaatctattcaaatgcaatgtttctaacaaagattaagtttaaaaaatactaagtatacggtgttaggaaaatagattgttcaaaaaagagttaagcaactttcagcccagtagaagtttacgttttcattgtgttatcataggtatacaaaaagcttatatattatttactatattctatgctgtaaatgttcaattcatgctagcttaacaattgttatcaaggcaattgcttaaacaaatataaataactataaacagaagccaattattgaaaagtggaaattaaaatcactttatttgctctcgttgaaaacctttcttttaattcggctgacaacatatttattcaatctcacaagagtaaaacaatgcaatttattaagaccgcaggctatcggcaacatttttgcaggacccattttcgcagcgaaccatagttactgaggagccaaaatcttaataaacatcctataaaataaatattaaatttacttacctatgcacgaggctttgacc

SEQ ID NO: 16931 - DNA, 413 bp, DROSOPHILA
atgaagttgactgtctgcttcctggtgatcctgggctgtgtgatagtccatggccaatcgcccgactgcaaggaaataaaggatatttgctcgaaatgcatccaaagacttaatgatccctacaacaaggtggacttcataaataaaggatgtagaaacagagttagaggcagctatgtatggaaggaccagaatctttgcgaacttcaagcgatagctccgaatcgagcaatgaattgtgttgtcatcgccgatgttgccaaaatgcgcagagtgactccaagacctccaggataataaatgtagcatatggccaaagcatatgatattcactttcgggactggataatatttgtttctcattttcttgaagcaaatatattgaaattcaataaaatgcatttatcaggaat

SEQ ID NO: 16932 - protein, 98 aa, DROSOPHILA
MKLTVCFLVILGCVIVHGQSPDCKEIKDICSKCIQRLNDPYNKVDFINKGCRNRVRGSYVWKDQNLCELQAIAPNRAMNCVVIADVAKMRRVTPRPPG

SEQ ID NO: 16933 - DNA, 2655 bp, DROSOPHILA
cagtatcattaattgcacgatcaatcgcctaaaatgttcaatattatccttctggcaacaatcctagtgagcgtggctcaggccacaatcatcattaagcccgaaaatcccgtggaggagaccaccaagtgccagatctactggcgcgaacacgcctgggctcttgaagattgtgtgtgccgggtcttccagaacggctgtcttctgaacgaggagagcaatcggcgggaaaaggctggaaaaacccgtaagatgatatgctattaaaacactatcatttagttataccttatttttgtttatatttttcagctctaattccggtcaccgagcaggtgtgccagaagttcatcaagcgcaagtgcttccttggatggcctgtgctggccaagttcccgattccatcgccatgcggatgcaatggcaaacagggcagtctggaaatcaagaagtttttgagtctgtgcgaactgcagaagtacgcagctgaatgcaacaaacgtaagttgatgtttgtatagaaatatagttaataacataaataattatatctttcagcctatatcagctactcgaagtgttaaaagatgacttgtaattgatgatgataatttgactacctcgaacgcgtccttgttaaaaataatgaataaacattttaaagcagcaaacgtttttgttacatttgtcttaagagttgattgactaagcgcctaaaacggtgcattattacctgattttataagtcttcgttgcttatgttttttagagtctgtttttaggaacctgtgtgataaagcttttttttggagtggaaaatttatggctgtgtttttttggccagtcaaggttgtttgcgtacgttctgcaaacattttactttcagatgcactaagtcaataaagcgctttgccacaactgctaaaacagtggagtgtattcaatataaatagccaaatgagatattatggggacagttatattcttagccacttttacgacatgttcaatattaaattgctgcttttgttattggccgtttcgtggttccaccatggacaagccgtccaggagacgaaaatcgaagaaaaaccagtatcagagcctgaaattgaatccgaaataaagaactctacgagcgtcccaagtaaatgcaatatttactataggaactaccaatgggctcttcaggattgtgtctgccgttgtttccaaaacgaatgccttatgcaaatcgagagcgaccagcgcaaaaaggagggtagatcccgtaagtaaattaaccagttaagtaaaaagtattttatttatatcttgtaaatacagcatttgtgcccgttacggaggaactctgccgttccttcatctgcaaaaagtgcagcgtgggtttccccgtggttgctgaattccccattccggctccctgtggatgcaatcgaaagccaggatcgattgccacagagagattctacagtttgtgccacctgctgaaattctcagcggagaacagcaaacgtaagtcaaaagaattggttccaaattttcggtaatatatacattttgtatctttacagcattcctgacttattcctattgttggcccttctaagtgaggtggattcagttggatcacgttactaatatctttgtttgtttgttttattattttgttgatttgttcatttaaagggagatggattacaaataataaagaaatatattcaatgacgagtgcaataaatttttttgaatatgaaaatcttttttagactaaacagctatgcatatgtttaaacattgaaaagctttttatttttcaacaccataatttatttatttttttggtctttaacttttggttaaatgtcattttttttccttaaaaaccagtaaatagtatttacatatattgaaaatatttacaaatcaattataaacgcagaacgaagtgttatcaaccttgaatcgactataaatttaaagaaaacatatattattgataaataaaaaggcgcagagccactcgtttacttaatcagcagtgatagcctaaaatagaataaaagatcaactgatcaaataatgccctacccccaagttgaacctataaagagtcgatcctcattccgccttggcacagtttcaagtggacttcgatttctacagccagacaatgttcaatataaagttaatcatcctggttgccctgaccatctccatggtccagagctgttccgttgaggagccggaacaggtcgagtgcgggtgtgggtgtggcaagccgcagtgcctctcttgcggatccagatcctgcggatgtggctgcaacccctgtcgatgtccttcctcttccgggtgtggctgcaaggattaatccaggactccaggtaggtgtagcacaaaaatggtgtaaaatatttcattaatatacccaaattgcaggaccccttcagaactttgccttcacaaaaccttcgtttttcaaattatttgtttttccttttcattaaagtactgatacattttgcaaactttcatcttttcgcactttgtgcgctcaattgtaaagggagcggtacaatgagcagacaatcattttcattgcattgatcacttttttattcatattcgttcactcgttggcaaagtaattcc

SEQ ID NO: 16934 - DNA, 540 bp, DROSOPHILA
acatgttcaatattaaattgctgcttttgttattggccgtttcgtggttccaccatggacaagccgtccaggagacgaaaatcgaagaaaaaccagtatcagagcctgaaattgaatccgaaataaagaactctacgagcgtcccaagtaaatgcaatatttactataggaactaccaatgggctcttcaggattgtgtctgccgttgtttccaaaacgaatgccttatgcaaatcgagagcgaccagcgcaaaaaggagggtagatccccatttgtgcccgttacggaggaactctgccgttccttcatctgcaaaaagtgcagcgtgggtttccccgtggttgctgaattccccattccggctccctgtggatgcaatcgaaagccaggatcgattgccacagagagattctacagtttgtgccacctgctgaaattctcagcggagaacagcaaaccattcctgacttattcctattgttggcccttctaagtgaggtggattcagttggatcacgttactaatatctttgtttgtt

SEQ ID NO: 16935 - protein, 163 aa, DROSOPHILA
MFNIKLLLLLLAVSWFHHGQAVQETKIEEKPVSEPEIESEIKNSTSVPSKCNIYYRNYQWALQDCVCRCFQNECLMQIESDQRKKEGRSPFVPVTEELCRSFICKKCSVGFPVVAEFPIPAPCGCNRKPGSIATERFYSLCHLLKFSAENSKPFLTYSYCWPF

SEQ ID NO: 16936 - DNA, 5322 bp, DROSOPHILA
caatggcataattcgccgaatgaagcgctttctgcagattcacgcttcactggccacaaatatccgcaggcagtgcactcgacaggtggccttcaatgggcgacgctgacgctatttttaatttgaacacttgcgatcactctcgcttttcgcgcgaacaggtgtattcatacaaattccataagaaattcacattaatagactaaaattcgcattaaaattaagtatttaggcagtaaaattgtcaaatggtcgaaacaataacaattgccgcgcaaaatgataacaagagagagagacagagagagagcaagaatgcgcgtgtctctcactttttgtattggcatttactccaccaattttttttttttttgtattctcttccctgaatttgtgcacttgtttcgcttttgcatttcctagcatatttttcacatttcactaattctattgcattattctctgctctacgagctgctttttggattcacacaagaatttggttttaaagtgtattatttacttgctggatgaagcaaaaaaaagcgccctggaattgcaaactttttcgtttgttgtgccaatcagactgagtgtgaccgtgccttagaaacagaataaaaactatcaatgttaagctagggctggcaacatttaacggcatttcgagttttaaaatttatatttgtaaacatttatcatatttactcaataagcataataaaccggaaattaaaaaaaaattacctaaccataaaattgttgataatagaatataattatctatcccaatttattttctaaaaattatttaaataatcaacaacccaaataattatttacatattcaattatcaaagaataaataagttatcagtaaaatatatcaaagtttatcatgaccgtgcccttcttttgataattttttaattaatagataatcaatagataagatcaatagataagatctctactgatattaacaagcaatagtagaaataagtgttaaaattgcatttattcagacatacattaatatgtgtatatggttggagggcacaaagccaatctttatctttctgtctcccctgggagcttacaaaactaataaaaaacgaacgcaaactttcagactgcgatgctgacttacttggctgatggttggttagcttatgtgaatgcggtagcggatatatatacgtatatataaatataattctgtttgccattaaatcggtccgccaactgtacacaaactgataagtaactgggaaagtaaacggaatacttggggaatgcattggaggagtacgctgctcaacgaccattccaatggcacacgtgtccattctcgaatgccaggttgattctgggatggggaagtggccgtgctgcctgcaccgactgcctggccggatcgtcctcgaagtacaagcactgctgcacgaaatccagaaagagaacttgtgcctggctggctgccgcaggcaatgcttccaaattagcatcgctacagagtccctggacaagttgctcgcaaattctcgtattggtatcgacatcgaatagtggtacgccaaaattgacgtccagcagggtccactcctcagtggcgtcctcctcctgcaccaccgacggcgaaatctcctcgatctccaccgaactctgcgacactagatccgcacgactgctgcatttggccagttcactggccagcacttggctgcaatccggagcagtgaactcattcgcaggaccatgttccggcgtggccgcaaagtggttttcatctgggcttttcaattgaaagcttgtcacctcgttcgttggcacatggttgggtttgctgggcgccgcaattgaagttcgtttttgacgctgcgccggcttcagtcgcacctgcagttcgtagtcctcgcaaccgagatccggcactccagtgttcaggaatgttatgtagccgcactgctgacgcaggtccaaaaggctggacagtttgtgtacggcccgatgggcagcccacttcgcttggcgtgtgtctgccgcttggaacggaaatgattcatagtgaagcgcgccggccgtgcggattccgtagccttggagcagcacacagccgttcttgagctgagagttcaggctgcggaaattctcggaattgagcacatacgcatcagagtgcaggatgttcaccagcagtttgccatagcccaggaacaagcgcggcaaggtcttcaaaacagttccccggcagagtagcaaactaggcggtccatagcctgaatatataggtatttagagaataactagtgggataacaatataaagaagtttacctgtgatatgattgtagaatagcttgctccacatgggcgccacatcggagctgcgcaggaattggccgaagtaaggaatgctaaatgtatggctgagcgacgccgtcagcggcgaagcggctattataaacttgtacttcttctccagaacgcgatctcttgtctgctgatccaaaccctctaggcactctaatcgcagcagatctaaaccgcccggcagcaaatgtcgcagtgagcaaatggtagaacgcagaatgactgcgtgggcgaaatagcgcgacacgtcgccttcgccttccgcatccagcagcgaaacttgctccagttcagccagaaaactgtctagactctcctcgcacagcttgcccacctcaaacatggtcacagcgtgattcttcaagccgggcgacagattgcccatcattagaaaagcggtgagcgtggagtcgaagagaaagcccaccctcttaccgctttttggcaagacagccgctgatattgcagccgatggagcagcctgctttggggcacacatatcctcttgctccagctcggaactcagttcctgctcatcgctgttgttcactctctcctggggtgtcgtattcaggttggcaaagctgaagtcactcgtgttgccatccgaggagaggtagcctatggaactgctgtccttatccttgtccttctccctttccttgggtgtctttggcgatttgggactttggtcgaattcgaagctgctactggtatgcaaattgtagttcagcggtgtgatctgcggcgtatctggcgtttgctgctggttgtatccctcccagctggaatgattcgtctgattgaccagatcttctttgcgatgtgcgaaacccagacggcagataaacgatatggcctgcttaacgctatccagttccagttgcagcatctgtgccaactcggcaatggtcatgtgctcatccgcgctaacgaagatcttgtacagcagattctcaaagtagtccccgctcacacgattcatcacaaagttgcgcagcggcggtatggatatcctgtcctccccgctaatgggcacatctaagtagatcaaacccttccggtacaggctgtgcaccacgtcgtgatcgcatttcccagccggctgggctccaaagtcaatcaagtcatcgagcaggcctctttcagcgggcgacagatagcgaatatccgcttccaggacatagccaatgtccagtcgccaccagggctcgatgtgtatgcgcaccggaaagcgtggcaggaagtccagcggattgggccgcgacccgaagatcaaggagcgcggtgtgtgagttttcatatcgctaataagggccaggtactcgttgcggccaatgcccaagacacgcagacagtcggctgctgtaaagttgggcaaagtatcgtagcttttgtcgctttgcaaaagctgacccaaaacatccagatagtagttgaagggcgtcaccctcaagcccttggtgacgatatcggccaggtggtagggaaatgcgcccaatccattgatgctcttctgtatcaatagctcgtagtagcgttgctcccggcgaaacaccttggcggccaggttgccccggaacctcagctgattctttagactatagttaaagacgaacttctcgtagtcacgctgattgttgtgcagaaccgatcgcaggtgcacgggcagcagttcccaggtgacattcccacgcacacattgctgcagttggttttggcaattggttccagagccagtggtcgcattgccacctccgctggtggccaaatcctcttgctccgtcatcttgcgactcggattggtttctccggctggtcggactaactcattgcattcgctccggctacggaatccagtattttcttcctgcgtattatttttctttttttttcgaggaacgatagatccgataatacggacacggtgttattggtttcatacgtcgacagctgataagaccgccggtgttttgcagcactggcgagcaaccagtttttcgatagttcgattattattagtattagtcataatatcccttggagtttcacaatcacgtttaaaagtgcaaacatccaacggacgtctatcggcagtgactaacaatactgtccgataaagaatgtgcctatcggtgtgctgtcgatatcactagttcatcgatagcacatcgtttagaatgattttcaatattcgttgctgcctgcttcattcataaacacttacgctattacagtcaaaattgtcaaaacgttgacgaattatcgagctttaaaggattgctatcagattgcaaggaagtcggcgttcagcgctcgacgagcgggcaacagaggcaacggcagcggctgagtagcttcagcataagaattttaggtagccgcgacacaaaaaagggacatcaacatcgatttttttttgctcccatttcgttttgtgagtggagcaaaatcactttcgacaaacaaagaaaggggcggcggcggtgggggcgtaaagtgcgcagatttcagcgaagatgaacggtggcgggggtggcgaggatgatcagcatctgccaggtgtttccaggtgaataacttcagctacttacgttgtggcatattaaatctgattttctttgccccccatcagtgcatcaggatctgcagctggagcggtgggcgggcgagccacgcccgaaatgaagcgttcggcggtgcgcagcctaatcaagcgatacttccaccaactacaatccggctgtgggaacgccaactgcagcaatgccaattgcgcctccagcggcaaggtggcgcccatgacgcccaacgaggtggccgccagagcactgcagctcttttcacaggatgcacagctctgcgaggcgttcacatcggaggccaacaggtgagaattctcttaacaaatggaactgggtagcaaagtttccagagcaccgataagatt

SEQ ID NO: 16937 - DNA, 3265 bp, DROSOPHILA
tcgacgtatgaaaccaataacaccgtgtccgtattatcggatctatcgttcctcgaaaaaaaaagaaaaataatacgcaggaagaaaatactggattccgtagccggagcgaatgcaatgagttagtccgaccagccggagaaaccaatccgagtcgcaagatgacggagcaagaggatttggccaccagcggaggtggcaatgcgaccactggctctggaaccaattgccaaaaccaactgcagcaatgtgtgcgtgggaatgtcacctgggaactgctgcccgtgcacctgcgatcggttctgcacaacaatcagcgtgactacgagaagttcgtctttaactatagtctaaagaatcagctgaggttccggggcaacctggccgccaaggtgtttcgccgggagcaacgctactacgagctattgatacagaagagcatcaatggattgggcgcatttccctaccacctggccgatatcgtcaccaagggcttgagggtgacgcccttcaactactatctggatgttttgggtcagcttttgcaaagcgacaaaagctacgatactttgcccaactttacagcagccgactgtctgcgtgtcttgggcattggccgcaacgagtacctggcccttattagcgatatgaaaactcacacaccgcgctccttgatcttcgggtcgcggcccaatccgctggacttcctgccacgctttccggtgcgcatacacatcgagccctggtggcgactggacattggctatgtcctggaagcggatattcgctatctgtcgcccgctgaaagaggcctgctcgatgacttgattgactttggagcccagccggctgggaaatgcgatcacgacgtggtgcacagcctgtaccggaagggtttgatctacttagatgtgcccattagcggggaggacaggatatccataccgccgctgcgcaactttgtgatgaatcgtgtgagcggggactactttgagaatctgctgtacaagatcttcgttagcgcggatgagcacatgaccattgccgagttggcacagatgctgcaactggaactggatagcgttaagcaggccatatcgtttatctgccgtctgggtttcgcacatcgcaaagaagatctggtcaatcagacgaatcattccagctgggagggatacaaccagcagcaaacgccagatacgccgcagatcacaccgctgaactacaatttgcataccagtagcagcttcgaattcgaccaaagtcccaaatcgccaaagacacccaaggaaagggagaaggacaaggataaggacagcagttccataggctacctctcctcggatggcaacacgagtgacttcagctttgccaacctgaatacgacaccccaggagagagtgaacaacagcgatgagcaggaactgagttccgagctggagcaagaggatatgtgtgccccaaagcaggctgctccatcggctgcaatatcagcggctgtcttgccaaaaagcggtaagagggtgggctttctcttcgactccacgctcaccgcttttctaatgatgggcaatctgtcgcccggcttgaagaatcacgctgtgaccatgtttgaggtgggcaagctgtgcgaggagagtctagacagttttctggctgaactggagcaagtttcgctgctggatgcggaaggcgaaggcgacgtgtcgcgctatttcgcccacgcagtcattctgcgttctaccatttgctcactgcgacatttgctgccgggcggtttagatctgctgcgattagagtgcctagagggtttggatcagcagacaagagatcgcgttctggagaagaagtacaagtttataatagccgcttcgccgctgacggcgtcgctcagccatacatttagcattccttacttcggccaattcctgcgcagctccgatgtggcgcccatgtggagcaagctattctacaatcatatcacaggctatggaccgcctagtttgctactctgccggggaactgttttgaagaccttgccgcgcttgttcctgggctatggcaaactgctggtgaacatcctgcactctgatgcgtatgtgctcaattccgagaatttccgcagcctgaactctcagctcaagaacggctgtgtgctgctccaaggctacggaatccgcacggccggcgcgcttcactatgaatcatttccgttccaagcggcagacacacgccaagcgaagtgggctgcccatcgggccgtacacaaactgtccagccttttggacctgcgtcagcagtgcggctacataacattcctgaacactggagtgccggatctcggttgcgaggactacgaactgcaggtgcgactgaagccggcgcagcgtcaaaaacgaacttcaattgcggcgcccagcaaacccaaccatgtgccaacgaacgaggtgacaagctttcaattgaaaagcccagatgaaaaccactttgcggccacgccggaacatggtcctgcgaatgagttcactgctccggattgcagccaagtgctggccagtgaactggccaaatgcagcagtcgtgcggatctagtgtcgcagagttcggtggagatcgaggagatttcgccgtcggtggtgcaggaggaggacgccactgaggagtggaccctgctggacgtcaattttggcgtaccactattcgatgtcgataccaatacgagaatttgcgagcaacttgtccagggactctgtagcgatgctaatttggaagcattgcctgcggcagccagccaggcacaagttctctttctggatttcgtgcagcagtgcttgtacttcgaggacgatccggccaggcagtcggtgcaggcagcacggccacttccccatcccagaatcaacctggcattcgagaatggacacgtgtgccattggaatggtcgttgagcagcgtactcctccaatgcattccccaagtattccgtttactttcccagttacttatcagtttgtgtacagttggcggaccgatttaatggcaaacagaattatatttatatatacgtatatatatccgctaccgcattcacataagctaaccaaccatcagccaagtaagtcagcatcgcagtctgaaagtttgcgttcgttttttattagttttgtaagctcccaggggagacagaaagataaagattggctttgtgccctccaaccatatacacatattaatgtatgtctgaataaatgcaattttaacactt

SEQ ID NO: 16938 - protein, 928 aa, DROSOPHILA
MTEQEDLATSGGGNATTGSGTNCQNQLQQCVRGNVTWELLPVHLRSVLHNNQRDYEKFVFNYSLKNQLRFRGNLAAKVFRREQRYYELLIQKSINGLGAFPYHLADIVTKGLRVTPFNYYLDVLGQLLQSDKSYDTLPNFTAADCLRVLGIGRNEYLALISDMKTHTPRSLIFGSRPNPLDFLPRFPVRIHIEPWWRLDIGYVLEADIRYLSPAERGLLDDLIDFGAQPAGKCDHDVVHSLYRKGLIYLDVPISGEDRISIPPLRNFVMNRVSGDYFENLLYKIFVSADEHMTIAELAQMLQLELDSVKQAISFICRLGFAHRKEDLVNQTNHSSWEGYNQQQTPDTPQITPLNYNLHTSSSFEFDQSPKSPKTPKEREKDKDKDSSSIGYLSSDGNTSDFSFANLNTTPQERVNNSDEQELSSELEQEDMCAPKQAAPSAAISAAVLPKSGKRVGFLFDSTLTAFLMMGNLSPGLKNHAVTMFEVGKLCEESLDSFLAELEQVSLLDAEGEGDVSRYFAHAVILRSTICSLRHLLPGGLDLLRLECLEGLDQQTRDRVLEKKYKFIIAASPLTASLSHTFSIPYFGQFLRSSDVAPMWSKLFYNHITGYGPPSLLLCRGTVLKTLPRLFLGYGKLLVNILHSDAYVLNSENFRSLNSQLKNGCVLLQGYGIRTAGALHYESFPFQAADTRQAKWAAHRAVHKLSSLLDLRQQCGYITFLNTGVPDLGCEDYELQVRLKPAQRQKRTSIAAPSKPNHVPTNEVTSFQLKSPDENHFAATPEHGPANEFTAPDCSQVLASELAKCSSRADLVSQSSVEIEEISPSVVQEEDATEEWTLLDVNFGVPLFDVDTNTRICEQLVQGLCSDANLEALPAAASQAQVLFLDFVQQCLYFEDDPARQSVQAARPLPHPRINLAFENGHVCHWNGR

SEQ ID NO: 16939 - DNA, 2747 bp, DROSOPHILA
taagtatacggtgttaggaaaatagattgttcaaaaaagagttaagcaactttcagcccagtagaagtttacgttttcattgtgttatcataggtatacaaaaagcttatatattatttactatattctatgctgtaaatgttcaattcatgctagcttaacaattgttatcaaggcaattgcttaaacaaatataaataactataaacagaagccaattattgaaaagtggaaattaaaatcactttatttgctctcgttgaaaacctttcttttaattcggctgacaacatatttattcaatctcacaagagtaaaacaatgcaatttattaagaccgcaggctatcggcaacatttttgcaggacccattttcgcagcgaaccatagttactgaggagccaaaatcttaataaacatcctataaaataaatattaaatttacttacctatgcacgaggctttgaccagctcacaacgggttaatttcctccagtttcggttatttcgtccgcaatatgaattgaatagatccaccgtatcatctcttgttcccacggttggctgttcacgaagacagttggcgaataaacgatcgcaaaattggcgacccgaagcttcctgagttaggacctggcacatcaatatgcagcagaaagctaaaggattggaattataaaactaagtattctccttcataagggtagcttacccaaaaataccagaagttttgacattgcagaagtttttgaggtgaacttgataactactctgactatatcgtagtatatcgccctgtatttataccgtaaacatcgatcaaggaagaatacgtttacaattgtaacaggtgtacaagggctttatcttttttacaattttatatgaacaatccaaattcaataggtcagattcatctgaaaaacagatgtggtcctatttggaacataacacttccttgtttccaacttatataaagctgagattttttattttaagccaaaaggaaatctctagttgatttacttgcacacaagcttaaaaatgcaattgacaagtattatctgcgtcatcttgttccttggctgtgtacttattaatggacaaagtcccgactgccgaaagttaagggacacttgcaatccttgcatccgaagactcaataatcccatcaataatgtggagttcatgaacgagggatgccgtgagaaagtccgtggcagatacatctggaagaatcagactcgctgcgatcttcaagtgatcgcttgcagtggtaagttaaaaaaaaccaatacttttaaaaaccaaaccaaaaacttttggaaacactttcaaaagtgaaacaaaaaattcgatttcctcaaatttaaaatatatgacactgtcacttacctttaaagtttttggcatggatctttagattttaatttaaaaatgtaaatacatcttctggactaaaagtaaatttaaaaaccaaattgattaaattttgaggacaggagaaaaaactatttcatttacttcacaaatctgtttgtttcggacatcaatctacaaaagtgcattacaattttttcctgcatttgcagctcacaagaggaaactggattgcttggtaatagccgagcttgctgggatgccaaggcgaacttagaagaatgcccaccagcattgtgattaccacaagggagcgcagctaaaatattaaaagtgattttgtccaaataaatgcatatgtgaagagatttgacttggttactctagcttgtctgtgcggccaataaagcgatatgttcttgtcgtagtcgcggtcttggccttcaattttttctgggccctcagctctcagcccttccaggaatcaacagtcgcccgaccacgagagcatcttccacgtacggggcattatcgtaaagacgggtccagaccagcatcgcgatgagttgagccaggcacgcacatcgtgcacatcgtcatgcttgtcttacacttgatgcatcctcgtcatctcgtctggcagttcctcaaaacttctcactccactccttcttactccaaaacataatttttcaaacgaaatgtttttgattttcttgatgccataaaaaatggtagtttattatttggctgtctgagattgcagccaatgcttttggtccaaacgctagacgggagttcatctgaagatccgaactttagggaaattttccatgctacacgggcaaacagagtggcgcctattaatacatgtcccaaaatttgcagccgcccgagttcatgtctataattacatttttcctacagttattgacacaattggcatgtcaactggcgcattctaaacggtatataagttctttatggaggtatggatgcaaacagtttccgacaacttcctaaaggggtttcaccatgaaactaactgtggtctgcttagtgggtaagttgaattactaaaatggatagataatttagctaacaagatcattttagtaagcttctttctgctgcactatgcagagcacagtgatgcctgcttggaggtaattgagaaagcgttgggtctccaaccgtgcaatgaaggtggtcgcaacgaacacagggagcctcacaggggtggaccaggacctgtgagatctactaggaggcgcgggagaatccctaggagacgtgagacaccaagaccaatacatcacaataccagagaacggaggcatcacacaaaaacaaggaagcctagaaaa

SEQ ID NO: 16940 - DNA, 431 bp, DROSOPHILA
caaaaggaaatctctagttgatttacttgcacacaagcttaaaaatgcaattgacaagtattatctgcgtcatcttgttccttggctgtgtacttattaatggacaaagtcccgactgccgaaagttaagggacacttgcaatccttgcatccgaagactcaataatcccatcaataatgtggagttcatgaacgagggatgccgtgagaaagtccgtggcagatacatctggaagaatcagactcgctgcgatcttcaagtgatcgcttgcagtgctcacaagaggaaactggattgcttggtaatagccgagcttgctgggatgccaaggcgaacttagaagaatgcccaccagcattgtgattaccacaagggagcgcagctaaaatattaaaagtgattttgtccaaataaatgcatatgtgaagag

SEQ ID NO: 16941 - protein, 98 aa, DROSOPHILA
MQLTSIICVILFLGCVLINGQSPDCRKLRDTCNPCIRRLNNPINNVEFMNEGCREKVRGRYIWKNQTRCDLQVIACSAHKRKLDCLVIAELAGMPRRT

SEQ ID NO: 16942 - DNA, 2548 bp, DROSOPHILA
tagcggaagctgctgtaaaatcccagtcatggcgggctgactcagttgaggcaaaaccaacgctagctgagatctttatcgccgttctgttgaacaagagtcggccatcttttctataaccatcgccgatctcaaacatcacattgtttacagcaataatttcgtgttatcagcgagaagaaagatgtacaagtgatatcaaaacacttgtgtgggagaactttcggatatctgacatgttggtaatacagaaaacaaccctgttcacgtgcttcgagaagactaatcatcgtgacaggtttcctcagttttatagctgacaaaatattagatccaaatacaagatctaatagtctgagctggcgcaaaaaccggagcggtagtgggctaataaatcagttttctttgcaccgccctgtttggggagtgtgctctgacagacgtcttacgtggacacgaaaagatcttaattagtggagcgcaaaaagcagcttgcctggatatttatagaagcacatatcactaaagtaacatggttattttttaactacaccgaaagaagtcagaataatacacagatcatatatcatactattaaaagattattttaaggattacggtgccatgctcttctttttcaaatcatatctttccttattgaaatacggttgatcgatttttataaccggtaatatttgtatatattaaatattaaataccattttacctgagattatcttcaaactgcagtttcttgccgtgcacccaaatgaatacatcatcggtttaagtgcgatcttaacgcctaccacgtagaattgtttatttctaaactggacgttccagttcgatgcgtttcagtacgtcgagaacagatctatagtcgcttatccgctggcgagcggatcgaggaataacgacacattacaacgacattattcaataggctaactatgagctaacacgaaaacagcctgccattgaagagcagtgggtcaggttacttcggcggactggactccgcaccgccggcgatggctggggattgggcaaagtcctggaacgtgtccttgaccttcttgaggcccctgcctgcgtagcagggcagcatgtggatgaaacggaaggtgttcttcacgccctcgttgtagtagtgcttggccaggaagcgcatctcgccggttttgggcaactgcggcacttcgaagggcagctgcttctccagcttctggacatgcgggcgcagctccgacttgatgtcgttgtacagcttgtccgtctggtcagagtctccccagatgcccaccttttgtgtgtagtagacggttgcggccaccagaccgccgcgcactagaaatctggaaaggattcgaagagtgtcaggcttacgtaagcctcaagagaaagcatacggacttaccctagaaccatgtttattcgtttgttttggggaagagagagtgacagtctattgcggtctttgggtgtatccaaacaatagcagtctggtcgttttcgttcagaatttttggaaaattccttgtttttctacttcatattattgtcggagtgaccgtgtctacgtagcagttaaaatctgccgctttagtgtgaccagttagttatacatttgatgttttagcgaggtttcaagccattaaagtattctagacacccacctagctcagttttaatccaaattaaaaaatgtatttaaaatttgttatcaattttaaattatttatgattatgcggtgaagcatttattggtaagccatatctcttttcgaagtattgtttactagaacacacaatgcatatttattaccccatttgtttcaaccgaaattattgacatcattttaatattaattattttgtttaacgatttcattgcattcaaatactatttataaaatattcttatttataatatatatttgttttgagtgcctgatgtttttgtttggcctcgcatttatatattgttcccttttgtctaaccttcataactgctggcccaataaaattttattttggagttgaattcatttgtacttctgggtcgaatttatacatttaaggcataaattagtatagtaaatccccgatccttagagggtaagaaggagacaaatttgccaggtttttcttatcaatataatgattataatacgttggtatgcatagcctttaaatttattcaattaattaaattattcaaatatctatcagccaacgtaatggctatttatataattatgaagttggaagactgaagtttaagctccacgccattccaaacttgctctccaaaaggcgaaatcttcagtttaaaatgggatgaatataaaataatagttagaagaattacaaactaaaaaatgaatcgatttttttcggaattgatttggtgtttgtatttgtgtatgtttgtatattaaaatataatactaattaaccataattagttaaactgtgttaccacctaaatttaaatataatgtatatatttgtgtcacaactaatttacacattcgctgtatta

SEQ ID NO: 16943 - DNA, 486 bp, DROSOPHILA
aaaaacaaggaattttccaaaaattctgaacgaaaacgaccagactgctattgtttggatacacccaaagaccgcaatagactgtcactctctcttccccaaaacaaacgaataaacatggttctaggatttctagtgcgcggcggtctggtggccgcaaccgtctactacacacaaaaggtgggcatctggggagactctgaccagacggacaagctgtacaacgacatcaagtcggagctgcgcccgcatgtccagaagctggagaagcagctgcccttcgaagtgccgcagttgcccaaaaccggcgagatgcgcttcctggccaagcactactacaacgagggcgtgaagaacaccttccgtttcatccacatgctgccctgctacgcaggcaggggcctcaagaaggtcaaggacacgttccaggactttgcccaatccccagccatcgccggcggtgcggagtccagtccgccgaagtaa

SEQ ID NO: 16944 - protein, 122 aa, DROSOPHILA
MVLGFLVRGGLVAATVYYTQKVGIWGDSDQTDKLYNDIKSELRPHVQKLEKQLPFEVPQLPKTGEMRFLAKHYYNEGVKNTFRFIHMLPCYAGRGLKKVKDTFQDFAQSPAIAGGAESSPPK

SEQ ID NO: 16945 - DNA, 3536 bp, DROSOPHILA
atctttagattttaatttaaaaatgtaaatacatcttctggactaaaagtaaatttaaaaaccaaattgattaaattttgaggacaggagaaaaaactatttcatttacttcacaaatctgtttgtttcggacatcaatctacaaaagtgcattacaattttttcctgcatttgcagctcacaagaggaaactggattgcttggtaatagccgagcttgctgggatgccaaggcgaacttagaagaatgcccaccagcattgtgattaccacaagggagcgcagctaaaatattaaaagtgattttgtccaaataaatgcatatgtgaagagatttgacttggttactctagcttgtctgtgcggccaataaagcgatatgttcttgtcgtagtcgcggtcttggccttcaattttttctgggccctcagctctcagcccttccaggaatcaacagtcgcccgaccacgagagcatcttccacgtacggggcattatcgtaaagacgggtccagaccagcatcgcgatgagttgagccaggcacgcacatcgtgcacatcgtcatgcttgtcttacacttgatgcatcctcgtcatctcgtctggcagttcctcaaaacttctcactccactccttcttactccaaaacataatttttcaaacgaaatgtttttgattttcttgatgccataaaaaatggtagtttattatttggctgtctgagattgcagccaatgcttttggtccaaacgctagacgggagttcatctgaagatccgaactttagggaaattttccatgctacacgggcaaacagagtggcgcctattaatacatgtcccaaaatttgcagccgcccgagttcatgtctataattacatttttcctacagttattgacacaattggcatgtcaactggcgcattctaaacggtatataagttctttatggaggtatggatgcaaacagtttccgacaacttcctaaaggggtttcaccatgaaactaactgtggtctgcttagtgggtaagttgaattactaaaatggatagataatttagctaacaagatcattttagtaagcttctttctgctgcactatgcagagcacagtgatgcctgcttggaggtaattgagaaagcgttgggtctccaaccgtgcaatgaaggtggtcgcaacgaacacagggagcctcacaggggtggaccaggacctgtgagatctactaggaggcgcgggagaatccctaggagacgtgagacaccaagaccaatacatcacaataccagagaacggaggcatcacacaaaaacaaggaagcctagaaaacccgttccttgtattacgaagaggacggaacctccaccggttacagattttactactcgaaaatccaatccaccatgcacttgtactgaaagcactactcgaaagacaaatccgacttgtacttgtacggaaagcactacgaaaaagacaaatccgacttgtacttgtactgaaagcactactcgaaagacaaacccgacttgtacttgtacagagagcactactccatggacggaaccaccagttacagatattactactcaaaaatccaatccaccatgcacttgtactgaaagcactactcgaaagacaaatccgacttgtacttgtactgaaagcactactcaaaagacaaatccgacttgtacttgtacggaaagcactactaagaagacaaacccgacttgtacttgcacagagagcactactccattgacggaaccaccggttacagatattactactcaaaaatccaatccaccatgcacttgtacggaaagcactactcaaaagataaagtcgactagtactactcaagggactgagccaccaagcactcagaagactcttccacccaatccaccaagcactaagaacaccgaaccaccaaatagcactcctcctccagagaaaaccacccgaaaaccatgcggatgtagtagctctcacccgtctggatggaatcctggcggtcctataatcccaagcttttcaacgactaccaagaaaccggacgaatgttcgacaaaaccttcaggttggaatcccggaggtccgattgtgacaataccaacaacttctcgaacgccctgcgggtgtgtctcgtggaatccaccaggttggaatcccggcggtccttggcctcccacatttcccggaccttgcagaccaggacctgtcattcccaacaatgcagaatgcggattcgatccacaatgcccacaaggctggaatcccgatagtcctctattacccgatcccgaaattcccgggaattttggacccggacctgtcattccccgcagtggagaaaatggatgtggctgctcctgctcgtgatttgcatgtccaccattgatgtccaccaaaagcggaacttaggaaagagcttcgtattaccgtgaatcgaatacaaatactgatggaagattgcatccaataaaaaccatgttgattgaagaagaaagctgacaacacgatctataatttttacctaattatttttcattgaattttattgctttgcaatcagacattgcgggacccgccgggatatgacggtacaggtcagcgggacaggtcggcggaacactttggtgggacaggtcggcggtacaggcctgcaggactgatcggcggtacaagacgcgggacacatcggcggggcatataaaatattgcgaaaataactcgtagtccatttttaaataagttcaaaatcaaactgaatgtggtaattctttgcgctttttggataccaaatatacccactacaaagtaagggcatggatggtgatgattttccactcagcctgtgccaactgcttatataatatttgaaaattgaacatttggcgctgcacttgagaaatgcttagaccaggccatgatgatgaagtttataaaactcttgaccacatttgccgcacccgtcgcctcgccactcccctcccgttttgaaaagtctttccttttcgttgccttccactttggacatgtctggccagctgacgtcggaaaatgtggttagagaagaggtccgaatggatcggggttggggatttggagatggtgatggggatggggatggggtatatggaatgcattgcacttgactttagcgccacttgtaagtgtaaattttatttgagccagcgaagtaggtacacatgtagacactcacattcaacagccatgccctttgtcaagagagctccacatccaaagtgcctggccagcgatattggcgttcgcactcgtacttggtctgggacttggaaacattttcgacttggtcttggattcggctggggagcagtggtttcggttccgtagccggttttttggaccggagtttggcgtcgtgtcgttgacagctaagtggtgataatcgctttggaattgaatctgagcaagtacattcacaggcagacgaagttaaaattcaaaaatgcaacagactaaagatgcaagagttttggtca

SEQ ID NO: 16946 - DNA, 1483 bp, DROSOPHILA
atgaaactaactgtggtctgcttagtggtaagcttctttctgctgcactatgcagagcacagtgatgcctgcttggaggtaattgagaaagcgttgggtctccaaccgtgcaatgaaggtggtcgcaacgaacacagggagcctcacaggggtggaccaggacctgtgagatctactaggaggcgcgggagaatccctaggagacgtgagacaccaagaccaatacatcacaataccagagaacggaggcatcacacaaaaacaaggaagcctagaaaacccgttccttgtattacgaagaggacggaacctccaccggttacagattttactactcgaaaatccaatccaccatgcacttgtactgaaagcactactcgaaagacaaatccgacttgtacttgtacggaaagcactacgaaaaagacaaatccgacttgtacttgtactgaaagcactactcgaaagacaaacccgacttgtacttgtacagagagcactactccatggacggaaccaccagttacagatattactactcaaaaatccaatccaccatgcacttgtactgaaagcactactcgaaagacaaatccgacttgtacttgtactgaaagcactactcaaaagacaaatccgacttgtacttgtacggaaagcactactaagaagacaaacccgacttgtacttgcacagagagcactactccattgacggaaccaccggttacagatattactactcaaaaatccaatccaccatgcacttgtacggaaagcactactcaaaagataaagtcgactagtactactcaagggactgagccaccaagcactcagaagactcttccacccaatccaccaagcactaagaacaccgaaccaccaaatagcactcctcctccagagaaaaccacccgaaaaccatgcggatgtagtagctctcacccgtctggatggaatcctggcggtcctataatcccaagcttttcaacgactaccaagaaaccggacgaatgttcgacaaaaccttcaggttggaatcccggaggtccgattgtgacaataccaacaacttctcgaacgccctgcgggtgtgtctcgtggaatccaccaggttggaatcccggcggtccttggcctcccacatttcccggaccttgcagaccaggacctgtcattcccaacaatgcagaatgcggattcgatccacaatgcccacaaggctggaatcccgatagtcctctattacccgatcccgaaattcccgggaattttggacccggacctgtcattccccgcagtggagaaaatggatgtggctgctcctgctcgtgatttgcatgtccaccattgatgtccaccaaaagcggaacttaggaaagagcttcgtattaccgtgaatcgaatacaaatactgatggaagattgcatccaataaaaaccatgttgattgaagaagaaagctgacaacacgatctat

SEQ ID NO: 16947 - protein, 445 aa, DROSOPHILA
MKLTVVCLVVSFFLLHYAEHSDACLEVIEKALGLQPCNEGGRNEHREPHRGGPGPVRSTRRRGRIPRRRETPRPIHHNTRERRHHTKTRKPRKPVPCITKRTEPPPVTDFTTRKSNPPCTCTESTTRKTNPTCTCTESTTKKTNPTCTCTESTTRKTNPTCTCTESTTPWTEPPVTDITTQKSNPPCTCTESTTRKTNPTCTCTESTTQKTNPTCTCTESTTKKTNPTCTCTESTTPLTEPPVTDITTQKSNPPCTCTESTTQKIKSTSTTQGTEPPSTQKTLPPNPPSTKNTEPPNSTPPPEKTTRKPCGCSSSHPSGWNPGGPIIPSFSTTTKKPDECSTKPSGWNPGGPIVTIPTTSRTPCGCVSWNPPGWNPGGPWPPTFPGPCRPGPVIPNNAECGFDPQCPQGWNPDSPLLPDPEIPGNFGPGPVIPRSGENGCGCSCS

SEQ ID NO: 16948 - DNA, 6388 bp, DROSOPHILA
tatataacgagcagttaaagattagcattttaattataaagaacttgttaaataataatagactacagatagtgtattgactagtttagtttattgttaagtatgtaagaaaggtgtaaattataaatgaatttatcaagtaaatatgtactatgtatttacccaagcacaggcatttgataagtttatattttaatatgatgttagaacgcacacagcatcagatttactttgcatgatgtgcgtgagactgaaatcaattcactttaaattgtgtaaataggttgaacatttctaacattacacacgatcaaacaaaattacaatctccaaatgcaaatcaaattgactaaattcattattggtacataaaatcctacccaaataaaagttaaacatacgaagtgtactttaaattaattgatagctgattcgaatatttttctcttaatgtgaaatagattaaatagattttgaaaggtgtaaacggttttcatttaagaaatcaattaccaagtgggaaattggtcctaaagttatccattttttctgtgccaggtttttaagactaagatatgatcaatcactttacaggaaaaaaattttttttttaatagaaatagtttttgtcacaaatgtattcaacatattattaaacaaaaagtttcaaaagaagggccaccaaaatttatgtaaaattttctatagctgtgccgttaattacttaaaatttaattatatttcaaaaataataaaaaatcatgtggtatagttaagttgagttagaaaaagtgttcatttaaatttgaaaagcatattagcgatacggccactcaaagtaagaaatctggtatttttatcgttcgtgaacaaacgaagtgattcggtattttcgaaaggtcccactaagtgcagcatatatataaatgcgtttcatcatcagatttgtatgtatattgtgtcagttcgcctttgttttttaattgctagtccgtcaattaagaaatgcttttacggtgtgtgtccaactaatcgggataacctttcctcgggacgagcccactggaagggctgtttgggagcataaacaatggaaagggttgcatctgtgggagcgtgtatgtttgtatacgtatacccacaccattgttacgatgcacctggaaggccaaaagagaaatgcagtggaaagtgtattgttgcagtgtgttagcgatcctggccagctgagtggctgcgcggattagacacagtgctatccggttctacacagatactggcgatccagggtttggcctggtgtctagacattttgaaaagaaagtgaggaaaacagtgtgtgcgtgtatgtaaatagatgtattttcccattcctttgtaccgaaaacaaagcaaagttgattaatacgagctaagacagtcgggggcgaaagtattggccaaaacagattccttaaatttctctcttctcaagtgctccaaaataagcttatcgtcaaactttagctgctatctgttatgacgtagtaaaatttgtaagattttaaaataaggttattcattgttgatgtcaaacttttacgattcctgataattttttgcatatgtccagctattttaggagactaatatttcttgcagtactgaatttaattaagggatagttacaattgcgttctattccacaacagaccccattgtttgaagtctatgatatgggggtgcacttttgctggtggtgtgggtgaaccagttttctcccatggagcattaaaaattatagaggtaattttacagtccaaaaaagaaatcgcatgagtatgagtaagaaaactccataacctttaaatgcgacacaatcaaaacaaaagtgttgtcgaaatttcaatacaagtcaagactagttgaatcatactaaatgtgttaaacagtataaaactttagctttgagataatataatttaacttttctaatttccctcggtttcccaagtatatgaatgaagccatgccaacattttagtcaacgactgtgcggccatcagctagggatgtacatacgcaagtaaaatgcatgtacattgcacttacacatgtatatacatacaaatgtaatgtgtaggaaaaaaaagagccgaatgaaaatacccttgattttgatattgattgattttgactattgacgagattagcagactcgataagtggctctctcatttttgggtagtaatatttgtaaggaagcttttaaacaagatacaccacaaactgcactttccatagcagcgggttaaaggtcgaaccacgaaacaaagttacatataaagccccaaatgaggcattaattattttctgggacccgtaccccgtcaatagaatgataacgaactgcattcttacaatgtaacaggaatataatgtgctatacctccactgcaggtcgtagattgaactgctatcagcaagtgctatcaactgccataaacggagccacaatcacgataacatcacttgagcaatcgtcgactcaggccgcataggcccatcaggcagcggttcaggttggaggcacttgctcggcatcgggttccggtagagaggctgagcctgaggcagagcctgcttgttgctgccgcgttcgcaaaggactcaaaattgatagaaacaacaaaaagtctgctgcaactggtgcctcatctgaggaccagccgccgcgcaaaaagggtcgtcgctcaggaggctcaggctccgcgtcctcatccgcttattccacttcccctgccgcaggatcagttgatgcggcatccacgtcgcgagcggcccagcagttacagctccaactaaactcatccagttctacagagcgcagcacggcagcatccgcaaatcctagcagagggcaccacaaaccgatagacagcaacaaaagaccacgcgatcgtagtagcagcagtacacagggctccgaggcaaccatgcagagcaccagttccacgtcgagcggctcttgctccaggcccctcgagggttccacactcaattccggcggcagtgccgagaacgtggctcgcgatggaggcagtggcgatgacagcgtcggcatcggtgatgagaatccatcgggcagcagcgccgccacgaacggacacgactccaaacacaacggcttcattgtcaacaataacggcagcagcagtcgcatcgtcgacggcgagaacaatcgggaaaacaccagctgcagcggtgtgcagctggacaagtccaaccaagagatcatccggctgatcggacagtatctgcatgacgtcggtctcgataagtcagtccaaacgctcatgttggaatccggatgctacttggaacacccctctgcaaccaagtttagggagcacgtcctaatgggtgactggtcaaaggcagattcagaccttaaggtaaataagcttctctttcgtactagcatggtcatgagtttttttagtttggtgcttgttttgcggaggattggattatcaatatttgaaatgagatttcaatacttcaactattccaatcgctactactactacactataactttcaaaacgaaaacaattttttttttgtgtttcaagtgctcgagtgttttcaaactaaggccctcttattattaaaatatatttttaagcagctactaaaatcttaagaccttaatattgcaggacctagagccactaatcgacaatgggaaattggcaacgatcaccgaaatgaagttcatattgctggagcaaaagtatttagagcatttggatgatggcaatcccttggacgcccttcacgtccttcgcagcgagctgactcccctgcagcacaacataacgcgtgtgcaccagctgtcctcgtacatgatgtgttctaccaaccaagacctttaccagcgtgccaagtgggagggcaagggcatcctgtcgcgtgccttggtcatggagcgcctacagacatttatgccgccgtcggtgatgatgtcgccacggcgcctgcgcaccctgctgcagcaggccgtggagctgcagagccaacactgcccctgccacgacatggcgtgggagacgaatctggagacagtctcgctgctcaccgaccactgctgcaccacggacggctttccaatgcaaactattcagattctcaccgaccattgcgacgaggtctggttctgcaagttctcgcccgatggcctcaagctagcgacgggcagcaaagactccactgtgattatctgggatgttgatccgtacaagctgacccttaagcaccgtcgcgttctcgacggtcaggcccagcttagcgtgagcttcgtcagctggagccccgactccaagctcatccttgtcggcggcaccgaggactcccatgagctctacatctggaacgtggacgacggcaagctagtggtcaagttctcgcagtctctggaggacagcctggcctgcggtgccttcagtcgcgatggcgctcgattcgtctgcggcggccagaagggtcagctttacctatgcgacctcaacggtaccatcgtggactcctgggagggagtgcgcgtaaacagcatagcctttcgggcggacaacaaaacgatcttagcggcggataatcattaccgaatcagagggtgagcggaattagttgtgggtgctagcacttagcagacttgatgcaccaaagcattcatttattatctaaagttttatttatgtgttataaaaaatttaaaaacattaccttatataggctctaaaaatgttccttttaatataaagggactgtaaatcagcaagtcaatgattatttttacgatataaattaaaaactcacctaactccaatagagcacaatttaagtgtttcttcttttttcaggtacaactttgatagcccgcgttcagactttgatattctgagggagccacatcccataatgacctttagtatcaactccgccgaccgcttggccttgctgaacgtctcgaaccaaggccttcacctttgggacatcgaggacaagtgccttgtgcgccgtttccagggaatacgtcagagcaacttcgccatccactcctgcttcggcggcgttaacgagagcttcgttgccagcggcagtgaggacaaggttgtctacatttggcacatcaagcgcgaggagccgctggccaagctggccgggcacactaagacggtgaactgcgtgtcctggaatcccgtgtacccgtccctgctggccagcgcaagcgatgacgccaccgtgagaatctggggaccgaagcccaacggcagcagcgcaacgactgagagcgacgattgctcttctagctcgtcttcgtcctcctggaatatgacttaaggtcccgagcagtagcaaatggatgtgagtgggatagattttggatgctgatatagttatagtgcgccctgatttcgatataaagcttaatgcgtaccgctctgatggcgcatcggggtcgtcgttgctacaaactgccattacaacaatatgtatgagcagcatgacttacgattagcattaattacttaagtacattaatacgaaaggagaggcataacatcatatctactatgctataacaagaaatcgattcgttctcagatttcttttttatatatgtatgcatacggcgatgcgaattaatatttccggcctatattagcgactcttctcgatcttttcatttattaaaagtgcgatcgacctgcttggttttcaaattattaaagattgccatttgatttgttctatgcagtttccgacatttagtatgtaacacgatttgacgtaattgatacccagcagacacaataaaagtagttctatatatgtttttaaatgtcgatgtttcttttcgattaacgtgggtcataagcaatcaataaaatttgagtaaaaaactagcttgcttttttattttaggtcatgtcacatatttcagagcaaagtgctgtctttgaagagttatatttttgttaaataaaattttggtttactattttcagccttctataatcaattgtcctccaccactagtgatacaaactgcctcgcggtttccttgaaggcgaaagctataacaaccaaagttagagcccaccatcgaaggttcttcctagtggctccgactgcctggtaggcgaggaccagggagcagaggtgatgtcccatgaccagaagatggtgcaagttccggccaaaaacggtcgtgttatttcgccacaccaaaatgggcagaaggaagaacttggacaggttggatatcagcaccactttgagtataattaaagaaaaatttcgaaagcctattttctgcatccaatcaatactcagagtggcggtg

SEQ ID NO: 16949 - DNA, 3220 bp, DROSOPHILA
aagaaatgcttttacggtgtgtgtccaactaatcgggataacctttcctcgggacgagcccactggaagggctgtttgggagcataaacaatggaaagggttgcatctgtgggagcgtgtatgtttgtatacgtatacccacaccattgttacgatgcacctggaaggccaaaagagaaatgcagtggaaagtgtattgttgcagtgtgttagcgatcctggccagctgagtggctgcgcggattagacacagtgctatccggttctacacagatactggcgatccagggtttggcctggtgtctagacattttgaaaagaaagtgaggaaaacagtgtgtgcgtgtatgtaaatagatgtattttcccattcctttgtaccgaaaacaaagcaaagttgattaatacgagctaagacagtcgggggcgaaagtattggccaaaacagattccttaaatttctctcttctcaagtgctccaaaataagcttatcgtcaaactttagctgctatctgttatgacgtagtaaaatttgtaagattttaaaataaggttattcattgttgatgtcaaacttttacgattcctgataattttttgcatatgtccagctattttaggagactaatatttcttgcagtactgaatttaattaagggatagttacaattgcgttctattccacaacagaccccattgtttgaagtctatgatatgggggtgcacttttgctggtggtgtgggtgaaccagttttctcccatggagcattaaaaattatagaggtcgtagattgaactgctatcagcaagtgctatcaactgccataaacggagccacaatcacgataacatcacttgagcaatcgtcgactcaggccgcataggcccatcaggcagcggttcaggttggaggcacttgctcggcatcgggttccggtagagaggctgagcctgaggcagagcctgcttgttgctgccgcgttcgcaaaggactcaaaattgatagaaacaacaaaaagtctgctgcaactggtgcctcatctgaggaccagccgccgcgcaaaaagggtcgtcgctcaggaggctcaggctccgcgtcctcatccgcttattccacttcccctgccgcaggatcagttgatgcggcatccacgtcgcgagcggcccagcagttacagctccaactaaactcatccagttctacagagcgcagcacggcagcatccgcaaatcctagcagagggcaccacaaaccgatagacagcaacaaaagaccacgcgatcgtagtagcagcagtacacagggctccgaggcaaccatgcagagcaccagttccacgtcgagcggctcttgctccaggcccctcgagggttccacactcaattccggcggcagtgccgagaacgtggctcgcgatggaggcagtggcgatgacagcgtcggcatcggtgatgagaatccatcgggcagcagcgccgccacgaacggacacgactccaaacacaacggcttcattgtcaacaataacggcagcagcagtcgcatcgtcgacggcgagaacaatcgggaaaacaccagctgcagcggtgtgcagctggacaagtccaaccaagagatcatccggctgatcggacagtatctgcatgacgtcggtctcgataagtcagtccaaacgctcatgttggaatccggatgctacttggaacacccctctgcaaccaagtttagggagcacgtcctaatgggtgactggtcaaaggcagattcagaccttaaggacctagagccactaatcgacaatgggaaattggcaacgatcaccgaaatgaagttcatattgctggagcaaaagtatttagagcatttggatgatggcaatcccttggacgcccttcacgtccttcgcagcgagctgactcccctgcagcacaacataacgcgtgtgcaccagctgtcctcgtacatgatgtgttctaccaaccaagacctttaccagcgtgccaagtgggagggcaagggcatcctgtcgcgtgccttggtcatggagcgcctacagacatttatgccgccgtcggtgatgatgtcgccacggcgcctgcgcaccctgctgcagcaggccgtggagctgcagagccaacactgcccctgccacgacatggcgtgggagacgaatctggagacagtctcgctgctcaccgaccactgctgcaccacggacggctttccaatgcaaactattcagattctcaccgaccattgcgacgaggtctggttctgcaagttctcgcccgatggcctcaagctagcgacgggcagcaaagactccactgtgattatctgggatgttgatccgtacaagctgacccttaagcaccgtcgcgttctcgacggtcaggcccagcttagcgtgagcttcgtcagctggagccccgactccaagctcatccttgtcggcggcaccgaggactcccatgagctctacatctggaacgtggacgacggcaagctagtggtcaagttctcgcagtctctggaggacagcctggcctgcggtgccttcagtcgcgatggcgctcgattcgtctgcggcggccagaagggtcagctttacctatgcgacctcaacggtaccatcgtggactcctgggagggagtgcgcgtaaacagcatagcctttcgggcggacaacaaaacgatcttagcggcggataatcattaccgaatcagagggtacaactttgatagcccgcgttcagactttgatattctgagggagccacatcccataatgacctttagtatcaactccgccgaccgcttggccttgctgaacgtctcgaaccaaggccttcacctttgggacatcgaggacaagtgccttgtgcgccgtttccagggaatacgtcagagcaacttcgccatccactcctgcttcggcggcgttaacgagagcttcgttgccagcggcagtgaggacaaggttgtctacatttggcacatcaagcgcgaggagccgctggccaagctggccgggcacactaagacggtgaactgcgtgtcctggaatcccgtgtacccgtccctgctggccagcgcaagcgatgacgccaccgtgagaatctggggaccgaagcccaacggcagcagcgcaacgactgagagcgacgattgctcttctagctcgtcttcgtcctcctggaatatgacttaaggtccc

SEQ ID NO: 16950 - protein, 630 aa, DROSOPHILA
MQSTSSTSSGSCSRPLEGSTLNSGGSAENVARDGGSGDDSVGIGDENPSGSSAATNGHDSKHNGFIVNNNGSSSRIVDGENNRENTSCSGVQLDKSNQEIIRLIGQYLHDVGLDKSVQTLMLESGCYLEHPSATKFREHVLMGDWSKADSDLKDLEPLIDNGKLATITEMKFILLEQKYLEHLDDGNPLDALHVLRSELTPLQHNITRVHQLSSYMMCSTNQDLYQRAKWEGKGILSRALVMERLQTFMPPSVMMSPRRLRTLLQQAVELQSQHCPCHDMAWETNLETVSLLTDHCCTTDGFPMQTIQILTDHCDEVWFCKFSPDGLKLATGSKDSTVIIWDVDPYKLTLKHRRVLDGQAQLSVSFVSWSPDSKLILVGGTEDSHELYIWNVDDGKLVVKFSQSLEDSLACGAFSRDGARFVCGGQKGQLYLCDLNGTIVDSWEGVRVNSIAFRADNKTILAADNHYRIRGYNFDSPRSDFDILREPHPIMTFSINSADRLALLNVSNQGLHLWDIEDKCLVRRFQGIRQSNFAIHSCFGGVNESFVASGSEDKVVYIWHIKREEPLAKLAGHTKTVNCVSWNPVYPSLLASASDDATVRIWGPKPNGSSATTESDDCSSSSSSSSWNMT

SEQ ID NO: 16951 - DNA, 2376 bp, DROSOPHILA
tactataggaactaccaatgggctcttcaggattgtgtctgccgttgtttccaaaacgaatgccttatgcaaatcgagagcgaccagcgcaaaaaggagggtagatcccgtaagtaaattaaccagttaagtaaaaagtattttatttatatcttgtaaatacagcatttgtgcccgttacggaggaactctgccgttccttcatctgcaaaaagtgcagcgtgggtttccccgtggttgctgaattccccattccggctccctgtggatgcaatcgaaagccaggatcgattgccacagagagattctacagtttgtgccacctgctgaaattctcagcggagaacagcaaacgtaagtcaaaagaattggttccaaattttcggtaatatatacattttgtatctttacagcattcctgacttattcctattgttggcccttctaagtgaggtggattcagttggatcacgttactaatatctttgtttgtttgttttattattttgttgatttgttcatttaaagggagatggattacaaataataaagaaatatattcaatgacgagtgcaataaatttttttgaatatgaaaatcttttttagactaaacagctatgcatatgtttaaacattgaaaagctttttatttttcaacaccataatttatttatttttttggtctttaacttttggttaaatgtcattttttttccttaaaaaccagtaaatagtatttacatatattgaaaatatttacaaatcaattataaacgcagaacgaagtgttatcaaccttgaatcgactataaatttaaagaaaacatatattattgataaataaaaaggcgcagagccactcgtttacttaatcagcagtgatagcctaaaatagaataaaagatcaactgatcaaataatgccctacccccaagttgaacctataaagagtcgatcctcattccgccttggcacagtttcaagtggacttcgatttctacagccagacaatgttcaatataaagttaatcatcctggttgccctgaccatctccatggtccagagctgttccgttgaggagccggaacaggtcgagtgcgggtgtgggtgtggcaagccgcagtgcctctcttgcggatccagatcctgcggatgtggctgcaacccctgtcgatgtccttcctcttccgggtgtggctgcaaggattaatccaggactccaggtaggtgtagcacaaaaatggtgtaaaatatttcattaatatacccaaattgcaggaccccttcagaactttgccttcacaaaaccttcgtttttcaaattatttgtttttccttttcattaaagtactgatacattttgcaaactttcatcttttcgcactttgtgcgctcaattgtaaagggagcggtacaatgagcagacaatcattttcattgcattgatcacttttttattcatattcgttcactcgttggcaaagtaattcctttgttctttccaccacgctttcttgatttccccagttccgagttccgaaatgggaaaacaaaaggaaaagtaatcatatcgggaccccattcgcctgccttttccctcggctacatctcgtttgcacttttctacgtgaattgcttcctttgtccttttagctggagtcctgcagtatttaatttcatttgaaggattccaaagccaggcttgtcttcgaattggaaaagtaaagagtttatttatccgtgctaaacacacttcggttcaaattggcgtatctgaccaagttcctcctagtatcctttaaatatggatacagatgacccaactgtcgagccgcaggatgcctgcgcctaatagccgtaaaagccttatcgagtcatttagtatgaaaacaagcaattaaaatgatgaatatgcaataaacgtggattgtgtatacagacccattcgctggcgagcacaaccactgcctctcaaataaaggacaactcatacattttatatgctaatgagcggcacaaaaaaataaaggagtcgacattttttgggagtgaattgaaaggaataaggcgagcatacatttgcctaatgaaaatagcgccattaaaatgggaaaaacaactttagataccgaaattcgaaacacggcgacgtctggcaattaaaaggatacgaatggaacaagctcctatcaactacccgctgtgatgttgaatatgtatgcattctatctatatatatatatgtatatatatatatatccacatgatcacctagcaaattagagattaacacgcatgtgtcgtcctttttgggcagtccttttgacttctggttcattgaccgccgccgtggcaataaaagtaaatggatct

SEQ ID NO: 16952 - DNA, 321 bp, DROSOPHILA
tacagccagacaatgttcaatataaagttaatcatcctggttgccctgaccatctccatggtccagagctgttccgttgaggagccggaacaggtcgagtgcgggtgtgggtgtggcaagccgcagtgcctctcttgcggatccagatcctgcggatgtggctgcaacccctgtcgatgtccttcctcttccgggtgtggctgcaaggattaatccaggactccaggaccccttcagaactttgccttcacaaaaccttcgtttttcaaattatttgtttttccttttcattaaagtactgatacattttgcaaactttca

SEQ ID NO: 16953 - protein, 66 aa, DROSOPHILA
MFNIKLIILVALTISMVQSCSVEEPEQVECGCGCGKPQCLSCGSRSCGCGCNPCRCPSSSGCGCKD

SEQ ID NO: 16954 - DNA, 2960 bp, DROSOPHILA
ggcaatccgatctgcaccctggacttggttcgtccacgtccacgccctcggcgcgcttcgcaaacgggcgtggccagcattaatagccccaaagcgagacagacgatcaggcacttaacctgcatgactctccggataatggataatgctgctgacggagatgatcactgtcgctatattttcctgctgctgctgctgctgctggcgttgctgtgcgaatctcgtttgatcggtgactgatccactcggccagagtctgcaccactctgctcggctcatctaatttgccacaattgtccggcggatttaaaccgtttggtgtgctctcgaaattcgccgccgctcgcggcttttttattctggattcacatttctcatcgccgcatttccacatttcactcaattccctagctagatttgatttggtagcttgctgatatcgctcgccatcgtaggccatggcacccctttccatgtgtcttgctgggattcggtctagtttacagtggcaatggcacgatagtacgctttcagggaaagtagttaaaggaactggattgttgtattcaaatattttcccgaatatgcagataatagtttatacattttggttcgtcaaaacaatttgtagatacaatgagatggatttagattttattactacttagtgctagaagaacatcgatttgtaaacttgttattctattttaaaaaacatgtttgtgtttctttgttccactgtgcctttttgaaggctatagagcactcaacactttagaaccaaaaagcctcggtttgtttggtttgctttcacacattttaataaaataaatgcaaaaaaatcacttgaattgggtaattgagtcaatttgtcggctttgtgcgcacacacacctatgtactttgccactcacagatactcacataaatgcacacgaggaagcagaaaggtcggattgaaatagactttaaatttccataatccgaaacgcaaaaatgtatttttaaatatttttatttaattgtatcgaaagcattgtagtttatagttacatctcagctttactgtgtcaaaggattttgtaatggctgaaaagtgggcttttctcaaaagttaaccataacgtagtccgtgcgaaaacctcgacgatcgatggcatagatattgtccgcttgacactcgtagaaacctgaaaagattggtaataatatatacatataatctaagtatacatttaatgatcatttgtcgaacttaccagcatccatttgagtggttggatcgatttccattttagatttaacaatattcgcttctatgtgagattcgtgtacctgtaaatgtaaaaattttatatatatatttaaagtattaatttcgtaagttacctgaaagaatcggtgttggtagagctctgcgccatccttaaaccaggtaatggtcggtcggggattgcctaatatccaaaaatgtcagtatgtcaatgtttggtgacttggtaacttcatctaactaactctcaccttgagccatgcaaaagaaagtgatcttgcgtcccagggtgtagtccaattcaaaatgcgaagactttatgatcttggcgccctgaaaaatgttaccacatgtattaatgttgaaaacaatgttgacccactcacattttcatgatcataatagttgactgcatcctgtgatcggtgttggatgaccacgggttttttgcccgtgtagttgcgacgctccgtctttcccgcagtgcttcctgtgacaaaatcagatatttaatttatgcttaattaatatagtttagatcgctcactttgggcggctatgtagatgagatcgccgaaaatcaaaaagcatagacagaggagcacgatccgatgaagattacagatgccacgaggcattattgtcgagccgagattccgattccgatcgcctgcggtgaatgttgttttcaaactgcactgtcgacatccgaacagaacgccatccacatcgctctaatgtgagcgtttttattgaattaagtgaatttagttgggggctttcgacggtgcgacgtcactttccattttcgcaacattgttgcaaatccgctggacatcgagatcattccgctctcgactttatcgttcgccctgttttgactaactcattcgtcacttgcgtttcgttcgcccatttccagtggaatgttcaatgtgccccatgtaacgagcatatatctggtgaagaaaaccgccttcgatgccatctccttcaagcacaaggaattcgatcccgacatggccatgtgcgagtcactccgaaatgcggtaagtgtttgacagaacatcgtgttcaattggttactaatgtgtccactcttctgtccagggtatcttcatgtacgccagcaatctgcgcatattcggtcacttggtcaacgccgatgacttcaacactacggtgacacgtccggacttttatacgttgtttagcaacgagatcgactggacggagaagtacatacatccgaactactcactgcagctgaacgagagcaacaagatacagcagccgtgcccggatgtctattggttccagatcgtgtcggacgcgttctgcgacgatttggtggccatcatggaggcgcacaacggttggtcggacggcagcaacaacgacaatcggctggagggcggatatgaggcggtgcccaccagggatatccacatgaagcaggtgggcctggagcggctctatcttaaatttcttcaaatgttcgttcgtccgctgcaggagcgcgcctttacgggttacttccacaatgtgagtcaaagaattatcattttgaagattttgttttaatattctcactaattttgtagcctccacgcgcgctgatgaacttcatggtgcgttatcggccggatgaacagccttctctgcgaccccaccacgactcctccac

SEQ ID NO: 16955 - DNA, 660 bp, DROSOPHILA
aacaacattcaccgcaggcgatcggaatcggaatctcggctcgacaataatgcctcgtggcatctgtaatcttcatcggatcgtgctcctctgtctatgctttttgattttcggcgatctcatctacatagccgcccaaagaagcactgcgggaaagacggagcgtcgcaactacacgggcaaaaaacccgtggtcatccaacaccgatcacaggatgcagtcaactattatgatcatgaaaatggcgccaagatcataaagtcttcgcattttgaattggactacaccctgggacgcaagatcactttcttttgcatggctcaaggcaatccccgaccgaccattacctggtttaaggatggcgcagagctctaccaacaccgattctttcaggtacacgaatctcacatagaagcgaatattgttaaatctaaaatggaaatcgatccaaccactcaaatggatgctggtttctacgagtgtcaagcggacaatatctatgccatcgatcgtcgaggttttcgcacggactacgttatggttaacttttgagaaaagcccacttttcagccattacaaaatcctttgacacagtaaagctgagatgtaactataaactacaatgctttcgatacaattaaataaaaatatttaaaaat

SEQ ID NO: 16956 - protein, 167 aa, DROSOPHILA
MPRGICNLHRIVLLCLCFLIFGDLIYIAAQRSTAGKTERRNYTGKKPVVIQHRSQDAVNYYDHENGAKIIKSSHFELDYTLGRKITFFCMAQGNPRPTITWFKDGAELYQHRFFQVHESHIEANIVKSKMEIDPTTQMDAGFYECQADNIYAIDRRGFRTDYVMVNF

SEQ ID NO: 16957 - DNA, 6399 bp, DROSOPHILA
tggacagcgatcttctcgttacggcgaataccgaacgaacggaccgtgtagcgggccttggagaacactggctgctgaccagtcagctgctccagcacctgttggcattctctagttagccagtgatcatggttatgctgcatctaggtatatcttaccttggcggcacgggtcagcctgtcaccggactcgcccacgcagatgttcaggcagagtttgcggatgtgcagatccctcatcgggttcttcgcgggatcgcgcttaatcttcttggtaaccgcctgaaaaacaaccaaggaaactcgtcacttcttgtgctgccatcgtaaacacacagcgtacaaattttgcatgacaaaaatattgttgaaaatatgtcgatgcgtgcagcaattgtggttgaacctaccgccattgtggtatgtaggagtgaaagctgctcacaggtatccctcgctacaaataaacgatttaaaagtggttaaataaaaatatcggcaaaaaaaacgcggagcactcaccggaaacttgtaagaaaagaaggaaaggatagtgtggccgcgctgaggcgcacaaatggacctaaaaaacgcacgacacgtgctgttgtcgtgctgttatccaactatcgtgctgttgtgcgcacgtcgttccatcactaacggttaacagggctaacggtaaataaatggggtattccttaaaatgttaaccactgaaattggtttattcaattattttaaatgctgaacagcaaatatggccgataattgtgattatttgattgcacggatgtttaaattactttgaggtagcttgatttgatatttgtttacttggcgttattcgcatgtaacgaaaaatccttttagaataaaaatttatttgaaatacggcccgcttaattaacttcatttcgcattaaacacatcgtttaagtaatgcgccaaaattaataaaaaaaggcacttccagtgatatcaattgaaaaactcgaagtaaacgtccataatagtttatttgaattattaattttagcaataatgtgtattccattgaagaagtccgtcaactttaaagtgtgtagcatcaattcgtatgtagagcttagtcgatggacttcatcttgcagaggaagttaatcggtagcagcttgatttcctcgttaatcctgcagacgaacacatcgccatccttggacagcactctgcccacggactcgcggtcatcgccgtagatgatcttgaattcgtcgccattgcatggtagcactggcgccaagtgctcactaacgatggacacactgcgatcctcctggcgcaggaatacggagcagacgccgttcgaaacggtgcgaatgatgcccgtttgcccaacgagatcggtgtcgtcgtgcgtgtgaatccgaacttcaatgtctgtggtacaccagtcgcccatcgacgagtccagactggctccaggggtctgcggattgtacggcgactgcggtatgccaccaggagtattcggtgaataagtcgatggcgacggagtgttcatgtaaccaacgggatacggcgacggagcaggactggggctgggattgaatggactgtagcttctgtccgatccatacagagtgccaggagtttgcggggcaaactgggaagtcatttgatagccaggggtacctttaagattcgatggagttacaatatgtcaagaacaatgcgcaaccaaagtacttacttggattgtatccagggctgggactgggctcctcaagggagtaatcgaaatcgttgttcctggccggcgttgtgtttgccgtgggatcccaagcgccatgacgtggtgtcatgctgccatcgtgcgatggtgtcattgtaccataaggagtacgagtatccgtatcccagttgggcgtctggcttcccaccaacggagttttcgatccggcagcggtataactgggagtctgggcaccgtagccgggagtgcgagctggggtgcgtccatatgtggagacactgccctctttaccggtaactcccacaatggcaatgtgattccggtctaccgaaatcgtctggcatgaggtatgcagttccacacgagccgtgctctcggtggcatccttcacaattcccacggcgcccttataaggtcctccactaatcttaatggttttacccaagatctcacggtcacgggtcactcggaaaccacctcgtccaccacgggcgccaccacgagctccacgaccaccggatggatgcatgggcgattgaatgcgcggcgacataaatcctaggccgcccacaatgccggcattactaacggtagtcttgctgcctccagccaactgcaaatgcctagtcttgcacacaaatattccaccgttctccgtgtacatgcggcaatggagaaaggccagactgcgatacaaatgcttgatctcgccggaacgtccctaaaagatttgactttacacatactacagattggataaaatcgaataacttactgcatggggtccctccatcaccttgactacatcgcgccggcggatttggttttgatctgcatccagagccaccgtatgacggttctcctttcgcttgtgcaatgcagttggcttgcactcgatgcacttgccattcatgcccaagacatggaaattctccctctccaaacgcactatgacacccacattctgggaactgttatgataaaattcttttaagatccgtttcgcaagtcattacattcgtaaactcactccagttgcaccatatctccccattgaaactggccgagacaatccacacctgtggccacatccgagcacagttgcaagtcccttggcagcacctccaactcgtgattggttagatcggagacgagcaccactcttgtaggctcgacgcgaataatgaggccagtttcgccttcgtaacgaccagccaacactctggcgtgatctcctgttttgaagtatttgcgcagctcactggctttgaaaatcaaaggatcctgcaaaaatcacttgttttattacttcatcctacttttcttttgtcatacacacctttaaatcctgatgtttgggcatgacagtaatcatggtgccgtcaatagccacaatcttggcctgtaagttttccaaatcacccacgcagacttccacattgtcgcccattgagaatgagtgagccatagtgggatcatccttcacggtgcccataatttccaagtttacctctgcataagtatatttccaggttaatatgaacacaagcaggtctaactttcatatcttaccttccggagattcttcaaagcgttctagctcggctaaagtgggctttacaccgtccgagagaatggccgacatggtaaagtttttatacaggaatccctttcgcgaataccggtttccctcgaagagcaggaaatcaccatctgagtgtacttcacctccaattgccctaaacaaaaacgtagtttaggtcttgagcgaaattaattctaatggtactacacaccttacggcctctggatcaaaaggtttagctgctgggcggcgtttcttcttgcgcttgctatcgtcactctcctattgaatacatacatttatagatctcattacactttatgacatgtttatgatcgccctaccgttgctgttgttcgcaaggctcctcgcatgcgtgtgtagtcaatgcgaggaagcaacttaagatgtacttggttctgggccagatccacgtagtccacctgtgcgatgtcgtccttgtagagaccgcgcttcaagcgcacccattgtttcactttaaggccaacctgctccttgaccacctttagcacatccgtcatctccttgatgggcaccatttcctgtttccatttgcccatccgaagattacccacgttatcaatgcaagttttaacatgagtctgcttataggcctccaggtaaatgtatcccttgacgccctctggtgcaataatagatttgatttgcaatggatcgtctgtgttcaggtaggttaagtactttcgcattagaagaagcgctgtggccttctcctcgcctatacgacatttcaccatccacaaattgggatccctgcgaggagtacatagtataaaatggttgccatttcgtaaagatttggaaactcacttgatgccgggcaatagagtttgttgggtaatttcgtctgacatctcttcaccgccatctccaaagtggcgttttgcaattgactcatcggcgtacttcttacggagatactcctctatctcgtcctccttttgagtgctagaatataggaaacaaattagactgagaccgggcactatccgaagcttcaacttactcccaaaggtttgtgcctcgtcgtcgaatttcaatatccctggctgtggggcccagctcatcgatctcattgccaacaatgccaatttcattggcaccctcttcccactcgtcatcttcatcgacctatagtttagtgaatgattatagttatatatggaaacaattatacgtgttataaagactcacttcatcgtccacttcggcctcgtcaatgatgaagcccccaaaacgctccttctttttcttcttccttgggtgatcgtcgttctcctcctcatcgtactcctcggaatcgatgtcctcacctggtggctcctcctcctcttcgccggattcatcgctcttgccgcgattatctcgtctctgtggagattccgagccagatctagagtggcccgattgagagcgtgatctggacctggaaacggagcgagatcccctggaaccggacctggaacgcgatcttgacttggagcgggcactccgttgcgacttgttggaaatggatccatcttcggagccactatccgacatattactgacttccgagtccgacattattgtctatgtgagtcctaaaggcaagcaaagaaatgtgataacaatcaatttgatatggcaagaatgcatatacaattaggagcaccccgccacttttgatatgcaggtgctcttgcggacaaaccaacatatccaagttaattggatgatgatcattattctattgttatatacatgaaactagtaagaatgccacattgtctaattatatctaccaattcctttctcaagtttttttttttgcttcttaaacacgaaatttgtaaacgtgtgcgagtgcaacgagtgcaaatcgcattttttatatcttcaactattattcacaatatatgctggggtatatgcattttatactggttgcgaaggtgtaataacgatagtacttactatttcctttatgtttaattagatattttctaagcgaattgttcaaaagcaaaaaatgtaattctttccacgccagtggtggacagtcgtaaatttgttgttatcgattgcttgcgttagaaaagttaataccaaagtgggaactagttccatgagctaatttagaaactaaaaattaaattattacaaataaataatataaaacatttactctgctataaaaagataaatataaaaattgaaaataaatgcttaattccacagatgatgtgtagcgctccagtgaaccagttccaattcgggaacagccctgctggcttattatcagcagaaggattcggtcacactggctactacggagaaataagtaatcatatttttaaaaataaccattactggctgataaaagacagcgggcagacacaaatccataacctgaatcgacgatgtggcgttgaagtgaaaacaccgcaaggttcaccgtgcaattcactcaataaccatatcaaccccacacatctggcgcagactgtatgtataaacagatgcacatacggggggatgtgcatgtgtgtgcccactaccacataccgcatttccataaaccgagagtttggcaataacgacgaatctctcgctttcccgaccacattaaagaattcggttatatagcccgccgatcgacggcccgtaactctggcgtcggcagagagtgggcgtgcaagtaggtttctcgtggcagtaaggtgtggttccacaacaccataaagcagacggagtgaaagaaaaaaacaaaaaaaaaacacacacaacttggtggtgggaaagtctctcttctcttccacctgtgaaggaagattttcaggaagtccgccagttagctagctattgtgtcatgcaatcgatatccgccgtaacatatgcttctggtatctcaggttgaaacctctatacggaatcgcccactgtgcggtaactgtggaccatgaacaccgcgggagccaccagtcaaccgccgcccactaaaaatgagagtgagttatgccacttggccccactaccaccacatcataaaactaaat

SEQ ID NO: 16958 - DNA, 3443 bp, DROSOPHILA
ccaccactggcgtggaaagaattacattttttgcttttgaacaattcgcttagaaaatatctaattaaacataaaggaaatagactcacatagacaataatgtcggactcggaagtcagtaatatgtcggatagtggctccgaagatggatccatttccaacaagtcgcaacggagtgcccgctccaagtcaagatcgcgttccaggtccggttccaggggatctcgctccgtttccaggtccagatcacgctctcaatcgggccactctagatctggctcggaatctccacagagacgagataatcgcggcaagagcgatgaatccggcgaagaggaggaggagccaccaggtgaggacatcgattccgaggagtacgatgaggaggagaacgacgatcacccaaggaagaagaaaaagaaggagcgttttgggggcttcatcattgacgaggccgaagtggacgatgaagtcgatgaagatgacgagtgggaagagggtgccaatgaaattggcattgttggcaatgagatcgatgagctgggccccacagccagggatattgaaattcgacgacgaggcacaaacctttgggacactcaaaaggaggacgagatagaggagtatctccgtaagaagtacgccgatgagtcaattgcaaaacgccactttggagatggcggtgaagagatgtcagacgaaattacccaacaaactctattgcccggcatcaaggatcccaatttgtggatggtgaaatgtcgtataggcgaggagaaggccacagcgcttcttctaatgcgaaagtacttaacctacctgaacacagacgatccattgcaaatcaaatctattattgcaccagagggcgtcaagggatacatttacctggaggcctataagcagactcatgttaaaacttgcattgataacgtgggtaatcttcggatgggcaaatggaaacaggaaatggtgcccatcaaggagatgacggatgtgctaaaggtggtcaaggagcaggttggccttaaagtgaaacaatgggtgcgcttgaagcgcggtctctacaaggacgacatcgcacaggtggactacgtggatctggcccagaaccaagtacatcttaagttgcttcctcgcattgactacacacgcatgcgaggagccttgcgaacaacagcaacggagagtgacgatagcaagcgcaagaagaaacgccgcccagcagctaaaccttttgatccagaggccgtaagggcaattggaggtgaagtacactcagatggtgatttcctgctcttcgagggaaaccggtattcgcgaaagggattcctgtataaaaactttaccatgtcggccattctctcggacggtgtaaagcccactttagccgagctagaacgctttgaagaatctccggaagaggtaaacttggaaattatgggcaccgtgaaggatgatcccactatggctcactcattctcaatgggcgacaatgtggaagtctgcgtgggtgatttggaaaacttacaggccaagattgtggctattgacggcaccatgattactgtcatgcccaaacatcaggatttaaaggatcctttgattttcaaagccagtgagctgcgcaaatacttcaaaacaggagatcacgccagagtgttggctggtcgttacgaaggcgaaactggcctcattattcgcgtcgagcctacaagagtggtgctcgtctccgatctaaccaatcacgagttggaggtgctgccaagggacttgcaactgtgctcggatgtggccacaggtgtggattgtctcggccagtttcaatggggagatatggtgcaactggattcccagaatgtgggtgtcatagtgcgtttggagagggagaatttccatgtcttgggcatgaatggcaagtgcatcgagtgcaagccaactgcattgcacaagcgaaaggagaaccgtcatacggtggctctggatgcagatcaaaaccaaatccgccggcgcgatgtagtcaaggtgatggagggaccccatgcaggacgttccggcgagatcaagcatttgtatcgcagtctggcctttctccattgccgcatgtacacggagaacggtggaatatttgtgtgcaagactaggcatttgcagttggctggaggcagcaagactaccgttagtaatgccggcattgtgggcggcctaggatttatgtcgccgcgcattcaatcgcccatgcatccatccggtggtcgtggagctcgtggtggcgcccgtggtggacgaggtggtttccgagtgacccgtgaccgtgagatcttgggtaaaaccattaagattagtggaggaccttataagggcgccgtgggaattgtgaaggatgccaccgagagcacggctcgtgtggaactgcatacctcatgccagacgatttcggtagaccggaatcacattgccattgtgggagttaccggtaaagagggcagtgtctccacatatggacgcaccccagctcgcactcccggctacggtgcccagactcccagttataccgctgccggatcgaaaactccgttggtgggaagccagacgcccaactgggatacggatactcgtactccttatggtacaatgacaccatcgcacgatggcagcatgacaccacgtcatggcgcttgggatcccacggcaaacacaacgccggccaggaacaacgatttcgattactcccttgaggagcccagtcccagccctggatacaatccaagtacccctggctatcaaatgacttcccagtttgccccgcaaactcctggcactctgtatggatcggacagaagctacagtccattcaatcccagccccagtcctgctccgtcgccgtatcccgttggttacatgaacactccgtcgccatcgacttattcaccgaatactcctggtggcataccgcagtcgccgtacaatccgcagacccctggagccagtctggactcgtcgatgggcgactggtgtaccacagacattgaagttcggattcacacgcacgacgacaccgatctcgttgggcaaacgggcatcattcgcaccgtttcgaacggcgtctgctccgtattcctgcgccaggaggatcgcagtgtgtccatcgttagtgagcacttggcgccagtgctaccatgcaatggcgacgaattcaagatcatctacggcgatgaccgcgagtccgtgggcagagtgctgtccaaggatggcgatgtgttcgtctgcaggattaacgaggaaatcaagctgctaccgattaacttcctctgcaagatgaagtccatcgactaagctctacatacgaattgatgctacacactttaaagttgacggacttcttcaatggaatacacattattgctaaaattaataattcaaataaactattatggacgttt

SEQ ID NO: 16959 - protein, 1078 aa, DROSOPHILA
MSDSEVSNMSDSGSEDGSISNKSQRSARSKSRSRSRSGSRGSRSVSRSRSRSQSGHSRSGSESPQRRDNRGKSDESGEEEEEPPGEDIDSEEYDEEENDDHPRKKKKKERFGGFIIDEAEVDDEVDEDDEWEEGANEIGIVGNEIDELGPTARDIEIRRRGTNLWDTQKEDEIEEYLRKKYADESIAKRHFGDGGEEMSDEITQQTLLPGIKDPNLWMVKCRIGEEKATALLLMRKYLTYLNTDDPLQIKSIIAPEGVKGYIYLEAYKQTHVKTCIDNVGNLRMGKWKQEMVPIKEMTDVLKVVKEQVGLKVKQWVRLKRGLYKDDIAQVDYVDLAQNQVHLKLLPRIDYTRMRGALRTTATESDDSKRKKKRRPAAKPFDPEAVRAIGGEVHSDGDFLLFEGNRYSRKGFLYKNFTMSAILSDGVKPTLAELERFEESPEEVNLEIMGTVKDDPTMAHSFSMGDNVEVCVGDLENLQAKIVAIDGTMITVMPKHQDLKDPLIFKASELRKYFKTGDHARVLAGRYEGETGLIIRVEPTRVVLVSDLTNHELEVLPRDLQLCSDVATGVDCLGQFQWGDMVQLDSQNVGVIVRLERENFHVLGMNGKCIECKPTALHKRKENRHTVALDADQNQIRRRDVVKVMEGPHAGRSGEIKHLYRSLAFLHCRMYTENGGIFVCKTRHLQLAGGSKTTVSNAGIVGGLGFMSPRIQSPMHPSGGRGARGGARGGRGGFRVTRDREILGKTIKISGGPYKGAVGIVKDATESTARVELHTSCQTISVDRNHIAIVGVTGKEGSVSTYGRTPARTPGYGAQTPSYTAAGSKTPLVGSQTPNWDTDTRTPYGTMTPSHDGSMTPRHGAWDPTANTTPARNNDFDYSLEEPSPSPGYNPSTPGYQMTSQFAPQTPGTLYGSDRSYSPFNPSPSPAPSPYPVGYMNTPSPSTYSPNTPGGIPQSPYNPQTPGASLDSSMGDWCTTDIEVRIHTHDDTDLVGQTGIIRTVSNGVCSVFLRQEDRSVSIVSEHLAPVLPCNGDEFKIIYGDDRESVGRVLSKDGDVFVCRINEEIKLLPINFLCKMKSID

SEQ ID NO: 16960 - DNA, 3266 bp, DROSOPHILA
tgctgctaatatctcagttgctgtttatgatggtgctgctgcagatcctgctgtcacaagaatatcctgctgttttcgatgtgtgggtgagaggtacgccgtgttgttgctcgcacatacacacaaatcgataatggcagctcctttcgctgaagggataaggaaaaggactcgactcagccttggcactggactgacatacgccgcgatttcacgtcgattgattcgtcgagttgtttacggttacccaatcaactattcacacgcccgcggacccactcgtctggccagaattgaactgactccggctgcagtggctcaattattcagcaaatgcaacgcaccaactgttctacctttttgcctcgacacgtcgacaccaaaggacacacaattttcaattttttcttcgctctcaggcggcgaattgactggtgcggcgaaaacgggccagttttgtatacgttttcataattcaactgtttcaacctggctgactggctggctaactgactgactggatgactggctgctgcccacacaatttccctgctgcttttcctgctgctgaaaatcgatgggtttccgtgcctggggtgtctgtgtgtgggcgtagctttcgcggcgatttcgggcgagctttccattcatgcgccggtcatgcgcacttcgcacttccgcagccttgtggagcactggcccaggggttcatttgaatttattcgtgggcgcgaatttattcgttcactttgtgaacccatgttcttatcctgaaacaatatagaccaaggaactcataaaaacagtaaataaaatttataagaattgtttctttaaatattctaaatattccttcttgaaacctttggaactggcgcatatcgcaaccttgagaactgcaattagtttattgcacaataaaaaatccaaatcaaatctgggttcaaagattctgagtataaagagtttaatgaccaacaattaacaacgattttaccacctacagtttactgtttcccgctagtagatcgcgtaccaatcgaactgcgtacatagccgttccaggagccgtggtcacaccgtagccgccgtggccgtagttgtggactaccttcagccgcctgccttccggattcgtgatcagttctggctccacccgaacgacggagcggtgtggccgcagaccaacacattcccgcacgatctccgctttccggagactgggcagcaaatcgtagcaacgctctcgaatggccatgctatcgtatttgcaccactcggtgttgtagctgtcgaattggcgacatcctcccagggtcacagtctcaaatccgggaagaacgtaggtgtcgtaatcgccgtagaaagccgtctttacccagggagcacgcactttgagcacttgaccccgaatgggaaccaagtgctggtccccacacaactccttggctcccattccggtgcagttaaggagcaagtcaatgttctgcggcacttcgaaaaagctgttcacatgctgacggacaacctctcctccgttctccaggaatctacaatatgttaatatttacgattattttcaaattgtttctctttcatatcataaaacagctactcactttttagtggcatagggcaagaagaggcggctttccgttaggcatgtggtgaagaaggatccgtacttccagccgccgttgcatagcctcagttcctcctcggtggctcttcggtagacgggcaatagtttctcaataaagtggttctaaggcagccaacaacaaagttaatcgaattaagccgatgaagataagaatcactgattgtcgactgcccggcaacgtacccgtacgatggagggggaggtgcgggagtaaatatagccggataattggcacacgcccgccagaggagcctccttggagcgacgcagctcatcccagtagttgaaggcatcggtcatccattgtctacgatgaaaagaaaagtcgttagatgcacaacaggtgtgtttgaatcccaaacagattctcactgcgtaattttctgggtggggcccataaagctggttccaggtcggaaaattccagccgccacatagctgacggtgtcctcgttaaaccgatccgcaatcacggaaacccttgctgtgggaaactccttctggagttctaaggcggtcgtaagaccaatgataccgcttcccaagactccgaaatgcattctggatccgctttgagttgatacccaatcccaatggaaggcgatttggtactgagcatgcttttaaaggtgcttgcgaagctggctgcgtcttatcagctcttatcaaatccgctctccatcgcgcctccaaagatgagataaactttactgctctcttttaaaattgcaataaacactttttccgttgtttttattatggttgcaaacagtgctgcacgcttacagtagactttaattaagtataacgaaatattaatgtaacagtgagtattcaatacgagatacagcttttaaaatagatatagaattaaatgtagccaaatttaaataaaaaaagcatctttgcttaaaaaactggcaaaatacatatatttcatagcttaaaaataagctaattgtttgtcctattctttcttacgggtatctactgtacatcgaaaatactgtgttgaatcagctgtttgtactaaacacatctaaaaaaaacacatccattctagggaccacaacaacttttctaaactgtcgtcagtataacttgtcaacccaaattggattgacaaatttttaaaacaattattgtactccgctgaaattaaactatttaccggcgttcaaagcggaaaactcaaaaatacctacacgcggaacagctgagtgcggtattttttagtttcgctcacaatttgtacgtgcgatgcacgaatcgttttcaacactgcccggagggtcacactatccactcagatatttatttttctaataacatttacttaaaagcagactttacgcagagctttggccacggaggaaacggaacagatagccagcgagcggagcagccaggacttggagcaggaatcggcaggaacaccaggacggatttccccaagacaagcagtagtagtatgtcttcgaagtcgccaagcgaggtgagttccctttgaagtcttgggataatttcgatatccgaggcgtattcaatatagtagagggttttaaccgcagctgggcaaatgttaacgatccggaaaggtttc

SEQ ID NO: 16961 - DNA, 967 bp, DROSOPHILA
cgccttccattgggattgggtatcaactcaaagcggatccagaatgcatttcggagtcttgggaagcggtatcattggtcttacgaccgccttagaactccagaaggagtttcccacagcaagggtttccgtgattgcggatcggtttaacgaggacaccgtcagctatgtggcggctggaattttccgacctggaaccagctttatgggccccacccagaaaattacgcaacaatggatgaccgatgccttcaactactgggatgagctgcgtcgctccaaggaggctcctctggcgggcgtgtgccaattatccggctatatttactcccgcacctccccctccatcgtacggaaccactttattgagaaactattgcccgtctaccgaagagccaccgaggaggaactgaggctatgcaacggcggctggaagtacggatccttcttcaccacatgcctaacggaaagccgcctcttcttgccctatgccactaaaaaattcctggagaacggaggagaggttgtccgtcagcatgtgaacagctttttcgaagtgccgcagaacattgacttgctccttaactgggtaaagacggctttctacggcgattacgacacctacgttcttcccggatttgagactgtgaccctgggaggatgtcgccaattcgacagctacaacaccgagtggtgcaaatacgatagcatggccattcgagagcgttgctacgatttgctgcccagtctccggaaagcggagatcgtgcgggaatgtgttggtctgcggccacaccgctccgtcgttcgggtggagccagaactgatcacgaatccggaaggcaggcggctgaaggtagtccacaactacggccacggcggctacggtgtgaccacggctcctggaacggctatgtacgcagttcgattggtacgcgatctactagcgggaaacagtaaactgtag

SEQ ID NO: 16962 - protein, 307 aa, DROSOPHILA
MHFGVLGSGIIGLTTALELQKEFPTARVSVIADRFNEDTVSYVAAGIFRPGTSFMGPTQKITQQWMTDAFNYWDELRRSKEAPLAGVCQLSGYIYSRTSPSIVRNHFIEKLLPVYRRATEEELRLCNGGWKYGSFFTTCLTESRLFLPYATKKFLENGGEVVRQHVNSFFEVPQNIDLLLNWVKTAFYGDYDTYVLPGFETVTLGGCRQFDSYNTEWCKYDSMAIRERCYDLLPSLRKAEIVRECVGLRPHRSVVRVEPELITNPEGRRLKVVHNYGHGGYGVTTAPGTAMYAVRLVRDLLAGNSKL

SEQ ID NO: 16963 - DNA, 6985 bp, DROSOPHILA
gactgtttcctccaccacaaatgcaggttcaaccgccagttctacaacttcttcgccatccataagcacttcaacttcttccccaacaaattacaagattgcggcctgttacagcatctacaaggacggaggtgagcacacggcgttgtttggaactcgattgttatacaagattttaaatttaaatgtttctcttttgaccagagttaaaccgtggttgtgttaaggtgcccgagaaacattccggctgccaggctgttcgaaatgagcttggcataacagaagactctgccgatcagtgcgatatctgtttgacgaatctatgcaatggaagcactagcctgaaggtttcacttggcgccatgattcttctcttggcgatgggacttaaaaacgtgctgtaggagagagccggagaatactatgaatgatgtacatatatatttgttagtaatttgaatacattattaaataataaacggttaccttatatcacttcacatactttggcactcgacgctttttttataatgctttatcatagagcttaaattgtttcatttcaattgattgatggattaatccccaaacagctgtctataaggaaatgaacatgacttaaaatattaaactatattactttcgtgagcgggaaagaaccttagcctcttatctaaggtaaagattcttgaacggaagtcaaagcttgcaaaattaagtatttgtgactttatccaattacacagtctcttcaaaaactataaattaatagtatatctcaataaacaaaatcccctcttagcaattaaaaaaatccttacaccccttaaacttgtatgacgaatatggttttacacttaactaaataaaaaaaaagagaacactatagtaacccgcagactgagtatgagtaactggtataacaattccacaaaacgtaagaaatgaagcgttacgtgaactagataacgtataacaatagaactacgtgaatgaatggttgtagattaggaacagagaaaatatttcatttattttttaaggcacatctttgctcttagtgaatgtttaataaatacaaatagtagattaaacaaaggtttcctatacagtttttaagttacatatataaagtttttaacacacacacacggaaaaacatatatacattcacacaaaataacacattcaaaaacattatgattacttaaactatgattagccagctaaagattcggtgacaaacacataatagctgattctcacgaggaaagactgtgattctgcctgttttcgaatgcctgtaatcaatttgtaaagtatttagcattatttctttttcgtgtgctaaacgaacgaattaaaacgaaccttttgggcgattttcagcagactctcataggtggcgtgacccgtttgcttcaccataccgtggaacaccttagaatccgccagcgtcagcagttcatagggcgttccaaactccaccgctcgaccagcgtccatcaccaagactttgtccgagtccatgatggtgtgcaaacgatgagctatcgtcagcacagtgcactccttgaacttgtttcgtatggtggtttggatgaggccatctgtctggggatccacattggccgtagcctcgtccattaccaggatacgattttcacgcagtatagcccgtgccaagcagaccaactggcgctggccaacgctgaagttggttccgccctcggtgattttgctctgcaagccactgggaagatcagcaaccacctcctttagctttacctcctccagggagcgccacagcttatcatcgctatactcgtcgaagggatccaagttgtatcgcatagtgccggaaaacagaacgggttcctgcggtatgatcgagattttgctgcgcaggtcatgcaaacccatctcactggtatccctcttgtctatgagcacagatccatcgttgtaggacagtcggaacagggcattaatcagcgaagactttcccgctccagtgcgtcccacgatgcctactttctccttaggttttattacgaaactaagtgacttgagcacattctccgactttggatccggcgtatagcgcaagctaagctcgtcgaaaacgatttttccctgctctggccatgactttggtggcttcttatcggccggagcttccaacgctccttccggttcaatgtcctcgtactcaaccactcgctccacagctgtcatcgtattctccagctcggctgactgacgcattccccactgaaccatgccggtcattcccattgcctgtaggacacagaaagattaagagtccaacaatcaaacaataatccgtctttgcttacctgcgtaatggccagtcccacatcgcctccgttcgcaggaggaaagatgaagaaactgagagtaattatggctatgtaaatcacacagaaacagtcaagccaatatccgaaggctcgcgaggtgctaatgaacatataaaatgcggagctatgcatatcctggtaattgtcgaactccgcctccagaacacgttgggctccaaaggcacgaatggtggacagaccggtcaacgaggcagctaaatgcgagtatactggagaccgagctattcgaaaaaagttcatgaaatacatgtggaaggaattttcataatcgggacttactaattgcttccatgcgctttacatcccttgatgtctttagataaaaggtgcgcagttgatagaaaataatccccagtactacggttggaataaggaacagcggattgacaacggctatgacgatcacaatgccagcaagtgcaaggaaaatctggatgacatccatcatcacggcaggcagtatctcgtcaacttgtcccatatcctttgagaaacggtttagaatgcgcccagatggattcgtattgaagaagtacatggcagctcgggtgatgccgcggaacatggaattgtgcaaacgaattgaggctttcatggccaaattaaagaataaaaacgagcgagccacggtcaccaggatggtcagtactgtgatcaccgtgaatatataagtatccagcatttcagcatccacggacaatcctatatcacgaagccatgtcgacagacgaggttcgagttcctcagagcgagttgtgtcattattatctgcacggtaagccacatttccctttttggtaaccctaaaaggtaagaatatatatattatatatttattaaagaaatcccgaagcaattacttaccaatatgagagaaaatagtcacccagagaggccaatccttgcgagagcacacagaagcccatcatcacgaagaaggcgaagaaaccgcctcccgctttgaagtatttgctgtacaagcgcaggccgatttgaccagcctcctggcgttcctggttgttagcttgctccgcttcgaggtcatccatgcacgaatctgccatggaaagtagggattgctcgctgttgcgtcgctggtccgaatgactgtgggtgtagctgcccgatcgcgaccgtgatcgctcctctgattgctcatcccgctctggatcggctagcatggaggcgaagtccaacccggattcgcgtagagactcgtaggtgcccacggcgcttacacgacccttatccatgatgacaatctgatcggcgtgctgcaaaaactggagctgatgagtggccaatataacaattcgctcgcgtagatagccacgcatgcactgctcgaacagatggcgggccacatgggtgtccacggcactcagaggatcatccagcaggtatatggaggtctcccgataaacagctcttgccaaactgattctcgccttttggccacccgacagggaagctccacgctctccaactatggttttatccttaaacgggagcagctcgaaatctcgctccagggcacatttcttcaccaccttagcgtaacgacgacgatccataggctggccaaagagaatattttgtcgcacagtgccggaaaagagccacggttcttgggaagcatacgacatggagccattaacctttatctcgccagactctgcgggcagttcaccaaggatggcttggatgagactggatttaccggatccagtgcgtccgacaatacccagcatggttccaggctgaacacgaaggtttacaccattaagcgagtaatcgggggagttaacatcccatttggccataagtccgctaatagagattcccgcctccgacaacttggcgttctcattaacagtggcaattggtggacctaaaagcttatcctcagcttcgtcgcgctcctcatctccatcggcatgaaccgtttcctgattgcttccttggaaatcctcggtaagatccacactcatatccatcacattcgtctcgtcggactgcatatacttctggacacgcttaatggacaccagggtctccgccatttgggaaatgccctggggaaagaacaccgtcatagtggtacgcaggatattgtagtaggctgtgatcaagaacgccacttccggggttaggaacgtcccgagcagaacatatcccaccagactcaggaaaattgagacacgcgtcagaaagatgatgaaggagagcagaattccacggatgtaggacacatggcggatggcatttatctccttcttacgggcaaaggccaccatatgttcgaatggcaattcccatgcgtacattttaatcacctgaatgcccgagatgatttcgttcatcatccgtaccctttcatccgtgcgtaaggcggttctgagtcgcaacaccgatgttctttttcccagatacgcctgcagggggatgaacagcaacatgaaggccacaccaaacacagcagcgattccaatctgtaaaaaaatttgggtttcttaatcgtgatattttgggttcaaaagattatcgcttttctcacctcacggtacattaggtatgtgataaagagggtctccagcggtcccacccacaagtagtgtacgaatatggtagccagatcgagacgtcccacgtcgttggacataagattcaccacatgtccagctgtggtgtctcccaacgccgacttactcagccgtaacgccttgcggtagatcatgctgcacataccaacgcgcatcttgagtcctgcaatagtatcagcaaatagtttaaaaaatttaatatcgtatcgcaaataaagcttcaaacccttttatttaacaaccagacactaagtgggacgattacctaattaaatccagattgctaattttttgtcactttttttatacgccgacatcgtttaaaacgaattaggggaattaccaaatagattaattaagacattctctacaatagttaaaatcgttgacacggcataaattatttttttagcttattagcttgtagaatgatacatcgggtgttaagaatataccatccttattttggttatatttgacttatgtacaaaataatatgactctttagaaggagaacacttgactcacccacatgcattgtgcctagcatatagggatgcattataatgacattgagggcactgcacaggatcactccagctgcatagtaataggccgattcaatcgattccgagccatgtgtgtagtaggcgatgagtttcagcaggaagattggctgaagcgttcgaagacccaattccagcaggaaaagcaccaggccaagcagtgcgaagtaccagccaaaaactcgcagaagggctctcaacaaattgggctttcctttggtcttctcaagttccaattcccaggaagcgcacaatttgttccccagagtctctggaaaaattgcacaaattaacacaatttaatcacagataagagacccaataaattcggattacgaaaacaacaattacccagagacacaattatcaattgggaaaaaagaaacacaaaatcgtagaaacaattgaagacataaagcaaatcaattaagacggtcaacgaacatactatgtacaatgtacgtgcatcgatcagtaaaatgaattgttcccatgataactacatacagtgcgttcggaaaatataagtctgattgaagtaaagacatgtggagtgatcacttcattatctactgtttttcatgcacaactatgacttgcacagataataaaatgtctccattgatgtatttatgcttatatcgatttagaatttcgcaattcaccatttggtgaatcataataagaatttcaccataccagatttgtgctcttttaaggctctgtaaagatccttggtatccaatgtgcgtttccgacccttgataaaagtcggcatggtgtacctacgtatattgttaataaattaaggccattaataggtttacattaaatgtgtagttactatgctcaccaaaaacatgctgccgaaataaaattgcaatgttcccggggattttccggcaaatctgccgttttcagcgactgcatgttctactgcctctaaagaaactgaaataaaaaagggtgtataagcagcgtaatagataaagaatgaactgagctgtattggataagggaaatatgtaattctgttgagtggttctaaaacaaaagtcgatatgagcacaaacacggcacatcttaatcaaacaaacattgtcgtttcatttatcaacgctacgtattgacgttggcttggcgactccaagaaagtcgacgtactatttattttttagtggaaaacccatgggtttgggtgacaagggcggttggctcatgagtttgtagttcgtcataatagggcttgctgtaacgacgggcccagggaagcagcaatgttgaagaggggtttggttccctaaaaccaaacacgcgtttgccattttgcagtacagtaaacaactggtaacagtgcatgttacacagtgcacatgttttacattctaaagtagcaaaagtcgcttttcta

SEQ ID NO: 16964 - DNA, 4351 bp, DROSOPHILA
tttctttagaggcagtagaacatgcagtcgctgaaaacggcagatttgccggaaaatccccgggaacattgcaattttatttcggcagcatgtttttggtacaccatgccgacttttatcaagggtcggaaacgcacattggataccaaggatctttacagagccttaaaagagcacaaatctgagactctggggaacaaattgtgcgcttcctgggaattggaacttgagaagaccaaaggaaagcccaatttgttgagagcccttctgcgagtttttggctggtacttcgcactgcttggcctggtgcttttcctgctggaattgggtcttcgaacgcttcagccaatcttcctgctgaaactcatcgcctactacacacatggctcggaatcgattgaatcggcctattactatgcagctggagtgatcctgtgcagtgccctcaatgtcattataatgcatccctatatgctaggcacaatgcatgtgggactcaagatgcgcgttggtatgtgcagcatgatctaccgcaaggcgttacggctgagtaagtcggcgttgggagacaccacagctggacatgtggtgaatcttatgtccaacgacgtgggacgtctcgatctggctaccatattcgtacactacttgtgggtgggaccgctggagaccctctttatcacatacctaatgtaccgtgagattggaatcgctgctgtgtttggtgtggccttcatgttgctgttcatccccctgcaggcgtatctgggaaaaagaacatcggtgttgcgactcagaaccgccttacgcacggatgaaagggtacggatgatgaacgaaatcatctcgggcattcaggtgattaaaatgtacgcatgggaattgccattcgaacatatggtggcctttgcccgtaagaaggagataaatgccatccgccatgtgtcctacatccgtggaattctgctctccttcatcatctttctgacgcgtgtctcaattttcctgagtctggtgggatatgttctgctcgggacgttcctaaccccggaagtggcgttcttgatcacagcctactacaatatcctgcgtaccactatgacggtgttctttccccagggcatttcccaaatggcggagaccctggtgtccattaagcgtgtccagaagtatatgcagtccgacgagacgaatgtgatggatatgagtgtggatcttaccgaggatttccaaggaagcaatcaggaaacggttcatgccgatggagatgaggagcgcgacgaagctgaggataagcttttaggtccaccaattgccactgttaatgagaacgccaagttgtcggaggcgggaatctctattagcggacttatggccaaatgggatgttaactcccccgattactcgcttaatggtgtaaaccttcgtgttcagcctggaaccatgctgggtattgtcggacgcactggatccggtaaatccagtctcatccaagccatccttggtgaactgcccgcagagtctggcgagataaaggttaatggctccatgtcgtatgcttcccaagaaccgtggctcttttccggcactgtgcgacaaaatattctctttggccagcctatggatcgtcgtcgttacgctaaggtggtgaagaaatgtgccctggagcgagatttcgagctgctcccgtttaaggataaaaccatagttggagagcgtggagcttccctgtcgggtggccaaaaggcgagaatcagtttggcaagagctgtttatcgggagacctccatatacctgctggatgatcctctgagtgccgtggacacccatgtggcccgccatctgttcgagcagtgcatgcgtggctatctacgcgagcgaattgttatattggccactcatcagctccagtttttgcagcacgccgatcagattgtcatcatggataagggtcgtgtaagcgccgtgggcacctacgagtctctacgcgaatccgggttggacttcgcctccatgctagccgatccagagcgggatgagcaatcagaggagcgatcacggtcgcgatcgggcagctacacccacagtcattcggaccagcgacgcaacagcgagcaatccctactttccatggcagattcgtgcatggatgacctcgaagcggagcaagctaacaaccaggaacgccaggaggctggtcaaatcggcctgcgcttgtacagcaaatacttcaaagcgggaggcggtttcttcgccttcttcgtgatgatgggcttctgtgtgctctcgcaaggattggcctctctgggtgactattttctctcatattgggttaccaaaaagggaaatgtggcttaccgtgcagataataatgacacaactcgctctgaggaactcgaacctcgtctgtcgacatggcttcgtgatataggattgtccgtggatgctgaaatgctggatacttatatattcacggtgatcacagtactgaccatcctggtgaccgtggctcgctcgtttttattctttaatttggccatgaaagcctcaattcgtttgcacaattccatgttccgcggcatcacccgagctgccatgtacttcttcaatacgaatccatctgggcgcattctaaaccgtttctcaaaggatatgggacaagttgacgagatactgcctgccgtgatgatggatgtcatccagattttccttgcacttgctggcattgtgatcgtcatagccgttgtcaatccgctgttccttattccaaccgtagtactggggattattttctatcaactgcgcaccttttatctaaagacatcaagggatgtaaagcgcatggaagcaattactcggtctccagtatactcgcatttagctgcctcgttgaccggtctgtccaccattcgtgcctttggagcccaacgtgttctggaggcggagttcgacaattaccaggatatgcatagctccgcattttatatgttcattagcacctcgcgagccttcggatattggcttgactgtttctgtgtgatttacatagccataattactctcagtttcttcatctttcctcctgcgaacggaggcgatgtgggactggccattacgcaggcaatgggaatgaccggcatggttcagtggggaatgcgtcagtcagccgagctggagaatacgatgacagctgtggagcgagtggttgagtacgaggacattgaaccggaaggagcgttggaagctccggccgataagaagccaccaaagtcatggccagagcagggaaaaatcgttttcgacgagcttagcttgcgctatacgccggatccaaagtcggagaatgtgctcaagtcacttagtttcgtaataaaacctaaggagaaagtaggcatcgtgggacgcactggagcgggaaagtcttcgctgattaatgccctgttccgactgtcctacaacgatggatctgtgctcatagacaagagggataccagtgagatgggtttgcatgacctgcgcagcaaaatctcgatcataccgcaggaacccgttctgttttccggcactatgcgatacaacttggatcccttcgacgagtatagcgatgataagctgtggcgctccctggaggaggtaaagctaaaggaggtggttgctgatcttcccagtggcttgcagagcaaaatcaccgagggcggaaccaacttcagcgttggccagcgccagttggtctgcttggcacgggctatactgcgtgaaaatcgtatcctggtaatggacgaggctacggccaatgtggatccccagacagatggcctcatccaaaccaccatacgaaacaagttcaaggagtgcactgtgctgacgatagctcatcgtttgcacaccatcatggactcggacaaagtcttggtgatggacgctggtcgagcggtggagtttggaacgccctatgaactgctgacgctggcggattctaaggtgttccacggtatggtgaagcaaacgggtcacgccacctatgagagtctgctgaaaatcgcccaaaaggcattcgaaaacaggcagaatcacagtctttcctcgtgagaatcagctattatgtgtttgtcaccgaatctttagctggctaatcatagtttaagtaatcataatgtttttgaatgtgttattttgtgtgaatgtatatatgtttttccgtgtgtgtgtgttaaaaactttatatatgtaacttaaaaactgtataggaaacctttgtttaatctactatttgtatttattaaacattcactaagagcaaagatgtgccttaaaaaataaatgaaatattttctctgttcctaatctacaa

SEQ ID NO: 16965 - protein, 1327 aa, DROSOPHILA
MPTFIKGRKRTLDTKDLYRALKEHKSETLGNKLCASWELELEKTKGKPNLLRALLRVFGWYFALLGLVLFLLELGLRTLQPIFLLKLIAYYTHGSESIESAYYYAAGVILCSALNVIIMHPYMLGTMHVGLKMRVGMCSMIYRKALRLSKSALGDTTAGHVVNLMSNDVGRLDLATIFVHYLWVGPLETLFITYLMYREIGIAAVFGVAFMLLFIPLQAYLGKRTSVLRLRTALRTDERVRMMNEIISGIQVIKMYAWELPFEHMVAFARKKEINAIRHVSYIRGILLSFIIFLTRVSIFLSLVGYVLLGTFLTPEVAFLITAYYNILRTTMTVFFPQGISQMAETLVSIKRVQKYMQSDETNVMDMSVDLTEDFQGSNQETVHADGDEERDEAEDKLLGPPIATVNENAKLSEAGISISGLMAKWDVNSPDYSLNGVNLRVQPGTMLGIVGRTGSGKSSLIQAILGELPAESGEIKVNGSMSYASQEPWLFSGTVRQNILFGQPMDRRRYAKVVKKCALERDFELLPFKDKTIVGERGASLSGGQKARISLARAVYRETSIYLLDDPLSAVDTHVARHLFEQCMRGYLRERIVILATHQLQFLQHADQIVIMDKGRVSAVGTYESLRESGLDFASMLADPERDEQSEERSRSRSGSYTHSHSDQRRNSEQSLLSMADSCMDDLEAEQANNQERQEAGQIGLRLYSKYFKAGGGFFAFFVMMGFCVLSQGLASLGDYFLSYWVTKKGNVAYRADNNDTTRSEELEPRLSTWLRDIGLSVDAEMLDTYIFTVITVLTILVTVARSFLFFNLAMKASIRLHNSMFRGITRAAMYFFNTNPSGRILNRFSKDMGQVDEILPAVMMDVIQIFLALAGIVIVIAVVNPLFLIPTVVLGIIFYQLRTFYLKTSRDVKRMEAITRSPVYSHLAASLTGLSTIRAFGAQRVLEAEFDNYQDMHSSAFYMFISTSRAFGYWLDCFCVIYIAIITLSFFIFPPANGGDVGLAITQAMGMTGMVQWGMRQSAELENTMTAVERVVEYEDIEPEGALEAPADKKPPKSWPEQGKIVFDELSLRYTPDPKSENVLKSLSFVIKPKEKVGIVGRTGAGKSSLINALFRLSYNDGSVLIDKRDTSEMGLHDLRSKISIIPQEPVLFSGTMRYNLDPFDEYSDDKLWRSLEEVKLKEVVADLPSGLQSKITEGGTNFSVGQRQLVCLARAILRENRILVMDEATANVDPQTDGLIQTTIRNKFKECTVLTIAHRLHTIMDSDKVLVMDAGRAVEFGTPYELLTLADSKVFHGMVKQTGHATYESLLKIAQKAFENRQNHSLSS

SEQ ID NO: 16966 - DNA, 2776 bp, DROSOPHILA
cataaaattatgacttgagatggtaaatggaattaagttcgtgaaaagcacttgcttgtgatgaagaagtaagtgtaagtgtccatttcaaatcctagcaaacaaattgagtttcttctcgtctaaattcttgataatatattcaagttggttttcaatgctctctggtgtttttattttcaatcaataaacaagcatttttatcattattaattaatacgatccatgccagcgagttcagcaatatcattacagttcatgcgtcgattagaacctgatggcaaatgagatggtaggtaaataattataagtatatagtaatgcattcttctacaatatatacaacttacccaagcagttcagcctggtcagctcacaacgtcctacattcctccaacgccaattgttccgagtcttagttctgcactcttgattgaggacgggcaggttacgatcagctgcattattcaatgtttccacacagcgttcacatctccgggtcaactcgtcgcagttccgattttgtccagccaccaagaccacaagcaggactttaagccagaattgaagctaattattgtggatcattgctacacacagttaaaagtcctagtacttaccagaaaatagggtcacaactgctgtagtatgcataatttaagtattaaactttttggctgttgactggaacttatcagttaggtaactaccgaagactttgacagaacctgactttatataaacactataaccaatgcgtaagcagatgtttcacaacaaaaggtaaaagttaaaaatatgaaacaaaagcttaacaaaattgttataaaccctattcaaacccttaataaaaactggaccatcttttgagcgcattgaagggcattatgacaataacttccttgtttaaataaagggcttaatggataaaagcaacgtggttcttattccgaaggctgtcaagcactttataaaagcccaagaccgaagcacacttatcactgaagtcaaacaagttgtcagtagcagtaccaacatgtcgaaaattactctcatttttggtaaggatatagaccgctataccataaaagattattaacccttatgataactattttagctattctctgcctttgcgtggctgttcaggctcaaactcgtgaacaagaaatttgccgtcaagaaaacgaaacttgccgtcgaaatgaacggagattgggagttcaaaatgatgtttcgaccacatttaataatcactgccgccgccagtcaggcattcgaaactggcgaaatgtctctcgttgcgaattgtctctggctacttgtcgatgtaagtatctgatttgaaataactatatttcatataaaaatataatattttattatcaaactactatcgatttaacagtgacactcgagcgttgtgctgttataaactgcaaaaatgtgagaaacagcattgatggtggggtcaccgctcgccctccaacttcaaggaggacaacccggcgaattcctgacacccgacgacctcgaactactcgtaggaccccaactacccgtcgtgctccaactactagatcttctcgtagaactacacgtcgtcgtgctccaacaactagaactactcgaagaactacacgtcgtcgtgcgccaactactagaactacgactcgtcgacctactgaagaataactcctagaaccatttcattcagagtaatatcctgcaaaatgtatcctgctgaaaaacaataaaaactttaatgctctcaaatatagaactctcaatattactataacaggttctgcttaaaaaacaaaatatatttggctcaacaactttgatcgaacttttttacaatattttatcatatcattttatcatagaatatttatttcatatatcattacttaattaatatcttagggcattgaaactgttgaattattatcagctttattaaattcagcaggggtttcttgtgtaaccgctacgctactctcttctacattttttgcggcagtatccaatttcgatgtggcgtttttgttttgaggtatttccactccaataatgctcattatattcctcgaacttttccggcagtcttcgttcatcagcgagtaaaagagtattccggctaaaaaaactccaagtattatgccaagaaaaagacaaccgatagactttctggcaggtagtcctttgaatcaaaaatgtattaattttaaccaaaaatagttgaataatattttctataataaaattcaatattatttgtaataagcactcaccttcatttaggaagggtttacttgccagtttcctatttaattttgatgagcttattgggatcatttttggacaaggtctctttggcgaataaatttaaaacgtgttgagctcattcttttcttataaaaattaaacgactttgaaacaattgagtaaacatacattttaaatgcataaaaattgagcagacagaaatgcgcacgaggtaatttaacacgtttcgtttatataattaatataaacgaagttacatatatattcaacttttcgaatatccaattttgagcggtaatcgaatattgtttcattgactgaccagttgcactaagtgatatctatatcgatgtgctttccatatctagataatgattgcgaaaagcagtttggaaaaaatattatatattgattgtttgtataagtaagttttatttatttcatcaaaaaattctaagcatatatattgagagcatcgaagtat

SEQ ID NO: 16967 - DNA, 639 bp, DROSOPHILA
actgaagtcaaacaagttgtcagtagcagtaccaacatgtcgaaaattactctcatttttgctattctctgcctttgcgtggctgttcaggctcaaactcgtgaacaagaaatttgccgtcaagaaaacgaaacttgccgtcgaaatgaacggagattgggagttcaaaatgatgtttcgaccacatttaataatcactgccgccgccagtcaggcattcgaaactggcgaaatgtctctcgttgcgaattgtctctggctacttgtcgattgacactcgagcgttgtgctgttataaactgcaaaaatgtgagaaacagcattgatggtggggtcaccgctcgccctccaacttcaaggaggacaacccggcgaattcctgacacccgacgacctcgaactactcgtaggaccccaactacccgtcgtgctccaactactagatcttctcgtagaactacacgtcgtcgtgctccaacaactagaactactcgaagaactacacgtcgtcgtgcgccaactactagaactacgactcgtcgacctactgaagaataactcctagaaccatttcattcagagtaatatcctgcaaaatgtatcctgctgaaaaacaataaaaactttaatgctctcaaa

SEQ ID NO: 16968 - protein, 173 aa, DROSOPHILA
MSKITLIFAILCLCVAVQAQTREQEICRQENETCRRNERRLGVQNDVSTTFNNHCRRQSGIRNWRNVSRCELSLATCRLTLERCAVINCKNVRNSIDGGVTARPPTSRRTTRRIPDTRRPRTTRRTPTTRRAPTTRSSRRTTRRRAPTTRTTRRTTRRRAPTTRTTTRRPTEE

SEQ ID NO: 16969 - DNA, 3178 bp, DROSOPHILA
agtgtttggcaaacaatcgtggcgcatgcaaacaattctaattgtagctatgtgtaatcaacaaaaggcgtgtgcgaaaaactattattaaatgttaacattttaattagattgttaagaccaaatttatgtctaaattaaatgttatcctaccatttaaccactaagcgtatgcaaaccacttgaacgtttgatagttctggcacctcgcgccagttgctgcttccacattccacatgcatcgttcgcggcattttctgcccgagtagcgtgacccagcacacacacacatcgcctccatcccagcttatattaattttgtgtattttatcatcatagatgagaagcaaaactcatgcgatcatagttaagattatgacattttaaatgtattagcagccatatccccgatcgctctcattgtcaccagtcctgcactctgtaatctacccacattgcccatgcataggtcgttaagttaaccagttcatgtacttggctaggatagtccatctgtggccaaaaatctcgcaagtggcccgatcgcagaacacatttacctctaactgtgcaagtagatcttaggatgtgacgagctactcgtccgactatcacacgatttaactataatccgtataatgtataaagagcaagttaaatccaatgtatgtttatccagcatatgtctataaatgcctataaatatttactgttaaaagtatttaaaataaaaagaagtctgtagtcgaacgaaccaactgtttttctgtttggctcattttgatctcttgtatttgtatttagaatacaaattcaggaaactttcttatttgaataattatcaaaatgaataagctaagtttctttgcaaatgaaagttattctaatatagacatgttattttttttacttcttgtttaaggattaattttcctgcgcatctattgacctactatgtagccaacaacaatatatttttgaataaataatatctataacgtaggatatagcatttatttatttaacatatattaagttacgagttaactgaatggattcgtataggacacatttgttcaacaaaattaagcgttcagtgctctggttgtgcgaccattaaaggatatttttttagagagctaggtgccagataccacacccgttgtagccgtatagtagagtccctgcagcgcctcctgaagcgcccgttcacaagccagagcggatgtgaatccgccggcgttctcctgcggtgtttcagctcgtatgtgggcaatatagcccctggacacgatctcatttgtgggcggcatggcaggtccctcactgaaaggaacaagtggctcgtatacgaaaagtggaccctcctccgatttgggaacgggcagcagactgggatcagctgtctgtccgaactttatgcccgtagagaactcgttggcgggcttcggcggtggaagctgtttctcctcctcgcgctgcttttccgctttttcggcgaactcggtgacaatttgggcggcatccttgccgctgtacatcagctcctcgatcagcgcctgcttgtcgcgggccttcttcttcttgtgctcgttctccagttcctccagctccttcctacgcgcctcctcctgaactttctccagctccagcatctcctccaacgcgtactcatcgcgtcccacgcgggttttattccgctgaatgacctcacggttatcacgcttgtaggcctcaatacgcttgtttgtctcgatgatgtcgatgttgttgcacagattgtacacaatgtcctcgatctcctccagatagtcattgtactccgccagggaggcaaagtcctcctcacgtttattgtagtcgcgcagaattcgcctacgaatatccacctccttctccaccattgggtcctcaaaaagctgcacgcggaagttgttgcgccgcaatgggaccatgcactctggacaggcgccggatcctttgaggaacagcaagtccacgcaagattcgcataatgtgtgtccgcaaacgttgaccatcagcttgagcgatggattccggtatttggtggtcttgcaccgcgggcacgcctggtcgtccatcgcgtagccggtttacctgtcctcctctctgctgcttaaatccgtaaataaaaactctttgccggccaatgttttcgataaattattatttgatgcattccctaatgtgaccatggttggcccgtaatgtcatgtttgtgatttcgcttagtaactttagttcacatctagcacatacacgaaccacaaacatagcgttgccatactatatgcatgttttacaatagccgttacaagcttgaaaatttaaagcttgaaatgaagcccatgaatatgaaatgagaattttaagctattaaataacccagtactttaataaaagccaattccatagttttcttttaacatttttatttcaaacagcatacgcggtagttgttcacattaagagtaaagtttaaatatgttttctttaaagatacacgcacttttatgtcatacgtattttgatatatgtgttctgagtgtatatgcattaaataattcaataatttacattaaccaaatcatccccagctaggtgcacctgccagcttttaggcaagcgacccgagagcagcgatttgatatacatttgttttagctgcgtagtaaaatttacaattaaatacattcaataaacagtagtagtgacatcatatacacctcctttatatgcagtatatatatttttttgcgtagataaaagcattgccaagcagttgatcaaagtgacccatcaattttgggtgttagttgcatgcgtaatacttgagagaaggattgagtgggtgagtcgggcgattttgtttgggtgggtgcgttataaaagcactgttgcaatacgaggcgtactcctaatatatttagactaacttatgcgctaggaagagaacctactcgatttatacagattgatttagtcgaatatatattcaaaggtgtggttagggggaggaaagaatatatgtagagacagaacctaaaaagaatcgaaggcgtcttgtctttgtataggttctcaacaaatttgtcgattcaattagaaatcgaatcactgtaaatatcacaatttagttaacacatatacaattata

SEQ ID NO: 16970 - DNA, 1178 bp, DROSOPHILA
gaaaacattggccggcaaagagtttttatttacggatttaagcagcagagaggaggacaggtaaaccggctacgcgatggacgaccaggcgtgcccgcggtgcaagaccaccaaataccggaatccatcgctcaagctgatggtcaacgtttgcggacacacattatgcgaatcttgcgtggacttgctgttcctcaaaggatccggcgcctgtccagagtgcatggtcccattgcggcgcaacaacttccgcgtgcagctttttgaggacccaatggtggagaaggaggtggatattcgtaggcgaattctgcgcgactacaataaacgtgaggaggactttgcctccctggcggagtacaatgactatctggaggagatcgaggacattgtgtacaatctgtgcaacaacatcgacatcatcgagacaaacaagcgtattgaggcctacaagcgtgataaccgtgaggtcattcagcggaataaaacccgcgtgggacgcgatgagtacgcgttggaggagatgctggagctggagaaagttcaggaggaggcgcgtaggaaggagctggaggaactggagaacgagcacaagaagaagaaggcccgcgacaagcaggcgctgatcgaggagctgatgtacagcggcaaggatgccgcccaaattgtcaccgagttcgccgaaaaagcggaaaagcagcgcgaggaggagaaacagcttccaccgccgaagcccgccaacgagttctctacgggcataaagttcggacagacagctgatcccagtctgctgcccgttcccaaatcggaggagggtccacttttcgtatacgagccacttgttcctttcagtgagggacctgccatgccgcccacaaatgagatcgtgtccaggggctatattgcccacatacgagctgaaacaccgcaggagaacgccggcggattcacatccgctctggcttgtgaacgggcgcttcaggaggcgctgcagggactctactatacggctacaacgggtgtggtatctggcacctagctctctaaaaaaatatcctttaatggtcgcacaaccagagcactgaacgcttaattttgttgaacaaatgtgtcctatacgaatccattcagttaactcgtaacttaatatatgttaaataaataaatgctatatccta

SEQ ID NO: 16971 - protein, 320 aa, DROSOPHILA
MDDQACPRCKTTKYRNPSLKLMVNVCGHTLCESCVDLLFLKGSGACPECMVPLRRNNFRVQLFEDPMVEKEVDIRRRILRDYNKREEDFASLAEYNDYLEEIEDIVYNLCNNIDIIETNKRIEAYKRDNREVIQRNKTRVGRDEYALEEMLELEKVQEEARRKELEELENEHKKKKARDKQALIEELMYSGKDAAQIVTEFAEKAEKQREEEKQLPPPKPANEFSTGIKFGQTADPSLLPVPKSEEGPLFVYEPLVPFSEGPAMPPTNEIVSRGYIAHIRAETPQENAGGFTSALACERALQEALQGLYYTATTGVVSGT

SEQ ID NO: 16972 - DNA, 4130 bp, DROSOPHILA
gaatttagttctgtgtgcggcacacgaaactcgatgtatgtggcacaataagtgaaagtgttacggcgggacgcgatggagacgaaggcggagaaatgggacataggacatgggcttggccataggtggaggttacattcagcttgaatctggcatgttgcagcctgtcagggcgctccacacaaccggaaatatgtagttgacgcccatttgtgcctattccgaggcaaaggaacacctgtaccccggagcaggttgcgagtgtgtgtgcattactgggtgttaatattccattgatacaccggaaaggcattccaggacccaccgcagtatggctcaggcattttaaatttagacagcactcatgtttcgggcaggctacccccgattgatttgttgaatttttgggagggcctaaatggaagtgaaagtggcccaataactggctgattggctgtctggctggttataaccttgggcaagtcagcgtcaattttattaaagtcccaaactggcatgcacacagcgacttaacaccagtgaattgccacattttcttggcttggtaaatcgaaaatgccccgtggtatccgaagtgatcaggtgcagccaaactgttgaagggtaatcttcccgcctgtcagtaaactctgctgttgactggcagtcattacaagtgattagtaaatttattcagaaatcctacaccttaatagccaattaaaagtaaagcatcataaaggcataaatacttcgctcatcgctttagaataaacatgtgtttacatactataaaaactactcattctctgtcatattataaaataattacattcatattgtcatggttcgacgggattttcgcccatcaagttgaacacatacaaggttacatatttctgagaataagttagtggaataaaaatgatgtatacaacatttacataaaaatgtacattttgaacttatgatttagacgtaaagcaaacggttagcgtacttatttcaacacattcggctccggaggttgcattatatctttcattacggttctcgcagaggcaggagcccgacccactaggtacaggatgttgaagtaccagtcgagcagatatagcttgaaggctgacagaaacagacagtattcgaagtatatgcgtccacttagccaacggatatattgcacgggagaccttctattgtgctgcatatacaggcatttctgggcatatcgcgccatgacccgaggacgattcaccacgtctccatgctgatgactaatggcacgcactgtgttcagattacgcacctagttcaataggtaattatgtatcttggctgataacaagtatatgcatatagctacaaaacttaccacgaacaacatgcttctgggcatctccttcagggtgcccatgatgtgctcgaaattattcctggctatctcctgcatgtgatcgatgtcctcctgcgtcagtttgccgcgtatgccaccacctcgattccggatgggctgctggaaaagcacttcggcgaagcgcatgtagtcaccgataccgatcttctcggcggcggcctgcatccgattctcttggcgcagaacggtggcctcccagaattcgcagagtggacctcgcacattttgaggcagttcttcgtaaagtccatgatccagcaagatgatgtccgcacgcccgttttttctattttttctcacaaaaactttaaaaaaaagtgaggatatttaaattaaaacattttaagggtagttttcactagttaacccactatttcctggatggggatcggcgtgcacgaagccagtgtagaaaatctgttcagcaaaggcctcaaagagcttcacatcgatgtcctttaagctgagtttttctttttcaatcgtcttaagatcgctgatcttgcatccatccatccactcaagagtgagcacgcgctaagaaaaaccgattgttaatttaagcatccagttaatcaatgaacaatattttctaacttctaaaacttatgaaaactcaccgttttagtatacgaccaatgcaccttgggaacgtggacatagctgaacttttccatatccttggcgcagcgttcggcattttgtccctcctgcaaaaagttcagctccagcaccaggttcttacgcaggtcattcaagatccatccaaagttgtagtccttaaagaagaactcgacaatgtcctgaagaaagatgatggtgcctaggtcgctgatgaatctcttctgcagatcgttgtattgcaccttgacggccacctgctcgccgctgggcagcctggctttgaaaacctgcgccaagctggcggccgccacgggctgatagtcgaactcctggtatatctcctcgggcaactggccaaaatccttgcgaaagaccttctgaacatcagcttgagtggtgggcagacatctatcctgcagcagggacagcgtgctggtgtattccacgggcagaatgtcattgatggccgcgaatccctggcccaccttgatgtacagaccgccgttgagcaggcacgtctccagcagacgctcggcactcttcttgtggagcagcttcacctttgtttcgtactccggatcgttctcgtccagccgcagatagtcagcggctatcaatccggctgtttttaaggatcgtacaaatcgcacggaggcgccgcagtaggtgaagtcatttactatcccatcgtaagccaggccacctgcgccggctgccaaaagactaaatcgcaatacaggacgaccgcctttctggacattcgcctctcgcaggccattgagtgctcttttgcctcgaatccgtgttccgaggctcagcaactgccgcacacgctaagattttagaatgtattctctgcgattaataatggacctcagcgttgtagcactcacctggagaggtcgcattttctgtccgcccgctgcaaagttcacccaatgtttactctttggacacctgtcgcaatatcagctggaaaggccgaacagctgtttgtagacccgccgtgatgataacaacagcgcgatgatggggcaacatcgtcatcgtcacccgctcatttggtttccgtttccgcggttttagaatttcaagtgtattcgatttactaactgcttgaaaagtgtcattcaaaaatacgaaaagcactcttttcatagaagagcatttgtttctgtaaacttccgctttacactagattacgcagctcaaatttgttgcaattgactgattttatgtctaaataatagttcatattccaaaaaagcaccataagctaaataaaattaacaatcattcattaacatttcactaaaccgttattttggttgacaaaactaaataaactaaacatatactgatgttggtattttgtttaagtaccgaaatcgtgtctttttcaatcatccgcgcaaggtcacactgctttgttgattcttgattaggttctgcattttttctgtttgcggcggcggcggcgcgtttgaagtattgttttcaagtgcagcagattgtttactttacgcccacccaactgtgtaaacaaattcagcgcagggcagtaaaccagtgagctccaaaccttcgagcaaccaagatgtcgggcaccatactggagaacctgagtggccgcaagctgtccatattggtggccactttgctgctctgccaggtgttgtgcttcctgctgggcggtctgtatgcccccctgcccgccggccatgtcaccgtgctgggatcgctgtgccgcgaggatcacgcccgccagaatgacaccagtttcctgctgtactcacgcggtgcaggagcctgcatcccagtgacgcgagaggaggtggagcaggattcaacaaagatggccaatgagttggtgcacgttttccagatgccgctgcctcgtgacctgcgcgacctggactactcccgttggcagcagaatctgatcggtgtgctacaggtggagttcggctatgattcctcgtcggagctaagggaaccgcccagggaacttcagttgacaatcgacatgcgtctggcgtaccgaaataagggggatccggacaacggctggaagttgtacgcccacggc

SEQ ID NO: 16973 - DNA, 1855 bp, DROSOPHILA
attctaaaaccgcggaaacggaaaccaaatgagcgggtgacgatgacgatgttgccccatcatcgcgctgttgttatcatcacggcgggtctacaaacagctgttcggcctttccagctgatattgcgacaggtgtccaaagagtaaacattgggtgaactttgcagcgggcggacagaaaatgcgacctctccagcgtgtgcggcagttgctgagcctcggaacacggattcgaggcaaaagagcactcaatggcctgcgagaggcgaatgtccagaaaggcggtcgtcctgtattgcgatttagtcttttggcagccggcgcaggtggcctggcttacgatgggatagtaaatgacttcacctactgcggcgcctccgtgcgatttgtacgatccttaaaaacagccggattgatagccgctgactatctgcggctggacgagaacgatccggagtacgaaacaaaggtgaagctgctccacaagaagagtgccgagcgtctgctggagacgtgcctgctcaacggcggtctgtacatcaaggtgggccagggattcgcggccatcaatgacattctgcccgtggaatacaccagcacgctgtccctgctgcaggatagatgtctgcccaccactcaagctgatgttcagaaggtctttcgcaaggattttggccagttgcccgaggagatataccaggagttcgactatcagcccgtggcggccgccagcttggcgcaggttttcaaagccaggctgcccagcggcgagcaggtggccgtcaaggtgcaatacaacgatctgcagaagagattcatcagcgacctaggcaccatcatctttcttcaggacattgtcgagttcttctttaaggactacaactttggatggatcttgaatgacctgcgtaagaacctggtgctggagctgaactttttgcaggagggacaaaatgccgaacgctgcgccaaggatatggaaaagttcagctatgtccacgttcccaaggtgcattggtcgtatactaaaacgcgcgtgctcactcttgagtggatggatggatgcaagatcagcgatcttaagacgattgaaaaagaaaaactcagcttaaaggacatcgatgtgaagctctttgaggcctttgctgaacagattttctacactggcttcgtgcacgccgatccccatccaggaaatatttttgtgagaaaaaatagaaaaaacgggcgtgcggacatcatcttgctggatcatggactttacgaagaactgcctcaaaatgtgcgaggtccactctgcgaattctgggaggccaccgttctgcgccaagagaatcggatgcaggccgccgccgagaagatcggtatcggtgactacatgcgcttcgccgaagtgcttttccagcagcccatccggaatcgaggtggtggcatacgcggcaaactgacgcaggaggacatcgatcacatgcaggagatagccaggaataatttcgagcacatcatgggcaccctgaaggagatgcccagaagcatgttgttcgtggtgcgtaatctgaacacagtgcgtgccattagtcatcagcatggagacgtggtgaatcgtcctcgggtcatggcgcgatatgcccagaaatgcctgtatatgcagcacaatagaaggtctcccgtgcaatatatccgttggctaagtggacgcatatacttcgaatactgtctgtttctgtcagccttcaagctatatctgctcgactggtacttcaacatcctgtacctagtgggtcgggctcctgcctctgcgagaaccgtaatgaaagatataatgcaacctccggagccgaatgtgttgaaataa

SEQ ID NO: 16974 - protein, 557 aa, DROSOPHILA
MRPLQRVRQLLSLGTRIRGKRALNGLREANVQKGGRPVLRFSLLAAGAGGLAYDGIVNDFTYCGASVRFVRSLKTAGLIAADYLRLDENDPEYETKVKLLHKKSAERLLETCLLNGGLYIKVGQGFAAINDILPVEYTSTLSLLQDRCLPTTQADVQKVFRKDFGQLPEEIYQEFDYQPVAAASLAQVFKARLPSGEQVAVKVQYNDLQKRFISDLGTIIFLQDIVEFFFKDYNFGWILNDLRKNLVLELNFLQEGQNAERCAKDMEKFSYVHVPKVHWSYTKTRVLTLEWMDGCKISDLKTIEKEKLSLKDIDVKLFEAFAEQIFYTGFVHADPHPGNIFVRKNRKNGRADIILLDHGLYEELPQNVRGPLCEFWEATVLRQENRMQAAAEKIGIGDYMRFAEVLFQQPIRNRGGGIRGKLTQEDIDHMQEIARNNFEHIMGTLKEMPRSMLFVVRNLNTVRAISHQHGDVVNRPRVMARYAQKCLYMQHNRRSPVQYIRWLSGRIYFEYCLFLSAFKLYLLDWYFNILYLVGRAPASARTVMKDIMQPPEPNVLK

SEQ ID NO: 16975 - DNA, 4353 bp, DROSOPHILA
cagtgctgcataagttctggctggaaagtagacagatgaagtaaatttgattactttttaatatagtggtatgtacattttataaacagataattttaaattccacaagttttgtattaagatttctcaaaataattattcatgtaaaattgatttgattttaaataaaccttctcattatttgttttattaggtttttaaatagccaaatcatcagcactaggggttgcacagccatcgaaacccacccctaaagcaaggaatggcaatgtcaagcgacacacccctcgcgcacgcacagacacacgcacacatggacaggcaacgagtcctttcgatttcattacgttcattatgtgaggggtgtcctctgaatcacacattccacactcctcctgaaattgatgtgcgcctggtattagacctcaagcggaatttcctttcgtttgattgtaagttgtgggaacgtgcaacagcatgtgtgatgaaattcaattattaaaatattactatcttaccatctattattaccatcttattattgaatacaataactaaatatttttgtataagttaagtaactttttacttttgttaattaccagttttattattattatttataactagatacaaagaaaacagcgataattaagcttatctcgatagttattaccagcgattacaaattttccaattggttttaacaaacagtccatccctcttataatctattttaacgatttaaggcatgtttcaaggcttttaatatgcaaaaatgcacaaaaacaacaaataaaattactaatccgtttcatacaaagaacagctgacaaaaaaaaacgaccgaaacctaacggtaaataattcaaaagattagggaataccccaaatggtatttacttttagaccgtgtggtattttctatcgttatcggcgcggtcatactggtaacgtattggttactattataaaatatttggcaatctcgttctactcgctggcggccaaatagctgcagaatgtttgagcagctggcctgagagctagtgccggctgcccgagcctagtaccccggacgtccagaacatcttgaagctccaaacgcaccgcacgcacatctggcagccgattgtaaacaaactcgggatatggtaattagatgatgccgatttggagtgtgcgaatcatgcaaaaactagttttcagagccgcgccggttgttgaactcttgacacttgactggtaatagattatcgcccgcgggttcaataggaatcggagaatcggtcgagtcagcagcaccgggcattcaaaccgagagagccaacgaaacgcgccacatgtacgcctataataagatgggtcgggttccagagcttgttatatggtgagaacccaacgaagttgaaaatcaaattaaactaatcccgcccttaaaatctgaacagctccttcatagtggtcaccctgcttgtcatacacttcttctcggatctgctgagagcctccctaggcggctactacaaccaggatgttacactttcccagctggttgagtcgcagaactcggactacgcatggttccttaagctgctggtcaattgctttggttatagctgcgtctttgtgccgggcttcttgatctacaaatatgtcggcaggattaactacctggaaagaggcaacaagacattcctgcacaaggctatcaatatgtgtatcacgggtaactctggatacgatcagttggatgcagggaccagcaccgcggataaggatcgtccggcagcctctacggcaccaaagcgaacgagttcccaggaggccgtgcaactattatggtgctttggcggcctgatgatctcctatcttacctggggtgtactgcaggagaagataatgactcaaaactatctgaacttcactggagaaagtgccaagtttaaggactctcagttcctggtgttttccaatcgtctgctggcctttctcgtggcgctggcctatctacaatggcagccctcacctgtgcgacaccgtgcacctctgtacaaatactcctatgcctccttctcgaatataatgagcgcatggttccagtacgaggccctgaagtttgtcaactttcccacccaggtgctggccaaatcgtgtaagattatacccgttatgctgatgggcaaaatcatgtctaaggcaaagtacgagagttacgagtatgtgacggccctgctcatatcgctgggcatgatcttcttcatgagcggctcctcggacagcagcaaggccagcggagtgaccacgctcacgggcattttcctgctctccatgtacatggtcttcgacagcttcactgccaattggcagggatcgctcttcaagagctacggcatgactccgttgcagatgatgtgcggcgtcaacctgttttcctccattttcactggagcctcgctgtccatgcagggaggattcatggactccttggcatttgctacagaggtaaatatatataaagatatcaagctctcaatttatgatgatatccattttaatcaaaataacgtagcatgttctgaaattgaaagaatatttgatttgtttgtgttttgtggtttgtgatttgcataacccaaattgcaaaattataacaaaataacaatagattttaaaaatttaacgttttttcaagtagctgatatatgtaagacaccagatggtactttctcactgtttttttgtatttttctccagcatcctaagtttgtgtttgatatggttgtgctttccgtttgttcagcggtcggacaattgtttatctatcatacaattgatgtcttcggcccagttgtgtttacgataataatgacactgcgtcaggtgagttgttttgagagtgtggaatgggggtttgtttaatcaactgcctgcttacgagaaatttcattctgcttcccacaggcggtggccattatgctctcctgcttcatctaccagcacagcatatcgctgttgggcatcttcggtgttctgatcgttttcgttgccatcttcctgagggtctactgcacccagcggttgagggccattcggaagcgggccgaggccaacaaaccgaaaatggctgtctaactagggacgtagactcccttcgaatacaacgcacagacttcctagctcagccttttattgtgctcatagtaacccatggcagatgccacttccaaagcccaaacagaagctgctcggactctccaaaaattgtacagttttgttttcatagttctaagttgaatgtatacttatatcctaatcataagcgtagacgactagtgaatgtgcttaaataaacattttatatgtatacggcaatgataacagttttcaaaggaaattagatatttgcttttttttttgtttaacatttaggtttcactgtattgagagaaatctatagctataaggtatctttttctgagaattcagtttatatttttctatgttaaattgattatccaaaaacaactttactaaacgggctacaatttgtaaaaagatttcaaatctttgaagatagatgagatgattcatattataattattataataattataccactttaataaggcttattttggcagcattttttatcagatattaatagtagtgcagagcgtcataaattgggttgccgttggcgaaaaaaattgattaatgtgagaagcatccgtgcatccccccaaacctaattagcttagctcccatattagcgatacttggtgcagtcggtaaactcgacattgacccactttcgggttacatttttggcagaaacgtggttttggccaaaacagcgttgggtgagagcttccatcgcttggttcaggtcaatgcacatgagtcgccgagtgtaacatgtttttacttggctattgttgtgccatgtgggcgattatactgatgatgatgaggttgatgatgccggtggctcgggtgggcggcctgaattaccatatcaaaacaatgccctggaaaaattgagccaataaaaaagggcattatgcaatatcgccggtgtctggctgccttctaagggaatagcagccaatttgccaaattcgagttggtttttttgcgcacgggcaaggtgataagttggggcgtactccgcattagaggaatagtttgtgctcatcccgccgagcgtgcagaagtctttcagcaatagaatcgcgttttcaatatgaaactgtttcttctactccttctgggagccttgggctattcgttggcctatccgcgcacctatagttacgagtatccccgccgaagggcctactccacatcgt

SEQ ID NO: 16976 - DNA, 1904 bp, DROSOPHILA
ctggcggccaaatagctgcagaatgtttgagcagctggcctgagagctagtgccggctgcccgagcctagtaccccggacgtccagaacatcttgaagctccaaacgcaccgcacgcacatctggcagccgattgtaaacaaactcgggatatgagccgcgccggttgttgaactcttgacacttgactggtaatagattatcgcccgcgggttcaataggaatcggagaatcggtcgagtcagcagcaccgggcattcaaaccgagagagccaacgaaacgcgccacatgtacgcctataataagatgggtcgggttccagagcttgttatatgctccttcatagtggtcaccctgcttgtcatacacttcttctcggatctgctgagagcctccctaggcggctactacaaccaggatgttacactttcccagctggttgagtcgcagaactcggactacgcatggttccttaagctgctggtcaattgctttggttatagctgcgtctttgtgccgggcttcttgatctacaaatatgtcggcaggattaactacctggaaagaggcaacaagacattcctgcacaaggctatcaatatgtgtatcacgggtaactctggatacgatcagttggatgcagggaccagcaccgcggataaggatcgtccggcagcctctacggcaccaaagcgaacgagttcccaggaggccgtgcaactattatggtgctttggcggcctgatgatctcctatcttacctggggtgtactgcaggagaagataatgactcaaaactatctgaacttcactggagaaagtgccaagtttaaggactctcagttcctggtgttttccaatcgtctgctggcctttctcgtggcgctggcctatctacaatggcagccctcacctgtgcgacaccgtgcacctctgtacaaatactcctatgcctccttctcgaatataatgagcgcatggttccagtacgaggccctgaagtttgtcaactttcccacccaggtgctggccaaatcgtgtaagattatacccgttatgctgatgggcaaaatcatgtctaaggcaaagtacgagagttacgagtatgtgacggccctgctcatatcgctgggcatgatcttcttcatgagcggctcctcggacagcagcaaggccagcggagtgaccacgctcacgggcattttcctgctctccatgtacatggtcttcgacagcttcactgccaattggcagggatcgctcttcaagagctacggcatgactccgttgcagatgatgtgcggcgtcaacctgttttcctccattttcactggagcctcgctgtccatgcagggaggattcatggactccttggcatttgctacagagcatcctaagtttgtgtttgatatggttgtgctttccgtttgttcagcggtcggacaattgtttatctatcatacaattgatgtcttcggcccagttgtgtttacgataataatgacactgcgtcaggcggtggccattatgctctcctgcttcatctaccagcacagcatatcgctgttgggcatcttcggtgttctgatcgttttcgttgccatcttcctgagggtctactgcacccagcggttgagggccattcggaagcgggccgaggccaacaaaccgaaaatggctgtctaactagggacgtagactcccttcgaatacaacgcacagacttcctagctcagccttttattgtgctcatagtaacccatggcagatgccacttccaaagcccaaacagaagctgctcggactctccaaaaattgtacagttttgttttcatagttctaagttgaatgtatacttatatcctaatcataagcgtagacgactagtgaatgtgcttaaataa

SEQ ID NO: 16977 - protein, 465 aa, DROSOPHILA
MYAYNKMGRVPELVICSFIVVTLLVIHFFSDLLRASLGGYYNQDVTLSQLVESQNSDYAWFLKLLVNCFGYSCVFVPGFLIYKYVGRINYLERGNKTFLHKAINMCITGNSGYDQLDAGTSTADKDRPAASTAPKRTSSQEAVQLLWCFGGLMISYLTWGVLQEKIMTQNYLNFTGESAKFKDSQFLVFSNRLLAFLVALAYLQWQPSPVRHRAPLYKYSYASFSNIMSAWFQYEALKFVNFPTQVLAKSCKIIPVMLMGKIMSKAKYESYEYVTALLISLGMIFFMSGSSDSSKASGVTTLTGIFLLSMYMVFDSFTANWQGSLFKSYGMTPLQMMCGVNLFSSIFTGASLSMQGGFMDSLAFATEHPKFVFDMVVLSVCSAVGQLFIYHTIDVFGPVVFTIIMTLRQAVAIMLSCFIYQHSISLLGIFGVLIVFVAIFLRVYCTQRLRAIRKRAEANKPKMAV

SEQ ID NO: 16978 - DNA, 3520 bp, DROSOPHILA
acgaatttctcaagtgaatacatgcgcaaaaacttggcggtagtaaacttttttcacaccgacaactatttcaggagcagtgtaaggacttcgtataccggacccactgaatatatgggtatgctatttattaaattttttagatcttaaatactttctacgttattgttatatcgttactagaacagtaattgcaattccgataatattccgagtctatcagggatgcccgtccgtctgatagtataaacgtccatgtttttttttttttaactcgagggggtattttaagtcgattaataaaaacagtccatgtagtgacgatgttcacccggagtgtaatgcacaataagagagtgtgtaatgcacaatctgcttaaaaaatccaaatattaccgtttatcagaaggtatttttatgctcaaagttgcatacttaggagttaatttatttgatacaaatcaaatattactatttgtcgttacataacgtatgtaactcgtcacctcgtaaggaaatatttttgcttgattttgcctagtaccatacaaaagagcttcaggcttatccaaaattgataaaaacaaattatacaacttttatatagagatggttttagaattcaaggcagttgactaaagcgttgtatcttccttgtatcttttccagcgtcaactggtggaatcatgagcctaatgattggtttcagtgtaatattccttgcggagataatatacatcattttgtttgtttcaacattgttgcttatattaatattctgaattagtaaataaaataaacaactttaaatgtgttacataatctaaattacttttccacaggactaacattaaataatggactggtgtagaaaaatgtaaaagaatgtacatatgtaaatataatcaaacaaaaatatcgcacaacggtcatacaaatccgatattttaatgccgatagttcaggcagcacagcacctggcaaccctggggaattacagttcagtggcaaagtgacaagcaaaaatacgaaaatggttctggagagtactatgatatggtaaattattgttttttgagcaatacgaagagcttccgctagttttcccgtactgcttgcaacggcacacagtctggcactcatattttgctcttttccagctttgataacagcgacttccagcgcaacggagactactttccaactcgtctcatcgtccagagagatggcatcaatctggtctgcctgaccaagctgcgttccaatcccgagaacaatgtgggcctgatgactctgtccaagtgagtgtggagcgtttgtgcccatgccacatattcattatgtctttgtttatacctcagcaccgttgaagtgctggccactcttactagcgatgcaggacggattttctcaaagatgcatctggttcagccgaagggcgagataaacctcctgaccggaatccgaattgcccatctggtgctgaagcatcgccaaggcaagaaccacaaaatgcgcatcgtggtctttgtgggctcccccatcaatcacgaggagggcgatctagtgaagcaggccaagcgcctcaagaaggagaaggtcaacgtagacatagttagcttcggtgatcatggcaacaacaacgagattctcacagcattcatcaacgcgcttaatggcaaggacggcaccggctcccatttggtcagcgtgcctcggggatcagttttgtcggatgccctgctgtcgtcacccatcattcagggcgaggacggcatgggcggagctggcctgggcggcaacgtcttcgaattcggtgtagatcccaacgaggaccccgaactggctctcgccttgcgtgtgtctatggaggagcaacggcagcgccaggagagcgagcaacgtcgcgccaatcccgatggggctccaccgactggcggagatgctggtggcggaggcggcgtttcgggatctggacctggaaacgaagaaagtgccggagcagagaacgaagccaacaccgaggaggccatgctgcagcgtgccctggccctgtccaccgaaacacccgaggacaacttgccggactttgctaacatgactgaggaggaacagattgccttcgctatgcagatgtccatgcaggacgctcccgacgactctgttacccagcaagcaaagcgcccaaagacggacgaggcaaacgctcccatggacgtggacgaggattactcggaggtgatcggagacccggccttcttgcagagcgtgctggagaatctgcctggtgttgatccccagtcggaggcggtgcgcgatgctgtcggttcactcaacaaggacaaggacaaaaagagcgacggcaaggactcgcaaaaaaaataaaccgcatctatgattatatctaataagctcgtttaaagcatttgtatgcccattaaaatcatttgtagccgtctttcaaattatgcttcaagtgaaaatatataaacaaatacacacgatctgctgctgacttaattgactgcgagggtcttttcattcactgcatgtctagtaaaaataattttctagtcctgatagtggccggtcgactcgggtaagcatgtttattagggaagcatatgcataatgcttcttctatctgtcactcacgactctagttaaagtaaataaattggattctgtacttaaagtaaatgaacttgagctcattggccagtttttgaagttaaacacggaagaatttaaaacatcaaggattccgcccgcctcttttagagtccactttacacctggcatactgcgttttatacaatgtcagtaccatatatcagacacacgtttatttacagctggaccatagataaataataaaatcagtttgtggctcaatgcactatagtttatttccccgtaacaggggcactattgatatattgatgctctctactttacaagcgtattaactatgtgtggtctcgtatgcagattacttgtcgcccttgtagtcccggatgtggtagagcacccaggcgggaatgaacaaggatgcagcgcacatgccgccgccgaggatcaccttctcctgtaatgcaaaaagtgaaggatcagtttttcgctttgggaatcacatcctggttatgcaacaagctcaaacttacggcggtggagatgcgctgggtcggaggtccagagacgaccgactggcaacggctctgcatggcgctacgcatagcggggaccaggaggcgggcagcgctgttttggaacattttcacaaactttttcgcaaaatacgctggcgtaaaatcaatgctgtaaggttagaatgcttcttcttaacgatttgtcattcgcctttctttagagatggtcttacgcgaaacacaactatcgcaagccaaaacgaaaatgtagggtgtttcaggtgcagataattgtttagaaataccttattgattaaaaataatgttcttgacaacctagaaataaatttaagtcaatcaagttactcaat

SEQ ID NO: 16979 - DNA, 1359 bp, DROSOPHILA
ttcagtggcaaagtgacaagcaaaaatacgaaaatggttctggagagtactatgatatgctttgataacagcgacttccagcgcaacggagactactttccaactcgtctcatcgtccagagagatggcatcaatctggtctgcctgaccaagctgcgttccaatcccgagaacaatgtgggcctgatgactctgtccaacaccgttgaagtgctggccactcttactagcgatgcaggacggattttctcaaagatgcatctggttcagccgaagggcgagataaacctcctgaccggaatccgaattgcccatctggtgctgaagcatcgccaaggcaagaaccacaaaatgcgcatcgtggtctttgtgggctcccccatcaatcacgaggagggcgatctagtgaagcaggccaagcgcctcaagaaggagaaggtcaacgtagacatagttagcttcggtgatcatggcaacaacaacgagattctcacagcattcatcaacgcgcttaatggcaaggacggcaccggctcccatttggtcagcgtgcctcggggatcagttttgtcggatgccctgctgtcgtcacccatcattcagggcgaggacggcatgggcggagctggcctgggcggcaacgtcttcgaattcggtgtagatcccaacgaggaccccgaactggctctcgccttgcgtgtgtctatggaggagcaacggcagcgccaggagagcgagcaacgtcgcgccaatcccgatggggctccaccgactggcggagatgctggtggcggaggcggcgtttcgggatctggacctggaaacgaagaaagtgccggagcagagaacgaagccaacaccgaggaggccatgctgcagcgtgccctggccctgtccaccgaaacacccgaggacaacttgccggactttgctaacatgactgaggaggaacagattgccttcgctatgcagatgtccatgcaggacgctcccgacgactctgttacccagcaagcaaagcgcccaaagacggacgaggcaaacgctcccatggacgtggacgaggattactcggaggtgatcggagacccggccttcttgcagagcgtgctggagaatctgcctggtgttgatccccagtcggaggcggtgcgcgatgctgtcggttcactcaacaaggacaaggacaaaaagagcgacggcaaggactcgcaaaaaaaataaaccgcatctatgattatatctaataagctcgtttaaagcatttgtatgcccattaaaatcatttgtagccgtctttcaaattatgcttcaagtgaaaatatataaacaaatacacacgatctgctgctgacttaa

SEQ ID NO: 16980 - protein, 396 aa, DROSOPHILA
MVLESTMICFDNSDFQRNGDYFPTRLIVQRDGINLVCLTKLRSNPENNVGLMTLSNTVEVLATLTSDAGRIFSKMHLVQPKGEINLLTGIRIAHLVLKHRQGKNHKMRIVVFVGSPINHEEGDLVKQAKRLKKEKVNVDIVSFGDHGNNNEILTAFINALNGKDGTGSHLVSVPRGSVLSDALLSSPIIQGEDGMGGAGLGGNVFEFGVDPNEDPELALALRVSMEEQRQRQESEQRRANPDGAPPTGGDAGGGGGVSGSGPGNEESAGAENEANTEEAMLQRALALSTETPEDNLPDFANMTEEEQIAFAMQMSMQDAPDDSVTQQAKRPKTDEANAPMDVDEDYSEVIGDPAFLQSVLENLPGVDPQSEAVRDAVGSLNKDKDKKSDGKDSQKK

SEQ ID NO: 16981 - DNA, 3142 bp, DROSOPHILA
tatgcatgttttacaatagccgttacaagcttgaaaatttaaagcttgaaatgaagcccatgaatatgaaatgagaattttaagctattaaataacccagtactttaataaaagccaattccatagttttcttttaacatttttatttcaaacagcatacgcggtagttgttcacattaagagtaaagtttaaatatgttttctttaaagatacacgcacttttatgtcatacgtattttgatatatgtgttctgagtgtatatgcattaaataattcaataatttacattaaccaaatcatccccagctaggtgcacctgccagcttttaggcaagcgacccgagagcagcgatttgatatacatttgttttagctgcgtagtaaaatttacaattaaatacattcaataaacagtagtagtgacatcatatacacctcctttatatgcagtatatatatttttttgcgtagataaaagcattgccaagcagttgatcaaagtgacccatcaattttgggtgttagttgcatgcgtaatacttgagagaaggattgagtgggtgagtcgggcgattttgtttgggtgggtgcgttataaaagcactgttgcaatacgaggcgtactcctaatatatttagactaacttatgcgctaggaagagaacctactcgatttatacagattgatttagtcgaatatatattcaaaggtgtggttagggggaggaaagaatatatgtagagacagaacctaaaaagaatcgaaggcgtcttgtctttgtataggttctcaacaaatttgtcgattcaattagaaatcgaatcactgtaaatatcacaatttagttaacacatatacaattataattgtaataactaaaataaatgtacgtaagctgtcgtcattaacaatagaaactaccagtaattacagcagctgcatttacaggctgcagcctatgtcgcgtatggatggggatgcgtggagatccagccacctagccctgcagcgcagtgacctcctcctccagttcggcgtccacctcgtcgatcttggacccggtgcaccctctgcacttgcagcagatgatgcagggagcagccaagagcagcagcggcgaggccaccagcagcagaatgccaaagccggcgaagatcccaatcacttgggcacgatgccagaccaccgaggcccgcgagtgccccagcttgttcttgcacggtcccttgtcgtagtggcgcagcaggaagtcatcctgcaggaatacaaattagatgaaatatcctagacttgccagattctaggaacttacatccaaactggccaggcagtaccagcagaagacgtgcttgcagcgcttgcacatcatctgggcgcagccctcgtccttttcgatgggcaccgcgcacatggggcagcacttgatcagttcgttgtcgaacggtatgccaatgtcgtcctggccatcggcaattaggcgtcttccaaactcgtcgcagcttatgttcggatggtactgcaaaaaggatagaaatcattataaactagaaaccattaaaaatgtgataaaattgcgcaaaactaaaaaccttttatagaattttaatttatgtttatgacaggaaacaacaacaatgtcacacacttaccgcctttttgcagaggccgcagaattcgtccttgcaagagggacagtgaacagacaccgagagaacgggagctccgtttccggccgcggcacctgtgcttccgtttccggccacctcctgctgtggactgtagctctgcgaggtcgacggcgactcgtccatttggcaaatgacgctggactggccaggctgtgctgctgcacccaccgtgcagatggtctcgcagccagcccgtggacaccaggtgcgcgtcttgtccaattcgatttctaaatgaaagtgtaacattactaagaggtctcttaggcaatctcttaggcaaggacttacctcgatttaggcgatatctatgatgcttctttagcagattcgttgtagttaggttcgctatctcgggcagggaaatggcaccctgggccgggcacgtggcgtccggacaggagatctcgtaagcgccctcggaaatctcgaactcaacgtaggcacgcatgcactgcaagtaaatagaagcaggcgatgaattagctaaacaatttgcacgtcttaagcgtaatcgcacctaagtcgggaaaatatatcttgatatacatatatgtgagagttgtagctcactccctcactttttgccaagggaaaagtttgtcagggcatttagcaagtttggctggcatagtttcggccaggaaaaccgcatggcccaccacaaggctgcggttgtcggaattatttcattttcactcgcacacaaaagttgccgcctgtgcggaagcttttataaataaagatttaaaagttttcccttccgccatggcacattaaagtaatggaattgcaaacggaaccaaaggaaatactcaaatgcttcgacaccaaccatattttcccttttcggccccgccagcagcaaatgaaagccgggcaaaaacgctttttggagaaaagtttccgagtcggtagcacaaaaaagtgtctcctgcggccaactctcctccttttggccaactttctgtttagccgtaaataattaaaagtgaatttctcctttctctggacagctctgcctggaatttgggctactggcaactttctgtttgctaactgcaataatgaaactagatattccgctcaaatgaaagttttcattaaagcaactgcataaagcactttgcgaaatttgtgtgcacataagcgaattggaaattattgcatttctaaggggttgagccacacaatttggatgtttaactttcggaatttggttatggaatgtaaatagaagttatttattgacgtatttttcatttgcagttcatttgcgaagtttaaaaagaaaataaataaggaactttctaattttagtaaaagctattccttcttaaacgtttgcagtgcagtttttcaaagtgcacacccagcttctcttaatcccagtgttgaaggcttcacctggtcatcagtcagtcgggccacagcagccacagcctccggat

SEQ ID NO: 16982 - DNA, 891 bp, DROSOPHILA
atgcgtgcctacgttgagttcgagatttccgagggcgcttacgagatctcctgtccggacgccacgtgcccggcccagggtgccatttccctgcccgagatagcgaacctaactacaacgaatctgctaaagaagcatcatagatatcgcctaaatcgagaaatcgaattggacaagacgcgcacctggtgtccacgggctggctgcgagaccatctgcacggtgggtgcagcagcacagcctggccagtccagcgtcatttgccaaatggacgagtcgccgtcgacctcgcagagctacagtccacagcaggaggtggccggaaacggaagcacaggtgccgcggccggaaacggagctcccgttctctcggtgtctgttcactgtccctcttgcaaggacgaattctgcggcctctgcaaaaaggcgtaccatccgaacataagctgcgacgagtttggaagacgcctaattgccgatggccaggacgacattggcataccgttcgacaacgaactgatcaagtgctgccccatgtgcgcggtgcccatcgaaaaggacgagggctgcgcccagatgatgtgcaagcgctgcaagcacgtcttctgctggtactgcctggccagtttggatgatgacttcctgctgcgccactacgacaagggaccgtgcaagaacaagctggggcactcgcgggcctcggtggtctggcatcgtgcccaagtgattgggatcttcgccggctttggcattctgctgctggtggcctcgccgctgctgctcttggctgctccctgcatcatctgctgcaagtgcagagggtgcaccgggtccaagatcgacgaggtggacgccgaactggaggaggaggtcactgcgctgcagggctag

SEQ ID NO: 16983 - protein, 296 aa, DROSOPHILA
MRAYVEFEISEGAYEISCPDATCPAQGAISLPEIANLTTTNLLKKHHRYRLNREIELDKTRTWCPRAGCETICTVGAAAQPGQSSVICQMDESPSTSQSYSPQQEVAGNGSTGAAAGNGAPVLSVSVHCPSCKDEFCGLCKKAYHPNISCDEFGRRLIADGQDDIGIPFDNELIKCCPMCAVPIEKDEGCAQMMCKRCKHVFCWYCLASLDDDFLLRHYDKGPCKNKLGHSRASVVWHRAQVIGIFAGFGILLLVASPLLLLAAPCIICCKCRGCTGSKIDEVDAELEEEVTALQG

SEQ ID NO: 16984 - DNA, 3056 bp, DROSOPHILA
ctcgtgtgccctttacattacattaagcatttagtcctacctagaacctagtgcgattggatgagatagcacccggggacgcgataccctgcccactgcacaaacaaaactaatcgtagtgtgtaaggatcaaggagtcagccactctgggaattgaataaaaaaactagcagcttaagggtgttgaattctgcagcacttataggagaaggccatttctcattgcttgtattgctgtcattgaatttttgctttatatttgtgaacttatttgtatttttattgtgcctcacttttttaatttcactaattagtatatcaatgttcaatatcagttttcatttacgtttcgcacctttgtattcggttcttactttaatagagtgtatgaaaactgaaaaactgccttcacttgttcgctggccatatattttaattctcctccatttaacattagatcgaatcctttaaccccaaagatgacacaagagtttcaagggctatttagttttagtaggttcgcaccgaaaaatccattgattccattgatcatattatcatatcgtacgtgcgcgcctgcttctctttgcccagaatttctataagtagctaataagtgacttgacttcatttcttaagttgtgtagcgaataaaaatgcagagaaaaacgaaatatacagatgatctatacaaacttaaaagatgatcagtatttaatgtgcttctacacaggaaagtatttcaacgtatgaaaaatgcttactacgcttgaatctttgaaatttggggaccgaccttggataactttagcactttaatcgctgctgtaaagccacacttctgtggcggctatcattaaactgagctcaattgaaagtgtagtccttctcttaggaagatgtatgtaggttacaacctatcatatctcgaactctttcactcagttttgcggccatttgtgaggttagcttcctctgcactcgaaaaaaataaacacacttgtggtgattggtttttttttttaacgaattttagttgtttaattctcaagtaacgtcatcggaaagaaatgagaacataacacggcgctccaggttgccttccgatgccgagatgtcgaatcagattccgtccgtttacttggcgtgggtctgggccttcctcagctgggtgaggatgttggacaactcctcacgcttcctcttggcacggatgtgggtgcccaggcggcgcttgaggaacttcagggccctcttatccttggacaccttcagcaactccatggtgcgcttctcatagggagcgtggccaacgacctcgcggaccaagtcgcgcatgaacttggtgtggcgggtttggatctgcaaggaatttaagagtagagtcgtccgtgtaaacaaagaataaacgggcgtgcaaacttacgttcttcaagcgcgatccgcgcagacccttgaccttcttgtcgccggtgtacttcacattcctgatcttcgaggtcttgtggcccttgttcaggccaatagccagctcgtagcgcactgccattttaactgaggatgcaaacgagagactattagtgggcttcacctagcacaaatcaaagtattcaatgaaatatcaatgatataaaaaaaaaaaaaaaaaaggcacacgcgtgctcgcggaaatcgccaggcagctctttcccgtttgtgcgtgcgtctgaaattgccaagcgaggtgtccctgcccttggcgaattctgacgaggaaaagggcagggcccgcgtcccaactgcactgtgagtcgggttaggggggaccttgttcactggtctttcgagaggcacgcacacatgaaacacaaactcgcacacaggtatcaatctttgctgcgactgccgcgagcacgcgggcgctaaataatagctgagcactcaaaaaaaaaaatataataggaaatgcggtgcggatcaagcgcactggagttgcatgcgcttcagcgcttgatttaacacacttcgcaagtgattgcactacaattcagacttattttcgcggaataacactccacctcagacgctgttaaaagaaagaaagagcgaaaaaagttggacaggaaacagtatggcagttggagatgggcgatagtcgtgccttattatcgataggcgggcgggcgttgccagactgtccaatttgccaatcgaaccaaatttgcgcgtgcggaaaatgtaaagatttcaacatttggtatttagtggtaaactagcaagaagctgatactggcaagccaatattatgtgcaaaatattatggctaaacttcaaaatagagactgaccccttgaacaagaaataagggtaaagaaatcatccagcttgtaattttaaatgctcaggggaaacttttcgataggcgaattaccgccttccgattttaaataacaatatgctccgatagcaccctccggctgtcgataactcaactttgcgcacgtgcatataaaatagaaataggacgttatttccgaaataatttaaaggtaaattaagtgatccccaaaaacagagcagaaatgaagagcaaggtggataaacccgtaaccaatggtgcaccaaatgcaaccaagacaaaggccaaggaggaccgcaagcgggcaaaaactcaaaaatccgaagcggactcgcaaataccggccaagattttgaagaagtccaagaaggagaagccggcggagaccgaggaaaaggaaaataccgcaagcaacgccaacctgaaggtgtctcagatcaacaaggccgtttttgtggtcttcaaaaagatgcagggcagtcaactgaccaagaagatgatcaattcgctcataacactgctgcgcgatgatacaaatgctgagcaggttggtccctaccagctgtccaagtagtttcgcttactaattgttgaaattcttcgtcctcagcgcactgcgaccaccggctacgtgctcaagcgcctgatccgctccacaggagcagatgacatgaagacggtgagcctggccgccagttacatacactgcatcctaaac

SEQ ID NO: 16985 - DNA, 543 bp, DROSOPHILA
tggagtgttattccgcgaaaataagtctgaattgtagtgcaatcacttgcgaattaaaatggcagtgcgctacgagctggctattggcctgaacaagggccacaagacctcgaagatcaggaatgtgaagtacaccggcgacaagaaggtcaagggtctgcgcggatcgcgcttgaagaacatccaaacccgccacaccaagttcatgcgcgacttggtccgcgaggtcgttggccacgctccctatgagaagcgcaccatggagttgctgaaggtgtccaaggataagagggccctgaagttcctcaagcgccgcctgggcacccacatccgtgccaagaggaagcgtgaggagttgtccaacatcctcacccagctgaggaaggcccagacccacgccaagtaaacggacggaatctgattcgacatctcggcatcggaaggcaacctggagcgccgtgttatgttctcatttctttccgatgacgttacttgagaattaaacaactaaaattcgttaaaaaaaaaaaccaatcaccacaa

SEQ ID NO: 16986 - protein, 115 aa, DROSOPHILA
MAVRYELAIGLNKGHKTSKIRNVKYTGDKKVKGLRGSRLKNIQTRHTKFMRDLVREVVGHAPYEKRTMELLKVSKDKRALKFLKRRLGTHIRAKRKREELSNILTQLRKAQTHAK

SEQ ID NO: 16987 - DNA, 10233 bp, DROSOPHILA
gccggcttcattatgggccaaatggccgagggccagtgggactggaacgacaatgtggcaattcagccaacttccgccttcctgaccggcgtctacggcatgtggaacatctatatcttcgccctgctcatcctgtacgcgcccagtcacaagcaatggccgacaatgcaccacagtgacgagaccacacagtcgaatgagaatatagttgcctcagcagccagcgaggagatcgagttcagtcacctgccatcggactccaatcccagcgagatctcctcactcacctcgttcacacgcaaggtggccttcgattaggcggaaggactcgaattattgttttctaaagggttgtgtgccaaactgagatcacaatttggcctgcagccgcaacgcttaaagtgtgtgctcatttaattaccatagtcagtagcatttcttgcctagttttgcattctgtgcattcgacaacgcgatcagcattattacttatcattaacatatagattgtctagtttttcacagcatgctcaaagtgtacgattttatcaaatgtatttttatgtatgcgcctcggcagtattatctattgatgtccaattgtgctagcttgtaagttttaacatatattatcaaataacattttatacgtgtaataacgttcaagggtggtcccattttttttgctgaacaacatcttgcctcggaaactatatgtttaacattgagatgaattaaaaatcgaatagtgtattaaaatgatattattcatatagtttcaagtgccaaattgtcgacagattaaaaaagaactcatacttaccaccctataatatttatccagaggactctgcccagattttaaaactaaaaacgtagagcaattttgtattcaagtagcaatgcatcgaataaaaagcaatattgaaaatgtcgaactgttttatttcataaatgcccaagacgttattgaattgttaaggaatgccgtttaaaggaactaccatatgatcctttgaggagtgcggtagtttttccagtagaactcctttgtaaagtacacgtaaaacgtggccacattgagcagcagatgagctccgagctccagccactcggcgtaacccttgcgagtgtgccgtgtgttgagtcgaaacagaatgtacggcaccaggaagtagcgcagctccaggagtcgctggaagcacagcaccaggaatagactaagtggaaacattaacttaaagctttccggcatgtgacgtagtccgcaaaagagtacgcaaatcgagagcagataagcgggcgccatggcgtagcggaaccaccagaaccgtccataaagtcggctccatatatagaatgtatagtgtctgttgtcagccagcaggtagggatgcacttcggtgtttaggtgcaccaccaccagtatgagcagcaatgccaatagggacagcacgcgattcctgcgtattaattctgctgccggacgaaactgacgtatggtgttggatatcccaaagccagccgcaaagatggcgaagtagaatagctgcggcacatgcaaactggcctcgtgggcactcttgtcgcccaccacaatggaaccattgatgaagaggaatcccacgaacggcagaatgatcgaagcgtagaaacagcacttggccaagatgctcaggatgcaattgcacagcaattgggggctgctaacgagttgaagccacaactgaaaaatcacaaaagttttaatgcttatgccagtataccaggtgtacaagacaatgccccacctctttgcccatcagtcgaacattttccttgggaacgcgcccagtgcgggcgcattgattgaccaacgtgtccagcacagtcattccggtggccatgcatacccacacgatattcgtctggcgcataagcacactggcagccccaaagaccgccgccggcaggtgcgcctcctgctgccaatagttgtagaacagaagcaccatggtcagcgacaaggtgtccgtgtagtaaaggtggctaaagaagtagagcggcggaagcacggacatggtgatagcctcatgggcggcatatgagttgccacccgagccggccaggatgcgccgtctgatcttgtagagcagcagaatattgatgccggcacctgctaggctgagcatcctcaggcccgtcaccgtgcacagacttaggggattcaggagcagggcgatcagatagaggcccggaaatgttgttatcttgggatcccactgtaaggaaactggttacgatctccttggtcaaattagtagtaatccctcatttaccacatcgaattccttgcggcaaaaggccaatccctgcggaatgtggaactcctcgtcgattacatagtccgatgtgccattcacccgcaggaaaagtggcagcgagtacagcacaaagcccacgggcaggattagtttccaggacccattcatggtaggcgatccttttgagccgacgccttccaaacgagaatgctccaattggatttgtttatttttggactcaaccagccggcaacgcgtggaaatggactaacgcctggcttgacattaaaaaaaaatactcaactaaaataccacaacattcaattgaggtatgtttgtaagtatgtttaaagtttaaacttatcgagctgaaattattacgtcgaaggaagtattcgtttgtacaagaatatggtctgggcccttggttatcgtttgtttaatttataaaagtgtctcgagatgcctcgccagctatcactgctggatctaaacaatgactgtttggccagcattttgagattcttacccgcagaggatcacttgcactttgcacacacttgcacccgtttgcgaaatgtcttcacggattgcggaaggagtctttacaggagtgtaaagctcactggatcccggtaggagctactcttaatgcgagtagttgggcatctggtgaaggatctgtgcttgccatcgaactggaatgcccatgtagattggcttagcaaaaccatcaactgcctagccaagctggagaacgttactctgaactttgaccattttccaacaattcactcgacagaagccattttttggactctggaaaagctgcccaacctaagaggaatcagagtagtgcaaaacagtgctttccacaacgtctacaacagggctcatgcacaaatgtggataccaaattcctatacgaactctgagaaacttctggggactattcaaaaaagcaatcccacccgacacatgattgggtggttattaatccaataccggtcaaaggccctagcaaacaggtgattctttttctcaccaatgaattcgcgacacaaatcgatcgagctcgtggaaccctaagtcttggcttaaactttgttcacccaaggatttatgccaggggtgcagtgtcgggtggaaatagggacattcaaatgtagaccattcttggttttcaacttatctaatacttatctaatactattccaaactttagttcaatgtcccacccagatgccagtacaatagttaactttataaggtttattaatctttaggtattggaatatacacttcgaactttaacatataagtacatacaaacagaatgtttaacaaacagtacgacttaatgactaccaaatatccaggccaagaagcaactggagaatctaagtgacaatgcctttaagtggtatggaatggtacatatataaaaagtgtgatttgtatagattgcgttcgtttgtgtttgatgtgaataagagtgtggtgtggtgtggtgtggtgtggtggggctggagctggagctttcggttcatccggcaaccgacgactggtcacagggaaaactccaccttccgctgtcgttgctacttgttcacactccgatagatcatcggtgccgatcggtcgttggtcttggtatgtcgcaacttgaccgtggcgaactgggaggctctgcaaaagatcaatgatgtgtccaattgaggaatgcgatccccaatccttgggaccactacttacggctggaaatacaaccgaattcggggaatggtggggctagctgggatacacgggctcgctacaggtcagtaatctatggaatagttgcgatatataccgcgactgctaaaaaccaattgacatttatgcattattccggctaatcagtggcgaaataaggtttgagcttaatcttaaacaaaatacatttaatgatatgcatgcaggcaccgaagctcaaaggattgaatgttcaatggggaggtccttgttctctaaagttacctctggcatgtacagaaatggattgacatttttccattgccatcgtggcttgtcgttggcaaacacaaaattgcaatagcttttaagagtaatatataagatatgtacataaaacgaacaaaacagaatttgccttagactaagaaattatacagggtaaataatgcttaattcgaaggaaggaggagacaaggcgaactggaaaaggtttgggatgctggggatcactcttacgtaagttatcctttccccagccgcactttccctccactttcacactccctctctctctctctctgcgcattttcttatccggtaagaagacggcgaaattattgtattatttcatacacgcaccgatccctaatcttttcattacttcagcttggcactagccgacttctggccatgctgttcctgatcccagaagtcgtaccatggtccgtagctcttgtttccggccaaaccctttgagttccgctccaaggtggcgctgctgttgccgatgttattgccagcggaggtggaggacttgagcaggcgtgttcgcggcagaatggtagccgtcggagctcccgaactggccgtcgaattgcgggtcagtgtgctgtcctggtccttggaggagctctttttcagcgtattggtcgccatttgctgatgctgctgctggtgatggcgccgcatcttgtcgtccttgcgcaccaggtgatcattgattacgatgcaatcgtagggatcggaactagtcgacttgagttccgcatcggaatcctcctcgtcctcgctggtataatactgcttgagtatgtcctgtcgcttcaccgtcttcatgaccagtccatggccgtgactgttgttcttgccctcgccgtcaaagaagttgttcacatcgctgagcttcagggtaccgtgctcatcgctttcaccctcatccgtggattgtggaaactgctgctgctgctgctgctgctggttgcttttggtgcgactcaaagtcagggatttgtgctgggatccggtgccggaaacctgtttgtctaactttcgatgttgctgctgctgatcctgcgactgaccacgtcgcatggtgctcatacgctccgcctccgttggctcctcaatgtcaatctcaatggtcttcatgattttcatgcgggatttgggagtatagctgctcctgtgctgctgcgcctgttgctgctgatgttgctgatgttgctgatgctgctgcgtctgctgctgcagtggcggttgctgtggactcactccgtagatattctcatcctcatctccatacaattcagtgctggtcaggctgtcctttcgttcgcgcttctcctgcgaggaactggagttatgcgacttggtcagtgtaccattgcgatcctcctccaaacgccgctccaagtcatcccgatcgcgcatctcctccagatttggagccgccaccaggtcgcggtgttgccacaatgacatgccggccagtatatcttcgccattgcgtccgccgccaaatttccagaacgatttggtgcgcttcagaccggcgctggaagcctgaagaatctcgtcatcggaggcaataagatcgtatcgcatctttcccactcctccgctctgccggctcagccgatgcaggctcttgtcgtcgatctgactatcgacgctattccggaagttccggttcaacgtccacgaggccacatccctcggcaccgtgttggtatgcgaattggtgtccgcccggcgtctttttatttatttttttattttttatttcggattcgtgtcgcatagtttgaagtgttttttttttttttgaaggtgtgtggtttcaaagtgtttgagtgtgtgttgtgggtgcatatttggttggttaacacaaaggatgacaacagggcataatggcgatacatggaatcaaacaagagcggaagaaaagcaaacgaaaataaataaattcaatcgaataaggcaatctaaataaatcaggcataaaacgtaatgaaatagcttgacaaggactttagtttaatgggccatgttgatcgggattagtgacaggtagcttataggcttggagaacaaaaatcagatgtatttccaatatttacaattaacttaaactcttgctctccaagccgcttcatttatatattatttgatgatactttatgggacggacgttatctttcaaaatagattacaaaatatgcgtgtggttcttatagaaaggttccataaagtccatcttataaggtatcacacaaggttccattaaaaacctaccgaatggccactctttgggtggctggctcctcatccgaatagtcaacttccggctgtggtggaggctcgttggcgaatccactgtcattgctgctatgcagcgaggtcttggccgccactccggatttgcccgatggatggttcttcgagctctgtcgataaaacccaattagataatgtataatctagtcaaaatatattcctacctgaacgccattaagtagcttttgtttgcgtctttccaccgccgcattgactcctcctccgttggaggcgcagaagctttgcgagctgttcagcattctggaagactggctctgcggtccattgggcaccggagcgggcagtgtgggtggcggtcccggtcgcggattggccccggatccggggcggtacttcttctgctgcttgattgtgtcgccgaacatccgcgtgggtgatgaatcctcggcactgtgattccttcgcctgcggtacgttgcctcatggctctccatcagctccagctgcgcctcgtaatcctgctgttgctgatagctacgcagaccacctccgccagaaccggatcctgatccgccaccatttcgctcatagctcatcagcatgttttcgtatcgccgaccaccggaagtggtcacctctgccacttccgcattggtgtaggccaccggaaaccagccgaagtgctgtgtccgcagattctcaccgaattgccagcccttggcctttccgcccaccaaagcaatgcggtcgccctcctcgaaggacaactggttctcgccggagggcatgtaggcgtagagggccttcaccagaggacgctgatcaccgcgctgatcgtcgcccagagtggctagctgctcctcaatgatcttgtgtttgttggctgtcaatggaagggatatttatgaattaaatgaacatcaaatgttccaaagcttatatgcccacctgagctctgtccagtgcccaccaaagccagattgaaatcagatttggcgcgtggcagcgagttctgggcatagtgcgctggcccagtaccgcccaatccggaaaggttctcccgttcgtgcagggtgcgcatatcaccatagggggcatcgatgctgcgcgatttcttcagctgagctccgtgaccctggaggtggtcatcgtcgccgtccttaattcgttcctgttcaaagaaatcatgtaagtattattaaaatattattattgaaaaaaatttaaaaattcgttaattctataaggtatatttatatccagaatagccgaatggtttgttaacagagtgattagcgcccaattggcgaccgggattgttttggccataaaaatgggcgttgggttgggcattgtgatgactcaccaggcgtcgcatgttgccgctggtgttgttgttgccgctgctgctgctgctgctgatgttgttgttgttgtgtccgttgctggtactgtatccactttcataggccgccggtggaatgatctcacgagaagcggcaatctcttgccaattttcgaaattattatcaattaccgtcttgccggtggtgtggtagaccatccagtgtttggcgatcgagcactggcgctccaagacgaatccgtaccgtcgtcgctcctgtgtcatggccttttcgcccggaacggaagtgggaaagagtggtagagttatacacggtaagaaatcatagatcatttctaaaattatttcaatcttttgcggtgcttagtaaaatcagaactttaagataggtagctatcatgaacaaatttggaattataatacatttaaagcctgctagctagtattcagatcacttccactactttgaagacattttttgtttttatcagtgtaatcgatccgtcactttttcaagtacagaattcttttccgcgaatgggtggatcaagattcggccggcagccatatgaactcacattcttgtagctctgatcgcagaacacatccagctttttcttctgatcctcgagcaattggaggctctgtgggaaagtaagtaagttttttttttttttttttcggtggctcttgagatcgtttatattcatatatggtatgcatatgcatccactcaccctaagctccttttcggtgttctcgggcgtggcctttttcttgcgctgcttcttcatcgtggacacggccttctgatagctctccattcgcactttgtgctgctgcaggaacttcttttgctcatgctgcaccacctttgtgtccttctccagatttgtctccaatggcaccaatagatccacgtagaaggctttcagctaaagagaagtcaagttttgaataggccttcttaggttagaattaacttaagttcacatacaatattcatctgctgatcctgtatctccttgttcacattcacaacgctcatcaaagctgaacctgtacagaatagttgatattaatgatcaatttttgtggttttggactcatcccacgcaatatcttaggcttgacttaccaatatcgcccgttccgctttgctgggcgttcatcgcaatcttggccaatgcttcattgaatagacgcgaggcggttgcggcacctgttgcatgaaatggcacggaatgcattgcaaattagttaactgtactgcacttgcggcagtcgattatggtgttactttacagtggtgtatctatagaccagcataaagcagcactgaaacttaccgtgcaacgccttgaggtaacttttgcccgctgcgatcagctgcctggcacccggattgaatctatccagtatgttctgcaattcgaaaaaaaagcgatcgatggatatattcatatatatatagtatgaattatcttatcatatgattaattaaatgcaatttactggccggcatgcaccaacatttcaatttcattagctataaacagttttcctagacccccccctcccccctctcaaaagttggcttaatggtttaccccggttggccgctggcagtaaaagtcggattgtataagttgatttgagacaatgttgtggtcaggcagcgacatcattagttccgtgtagccaactgaacatactcgccatgctaattgctcgtttagtaatctctcatctatgatttagtagcggttactacaaaatgaaagttatctgttgcatcgccaaacatttcaggtagataaatcttaaagtactatcggttgtctatatatacatatgtatcttaaagttttcgaaacaaagttaatatttggctagagaattaataaaattgcagtttattggttgcaatttagtgtctaatagtaaaacgtttacaaagaacaattggtagtgacacatcttgtgatttatcatttgcaaaactcggcaatagcaaagtctacatacgatataagctcattttgaatctatatctgtacatgagtcatttgttttatcaaacaattgatctcgtctagggcctcggtagatgcaaaacgatgaacaattaattaacaactttgcacttgagcacagattttgcatacaattcgtggagtgagctttgtgatgaagctgcgttacagcgacgagatgacgtgaatggattgtcatgtggaagggaagttg

SEQ ID NO: 16988 - DNA, 3672 bp, DROSOPHILA
atgcattccgtgccatttcatgcaacaggtgccgcaaccgcctcgcgtctattcaatgaagcattggccaagattgcgatgaacgcccagcaaagcggaacgggcgatattggttcagctttgatgagcgttgtgaatgtgaacaaggagatacaggatcagcagatgaatattctgaaagccttctacgtggatctattggtgccattggagacaaatctggagaaggacacaaaggtggtgcagcatgagcaaaagaagttcctgcagcagcacaaagtgcgaatggagagctatcagaaggccgtgtccacgatgaagaagcagcgcaagaaaaaggccacgcccgagaacaccgaaaaggagcttaggagcctccaattgctcgaggatcagaagaaaaagctggatgtgttctgcgatcagagctacaagaatgaacgaattaaggacggcgacgatgaccacctccagggtcacggagctcagctgaagaaatcgcgcagcatcgatgccccctatggtgatatgcgcaccctgcacgaacgggagaacctttccggattgggcggtactgggccagcgcactatgcccagaactcgctgccacgcgccaaatctgatttcaatctggctttggtgggcactggacagagctcagccaacaaacacaagatcattgaggagcagctagccactctgggcgacgatcagcgcggtgatcagcgtcctctggtgaaggccctctacgcctacatgccctccggcgagaaccagttgtccttcgaggagggcgaccgcattgctttggtgggcggaaaggccaagggctggcaattcggtgagaatctgcggacacagcacttcggctggtttccggtggcctacaccaatgcggaagtggcagaggtgaccacttccggtggtcggcgatacgaaaacatgctgatgagctatgagcgaaatggtggcggatcaggatccggttctggcggaggtggtctgcgtagctatcagcaacagcaggattacgaggcgcagctggagctgatggagagccatgaggcaacgtaccgcaggcgaaggaatcacagtgccgaggattcatcacccacgcggatgttcggcgacacaatcaagcagcagaagaagtaccgccccggatccggggccaatccgcgaccgggaccgccacccacactgcccgctccggtgcccaatggaccgcagagccagtcttccagaatgctgaacagctcgcaaagcttctgcgcctccaacggaggaggagtcaatgcggcggtggaaagacgcaaacaaaagctacttaatggcgttcagagctcgaagaaccatccatcgggcaaatccggagtggcggccaagacctcgctgcatagcagcaatgacagtggattcgccaacgagcctccaccacagccggaagttgactattcggatgaggagccagccacccaaagagtggccattcgggatgtggcctcgtggacgttgaaccggaacttccggaatagcgtcgatagtcagatcgacgacaagagcctgcatcggctgagccggcagagcggaggagtgggaaagatgcgatacgatcttattgcctccgatgacgagattcttcaggcttccagcgccggtctgaagcgcaccaaatcgttctggaaatttggcggcggacgcaatggcgaagatatactggccggcatgtcattgtggcaacaccgcgacctggtggcggctccaaatctggaggagatgcgcgatcgggatgacttggagcggcgtttggaggaggatcgcaatggtacactgaccaagtcgcataactccagttcctcgcaggagaagcgcgaacgaaaggacagcctgaccagcactgaattgtatggagatgaggatgagaatatctacggactcagcgatgtgaacaacttctttgacggcgagggcaagaacaacagtcacggccatggactggtcatgaagacggtgaagcgacaggacatactcaagcagtattataccagcgaggacgaggaggattccgatgcggaactcaagtcgactagttccgatccctacgattgcatcgtaatcaatgatcacctggtgcgcaaggacgacaagatgcggcgccatcaccagcagcagcatcagcaaatggcgaccaatacgctgaaaaagagctcctccaaggaccaggacagcacactgacccgcaattcgacggccagttcgggagctccgacggctaccattctgccgcgaacacgcctgctcaagtcctccacctccgctggcaataacatcggcaacagcagcgccaccttggagcggaactcaaagggtttggccggaaacaagagctacggaccatggtacgacttctgggatcaggaacagcatggccagaagtcggctagtgccaagctgaaagcctcccagttcgccacggtcaagttgcgacataccaagaccaacgaccgatcggcaccgatgatctatcggagtgtgaacaatctgtgcacggtgacgggcctgaggatgctcagcctagcaggtgccggcatcaatattctgctgctctacaagatcagacggcgcatcctggccggctcgggtggcaactcatatgccgcccatgaggctatcaccatgtccgtgcttccgccgctctacttctttagccacctttactacacggacaccttgtcgctgaccatggtgcttctgttctacaactattggcagcaggaggcgcacctgccggcggcggtctttggggctgccagtgtgcttatgcgccagacgaatatcgtgtgggtatgcatggccaccggaatgactgtgctggacacgttggtcaatcaatgcgcccgcactgggcgcgttcccaaggaaaatgttcgactgatgggcaaagagttgtggcttcaactcgttagcagcccccaattgctgtgcaattgcatcctgagcatcttggccaagtgctgtttctacgcttcgatcattctgccgttcgtgggattcctcttcatcaatggttccattgtggtgggcgacaagagtgcccacgaggccagtttgcatgtgccgcagctattctacttcgccatctttgcggctggctttgggatatccaacaccatacgtcagtttcgtccggcagcagaattaatacgcaggaatcgcgtgctgtccctattggcattgctgctcatactggtggtggtgcacctaaacaccgaagtgcatccctacctgctggctgacaacagacactatacattctatatatggagccgactttatggacggttctggtggttccgctacgccatggcgcccgcttatctgctctcgatttgcgtactcttttgcggactacgtcacatgccggaaagctttaagttaatgtttccacttagtctattcctggtgctgtgcttccagcgactcctggagctgcgctacttcctggtgccgtacattctgtttcgactcaacacacggcacactcgcaagggttacgccgagtggctggagctcggagctcatctgctgctcaatgtggccacgttttacgtgtactttacaaaggagttctactggaaaaactaccgcactcctcaaaggatcatatggtag

SEQ ID NO: 16989 - protein, 1223 aa, DROSOPHILA
MHSVPFHATGAATASRLFNEALAKIAMNAQQSGTGDIGSALMSVVNVNKEIQDQQMNILKAFYVDLLVPLETNLEKDTKVVQHEQKKFLQQHKVRMESYQKAVSTMKKQRKKKATPENTEKELRSLQLLEDQKKKLDVFCDQSYKNERIKDGDDDHLQGHGAQLKKSRSIDAPYGDMRTLHERENLSGLGGTGPAHYAQNSLPRAKSDFNLALVGTGQSSANKHKIIEEQLATLGDDQRGDQRPLVKALYAYMPSGENQLSFEEGDRIALVGGKAKGWQFGENLRTQHFGWFPVAYTNAEVAEVTTSGGRRYENMLMSYERNGGGSGSGSGGGGLRSYQQQQDYEAQLELMESHEATYRRRRNHSAEDSSPTRMFGDTIKQQKKYRPGSGANPRPGPPPTLPAPVPNGPQSQSSRMLNSSQSFCASNGGGVNAAVERRKQKLLNGVQSSKNHPSGKSGVAAKTSLHSSNDSGFANEPPPQPEVDYSDEEPATQRVAIRDVASWTLNRNFRNSVDSQIDDKSLHRLSRQSGGVGKMRYDLIASDDEILQASSAGLKRTKSFWKFGGGRNGEDILAGMSLWQHRDLVAAPNLEEMRDRDDLERRLEEDRNGTLTKSHNSSSSQEKRERKDSLTSTELYGDEDENIYGLSDVNNFFDGEGKNNSHGHGLVMKTVKRQDILKQYYTSEDEEDSDAELKSTSSDPYDCIVINDHLVRKDDKMRRHHQQQHQQMATNTLKKSSSKDQDSTLTRNSTASSGAPTATILPRTRLLKSSTSAGNNIGNSSATLERNSKGLAGNKSYGPWYDFWDQEQHGQKSASAKLKASQFATVKLRHTKTNDRSAPMIYRSVNNLCTVTGLRMLSLAGAGINILLLYKIRRRILAGSGGNSYAAHEAITMSVLPPLYFFSHLYYTDTLSLTMVLLFYNYWQQEAHLPAAVFGAASVLMRQTNIVWVCMATGMTVLDTLVNQCARTGRVPKENVRLMGKELWLQLVSSPQLLCNCILSILAKCCFYASIILPFVGFLFINGSIVVGDKSAHEASLHVPQLFYFAIFAAGFGISNTIRQFRPAAELIRRNRVLSLLALLLILVVVHLNTEVHPYLLADNRHYTFYIWSRLYGRFWWFRYAMAPAYLLSICVLFCGLRHMPESFKLMFPLSLFLVLCFQRLLELRYFLVPYILFRLNTRHTRKGYAEWLELGAHLLLNVATFYVYFTKEFYWKNYRTPQRIIW

SEQ ID NO: 16990 - DNA, 3575 bp, DROSOPHILA
gtgccctggccctgtccaccgaaacacccgaggacaacttgccggactttgctaacatgactgaggaggaacagattgccttcgctatgcagatgtccatgcaggacgctcccgacgactctgttacccagcaagcaaagcgcccaaagacggacgaggcaaacgctcccatggacgtggacgaggattactcggaggtgatcggagacccggccttcttgcagagcgtgctggagaatctgcctggtgttgatccccagtcggaggcggtgcgcgatgctgtcggttcactcaacaaggacaaggacaaaaagagcgacggcaaggactcgcaaaaaaaataaaccgcatctatgattatatctaataagctcgtttaaagcatttgtatgcccattaaaatcatttgtagccgtctttcaaattatgcttcaagtgaaaatatataaacaaatacacacgatctgctgctgacttaattgactgcgagggtcttttcattcactgcatgtctagtaaaaataattttctagtcctgatagtggccggtcgactcgggtaagcatgtttattagggaagcatatgcataatgcttcttctatctgtcactcacgactctagttaaagtaaataaattggattctgtacttaaagtaaatgaacttgagctcattggccagtttttgaagttaaacacggaagaatttaaaacatcaaggattccgcccgcctcttttagagtccactttacacctggcatactgcgttttatacaatgtcagtaccatatatcagacacacgtttatttacagctggaccatagataaataataaaatcagtttgtggctcaatgcactatagtttatttccccgtaacaggggcactattgatatattgatgctctctactttacaagcgtattaactatgtgtggtctcgtatgcagattacttgtcgcccttgtagtcccggatgtggtagagcacccaggcgggaatgaacaaggatgcagcgcacatgccgccgccgaggatcaccttctcctgtaatgcaaaaagtgaaggatcagtttttcgctttgggaatcacatcctggttatgcaacaagctcaaacttacggcggtggagatgcgctgggtcggaggtccagagacgaccgactggcaacggctctgcatggcgctacgcatagcggggaccaggaggcgggcagcgctgttttggaacattttcacaaactttttcgcaaaatacgctggcgtaaaatcaatgctgtaaggttagaatgcttcttcttaacgatttgtcattcgcctttctttagagatggtcttacgcgaaacacaactatcgcaagccaaaacgaaaatgtagggtgtttcaggtgcagataattgtttagaaataccttattgattaaaaataatgttcttgacaacctagaaataaatttaagtcaatcaagttactcaatgtcggtatggtcacaatgcgtacaattagttaaattagttagtttgttcaatattaaaaaaatcctttttttaattaaaaaatagctttaatattatgtatcggaaaatttaatggaacatagataacactatttataatattatacgtgttataattgtgataggcatacacaaatttataagggaaaaataagccagggaaggcggtccagggtgaccatttcgtgccatcggaatcaagcgatagtcgcgcatggtcccactgctgcatgggacatgtccgtcatgtgatattcgttgctcgagaaaaagttcggtgatcgctttgtccacctttttattttttatttgcccaaagcactttgcgtcgatcctagagcctgcaaaatggtatccgagtgggtggcaccaatcgttatcaccagcatttgggccttcattggcatcatctgccccttcttcgcccgaggacccaacagggggtaagctaatctgtttacccaacttcagtcttgagtagctttgcaacccacaaatgaaactattttgcagggtgactcaatgctgcctgatgctcaccgcagcaacttgctggctgttgtaagtacatgtgtatataagtgctcgctgctttttaaaatgcttatcaatggctattttccttgcagctggctgtgctgctacatgacgcagctgaaccccctcatcggacccaaactaagcatgaacgaaatcatgatcatggcccgcgagtggggcaatgagatcaaggacaccatggctgtcaccgtctaatgtctgtcaccctaatgtattcgtttcaattgttttgttattgtttctttatcccggattttccgacattctgtattattaatatccacttattgttcgaagcataaaataaattgtaaccgcggtcgctcttggcaaacacgttgtagaaaatcatagataaacaacatatttttatgctttgtacgcgcaaagatgtaaacttaacgttgcctttttggccaagcattcccaataatcgagtgtcttaaaatgaagattgaaacctaaaataaagtatatttacacaattctgtgttcaataagtaacgtgactgcatttaaaactgcaatgctaactacggacctagaggtaggtgaaccgttgataaatacaaaaacgaaaagaatccttaatggtaagggtcacaagcataaccgtggcaatcttcagcctgcagaaaagcatgacccatattgaggattgaagtgtcgagtggaaaataaccagccacttcagcaaatgtgcctgtgtcacatttcccacaaggataaaacactgctaacagatttccaggatcggtcagtactttggaataagaccttctacaaatatctcgcagagatcttcgagaaaagacaattttttctgaggcatacaacgatagtcatgtaatctctactttcgaagagtgcttgtccaggcttcttttgccgttgtggaaaaagtccataatgtgaccgatttggaagtatgcgttgcaactcaaaatcttaataatcccttataaaatcgttagagctctcatggaatggaacctggtacaagaggactacagacattgaaagagatcttaatcttaaatcccaaaaaaaagcacctcccacatgataaccaatcgagatatatataagaacaaggttattaagaatgaaaattcgaaccaaaatgtatgtataaaatctttgtaccgacatgttaatacttttaaaaacattctactctcaatctactaagccaataaactattaaaaataagacaagcgttgcatagttttcggcgcaactatattataatatagtagtgggtaacgaaataaaggttccttttgtttgggatactgaaattaccatgaaatattcaataataccatttattgttcaattaaaaaaaaacctacgtatgtacatatatcaaataatttctttctattataaaaaagggaatgcaggattcattgaaaagcatgtagcaggcttaaagaagcgtgtcctataaagcatactcctatagtatgtccatccatctgtccgctatgc

SEQ ID NO: 16991 - DNA, 864 bp, DROSOPHILA
atgaacaaggatgcagcgcacatgccgccgccgaggatcaccttctcctgtaatgcaaaaagtgaaggatcagtttttcgctttgggaatcacatcctggttatgcaacaagctcaaacttacggcggtggagatgcgctgggtcggaggtccagagacgaccgactggcaacggctctgcatggcgctacgcatagcggggaccaggaggcgggcagcgctgttttggaacattttcacaaactttttcgcaaaatacgctggcgtaaaatcaatgctgtaagagcctgcaaaatggtatccgagtgggtggcaccaatcgttatcaccagcatttgggccttcattggcatcatctgccccttcttcgcccgaggacccaacaggggggtgactcaatgctgcctgatgctcaccgcagcaacttgctggctgttctggctgtgctgctacatgacgcagctgaaccccctcatcggacccaaactaagcatgaacgaaatcatgatcatggcccgcgagtggggcaatgagatcaaggacaccatggctgtcaccgtctaatgtctgtcaccctaatgtattcgtttcaattgttttgttattgtttctttatcccggattttccgacattctgtattattaatatccacttattgttcgaagcataaaataaattgtaaccgcggtcgctcttggcaaacacgttgtagaaaatcatagataaacaacatatttttatgctttgtacgcgcaaagatgtaaacttaacgttgcctttttggccaagcattcccaataatcgagtgtcttaaaatgaagattgaaacctaaaataaagtatatttacacaattctgtgttc

SEQ ID NO: 16992 - protein, 187 aa, DROSOPHILA
MNKDAAHMPPPRITFSCNAKSEGSVFRFGNHILVMQQAQTYGGGDALGRRSRDDRLATALHGATHSGDQEAGSAVLEHFHKLFRKIRWRKINAVRACKMVSEWVAPIVITSIWAFIGIICPFFARGPNRGVTQCCLMLTAATCWLFWLCCYMTQLNPLIGPKLSMNEIMIMAREWGNEIKDTMAVTV

SEQ ID NO: 16993 - DNA, 2623 bp, DROSOPHILA
ttccgttatgcaacgccactgcaaggacaacaacaggtggatgtcgagaaggatgtgcgaggtggtggtgattctgagtccgtagccactgtttacgccgaccaaactttttgtcagctgtcattggggcagacgtgcaaaagaaaaacgagagttttccctttattctgattccaaaagactgacagctgaataccccgtaggaaaaaaaacacgcacaacacaattcgcgtttgagagaaggccccggcgagattcgaactcacgatctcctgtttactagacaggcgctttaaccaactaagccacggcgccacttatgttgaacctgaaaatttggaaacttctgtggtgggtggttggaggtatcaatgatcattaaaaataactcaaggtcaagtattgattttgatagatgatactatgaagataaaattaaaaagatatgaaaaactaaaaaatactgacacaatcttttgtgtaggccccggcgagattcgaactcacgatctcctgtttactagacaggcgctttaaccaactaagccacggcgccatgcgttatatgcctgaccaaattttcataattgccttgcccaattcaaattaaagtgtcaatagctgaaatgacatgctcttcaaatagaagatcttaaaaagtaattcaacgaggtccacgtataaaaatgtatgtaaagtactagcgttctttgaatgggaagaaccatacaaaatattttctttatttacaatacgtataccagcatttgggagtcccactgagattattcacaatatctaaaggggaaaaacaaatgcatatggctgtgtatttaaggatgattaacagacaagagaaaattaaagggggaaatcaccgaagttgcgtacttttgcgacaaaagacatgagagtataaaagcgaccgtcggaaatatgcagtcactcaaactaagagatagagtgcaagcagaaagacgaaatcaaagaattatataagatggaatgtcaggcttcaggaaacccaaagagcggagcggcaaccgcccaatgcggagtaagggtcggtgatgatcttgccaatgctcgagccggagtattcgcctccactccaggcgctgggggtccggtcaccaagggagtttatggagcggtcaacgcgtaagtccagtaaaagttcttaaaaatgctaaaataaatattataattttgtaaactttcttctcttcatcccacagcaatggtcatgcactctcactgcagcatggccacatcgagggcgtgggcagcactaccactgccgcagcccaagccaatctcttccagagcaataacgccgctctgaatgccactgcatttcacagtcatagccgatcgcacgatcagtttggcggaggactcaatttgcaaactggaacgggtcaccaggcggcagtgggggtcactagggttcctcagttcggcatgaccgccgtccaggcttctggcacagcaaatctgtatacctctccaagtggcaatctcaacctcaacgccaccggaagtgccaatcatcacctcaggggaccgatgcgcggcaagtccgatttcggcaccggagttaacttgcgatataatttttaaatcctttatagttttattgaaactattcatagtcacatttagtacttgcacgtagccaagaaaagaaacaagtgccgtatttatatgcattatatcgaagattaaataaaccatgctattaaaagcgctttctacttggtaacacgcaatatcattgaactctttaaactcctgtcaaagtgcacatcgatttcccatatttcatcgagtgaaattctacacaataaccgagccacttggggaaatcctttggggttcgaaaacccatctacagacgaacgtagaccatgagaaacaaatttttgactagtcagctttttggcatatttctttttttttttgcaccaatgtgtgcaagcaccgcaaccgttaagtgccataaaaataattcaaaataaattgctttacataaaaatttggtttcggcagagcagcgcgcccaactgttttataaggtgtataatttggccataataatgcgcatcatggcagcatccatcgcggggttggttattaattctcggtcgacgcgtcgtcgagcccgagacataaataacgcgttttatgcgtgaatatactttgcatttttcgcagacacggcggagtcctagttaagccgtaaaaattacaccagccagtcaagaagccccgccacgactttgacttcctcgaaggaccaaggcaagtcatgtcagctggcctaatccccaggtagatatccgccttgattggccgcaatgaaagatgccaagtcaatacttttgatactcccaggggtcctgtgaggaccggtgggcgatggtgagtgggataaacgctgacttgtaatgtcatgtaattagggtaataatcggcttgccacttgaggttttatcccgcagcccaaaacgactttgttatgcaaatctttctgttgggaaagcaaagatattcgaggaaaattggaaagctcaaattgaccagactttaagtcatctttaaatgtgatggtttttgggta

SEQ ID NO: 16994 - DNA, 546 bp, DROSOPHILA
atggaatgtcaggcttcaggaaacccaaagagcggagcggcaaccgcccaatgcggagtaagggtcggtgatgatcttgccaatgctcgagccggagtattcgcctccactccaggcgctgggggtccggtcaccaagggagtttatggagcggtcaacgccaatggtcatgcactctcactgcagcatggccacatcgagggcgtgggcagcactaccactgccgcagcccaagccaatctcttccagagcaataacgccgctctgaatgccactgcatttcacagtcatagccgatcgcacgatcagtttggcggaggactcaatttgcaaactggaacgggtcaccaggcggcagtgggggtcactagggttcctcagttcggcatgaccgccgtccaggcttctggcacagcaaatctgtatacctctccaagtggcaatctcaacctcaacgccaccggaagtgccaatcatcacctcaggggaccgatgcgcggcaagtccgatttcggcaccggagttaacttgcgatataatttttaa

SEQ ID NO: 16995 - protein, 181 aa, DROSOPHILA
MECQASGNPKSGAATAQCGVRVGDDLANARAGVFASTPGAGGPVTKGVYGAVNANGHALSLQHGHIEGVGSTTTAAAQANLFQSNNAALNATAFHSHSRSHDQFGGGLNLQTGTGHQAAVGVTRVPQFGMTAVQASGTANLYTSPSGNLNLNATGSANHHLRGPMRGKSDFGTGVNLRYNF

SEQ ID NO: 16996 - DNA, 6652 bp, DROSOPHILA
gcatcttgaacaatgttttagactgctatgactgatgtgcttctttctgggcgaagctggcgtatatatagccaaatcaagaggaagatctcatatatgttttccctaagcaaacagcaaacagtcgttttaaatcgaatcggaatgtgatgttttagtaaatttgggttgcttaaacagagatcaataccacattttcgcaatgtataattaggctatttatacagaggctcacttaattatacgccattcatttatttttaaaatactaatttcttagagaaacggatgtaagttgggtgggtagccaaagtattgaaataaaagatttttttttgtgtcataacttcgtatttattttccgtataactacatagtgaaatactttacgaactgactctcaatggaatgtaaatttaaatcggactggagagccttatacataaggttttgaattgttacgaaccgaacttggaaccaagtgtacgaattgtaaataaagacggcaatttaaattgacacgaaaaaaaaagataatataaaataaaaattggtcttaccacaacgtataaacattttctgttgcacatagtttgtattttattcaaatgttttgctctgatctattaattggtgtaaaataacttgagtggttgggactaactttacaaatgagtctcaaatgcattttaagtaatgtgaagttcgggtataaactaatcaaatcgaggtgtatagatataaaatcaaatcacggctttgcttggcgtacacacatattaaataatattaatatcagttagactcagagacgttctatgagctaaatacaatgctttagttaggcgagtaatttagttaagattttaccactttttcttgagtttccttttgcgtgtttaatatttaagttttgtgttttccaacttgtacaattacgaaacattattttggttttgcaattacaattaataattgaatggcaatctctgttccatctttaggccccacccatgtcgtccacggcgatggcacacagcacgtacatcattccggcgctgaggagcgccgtaaccggcaccgttacgatccatgcataggcaatattccggaatagatgccaatcgacactgccatcatccatgggcgcaacttcgttatgggtctccttatcggtctgatcattcggctgactcttcttcttgcgacctgatgcactcacatgacccacaaaaaccaccgaaccgaccttgcagtgagtagtcgaaatgggcaggccaattttgctggccagcagtacggtgatggcagctccgacttcaatagtaaagccactgaaaaatagttgaaagtgaatgttctatttgtgaaaggataagggaaattaggaactgaatactcacgtcgatgaggttattttcgtaaggtcattgccaatggtctcgatgactcgtcgtccccacagccagagacccacagagatgccgatgccgccgtagatcagaatatagatgggactctcggcctgctgcataaccgatccctcgcgatagatcatatagagggcaatcagtgggccgatggcgttgctcacatcattgccgccgtgcgcaaaactgccaaatgtggctgtcaggatctgcagaaacgagaagagcattgaaatctccggagtctcctcggcgccactggttcttcgtccaccgcccgtcgttcgtttcagctcctcctcctgctcattcagcgcctccttgctctcgatcagaggaaccttgctggaattgggcgataaagtggaactgatcataagatcaaggctgccgccgctctccaccacttgaaggttgttatttgtggctttggtcgatccggtttccaagtccgtgccaatggagttcgtcttgctctgtaagtggaaagaatcgaagattaggcaaagcaatcgaattagctagctagcactaaacaggtagtaccttctgctcctccttgggcgactgcatccgcttgaagcactcctgcaacttgcgtccattttgctgctgctgctgttgttgctgctgctcgtcgataaaattcagactggtaatcgtcagatccgtgttgtccaggctagccttgcccagcagatcctcagcctttttgatcagctgcggatcgatcttgtactcctccccaagcgcattgttgttcttggccgccaatccgaatggagccaacttaaaggtcctcggcgagttgtcgctcaacgagaccagctcggttatttctgcgatggcaggcagtggctttccttcgctaaccagcgacaggggacgacgctgcttcttgggacttcccgacggggaagattctggaagaagaattcaaaatttatattgttattagccaaacatttgttggaagaacaaaggccccattatttggttaaagtttaagtcgcatatggaataaggtttctaattttttttatgaaaaaccaatacaaattagctacaacctttgtataaataacctagatccaaaaaacttccacatggtgaattgcgacttagcacgcacaaataaactgttagcttacgcaaacaaagaaaacctcttccactaatttccctataaatacttaggcttcagctaaacaagagcacattagattcaacacctaaagaatccattagagatgcgttcgcagccaactatcttccttgccatcgcggctttcgtttcgactgcctgggcactgacgattgatcccgccacggtcactgtttcatcggtcactattccatcggtcactattccttcggtcactattccgaccactgatacagacacgtccaccacttcgccttcggcaaccggaagcagcaccaccgtgactcccaccaccaagaaaccaaagaagaagtctaccgttgtccactacaagaagaagacccaaaagtcgaacagacgccgcaagttccgccactcacgcgatggcaagaggaagaaccgatcgagttgggaataagaaggacatctcgaacacattttgaataccgcagaccctgaagatctacatgaacgacccacaagaacagttttaagccaattgctaatttactattattatattgttattatattacttattaagaaattaaatgcttgttttataaaaggagtttcaagattttgtcatttaaaagtagaattactaaaatgcaagctaaggtccattcattcatttttttaaatatctgaacccgtatacacgtatatatcccgttcataatctataatttgatcttttcatctgatttatagcagagttgtgtcttaaactgctaaatattaatatttcctgacgcttgcccattttagtttagaaaaagtcaaaaaatgtagttaaccgcagaaactaaagtttgtatcaaaaatgcaatgcaataagcattaagtctcgactgtcagatacccgttaaaagcaaaactttcaatctttggaatgactagaatcttcatccttaaatcagttgaagttcgactagtgattcagatcgagaatatacttcatagggtcgaaaacgatgcgatgtaatgtaggcattcttttgagaatatcataaaaagtcatttaatcttgagggtaatacaggaataagaataatagaaaatgaaaagtttgggaacaaaagccaagacatgtctggccaaatctgttatgcctggggtattcgcaatggggtctctactttagtttcgtcgggatctcttcttgcggtcgctgcgcttgcctcctcgcgagtggcggatcgtgcggcgtctgcccggcttgtggaccttacttttgtggtggacaacggtcttcttcttcccacttcctttcttggaggtgggagccacggtggtgggtgcagtggtgggtgcggtggtgctgcttccggttgccgagggcgaagtggaagtggtgggggaggtggaggtcgtgggagacgtcgtggctggatcagtagccggaggtgtggtgggatcagtagccggaggagtagtcggatcagtggccggaggagtggcaggatcagtcactgcccaggcagacgaaacaaaggccacgatggcgaagagaataattatctgcgatcgcatcttggattatatgtagtgctctgcttgatgtgactattgtacgtagtctggatgaaaccagagtatttatagtaaaatcggtggaagatgtttcagacgcgttttgctcaagcaaacaatcttctacattattgtttgatcacttgcgattgttaattcgaggttgttcaaacaacaaattaagcatatttttgatgcgcaaagattgaaatagatgtttgtgtttgtgaatatcgtgttattttaacgagaatatcccactttttacctatatctacataagaatcgacattcgctttacgtatcactaaataactcacccacggagtcctcgaaattaaacttgacaggattctcggcccgcaatcgtttggcaatcttgcgccgctgcaaaggcaccactaccaattgcgtaagcaatgccaccagcaaagagagaccaaaactggcggtcagtgctatccaagtgggtatgttgtccatgtagagcagcttgggcccgtccaacacaacgctgataacgttgatgaagaacgttacaccgtagaagatgggcagcgatcgaaatccggccttgagcggctcctgggcacgtaggatgaaacgacgaatggccaggaagagcagaatgctcacaattccactcagcaccggtgagatgaaccacgatccgacgattgtgcccaaagtagaccactttaggccctgtacaccgcgcgccactagcgaaaatccaatggtagagccaacgatactgtgcgttcccgaaataggcaacttcaaaaaggtggccaccagcagccaaacggcgctactggccaatgcggccacgcagcccagcatcagaacctcctcggcgccctcgtataggccaacttctaggattcccttgcgcatggtatccgataccttgtagcctgccggaatatgaatataatatcaatacagttggcaaattaaattctaatattttgcatttattttcttaccaatcaaaacggcacccgaaatttcgcaaatggtggccagcacgcatgcctgccggatggtcagaacaccggagccgacactggtgccaaatgagttggccacgtcgttggcaccgatgccaaaggcgagtacgaaggcgattaggaatccgatgactaccatccaaagtaattccggcgcaaagctctccattgttgccgacaatttggttttcggtgttcaatgttagtcaaaactcttcggctcaagccaatctctaaactctctcaactctaactaaatactgatttcacttcttgctcctcgaaaaactaaactcaagttgtattttattgtatggtgcggatttaactgggtggatgatgacttgagttgtgcaaaacaatcgtttgaaacttataaaatacaaagactacgtaacaaatgagggtcgaaacaaaaatccaaattgattaataagtgagaaattcttttcaaatattctctaaacagccatatttgcgcttaaacttcattgtcgttattttcataatgaaaatggggcaacaattcgccgcttggaactgcgaagatgcgagatacttaggtgactaattaccctgcactataaacactaaacccttcggtttggagcctctatcttcaaatgatgatgctgatgttgtgatgatcagctctatcataaattaggcaataaataaataaaatcctacaaataaccctgggcaggacaaaaaaaaacaccgaaacgaaacgaaacgaacaataatccaaattaaaatccttctcgtgcgctgacaaattcctcctgccaatggaattcgatgctcagtgtcgggaagtattcacaggtattccacactccaaactaactccacttgtagaccagtttaacttctgggatatcttcactagcaattgttgttttttcgttctaagattgaacgaatgctgttgatgttgtggagtaagtggatagtgtgttgttgtgtgttggtttgttaataattaattataataagtttcttgttatgttgagtaggagttaagaggtgtcgagttggtaaactgtaaaacagatatgtatatttccaaaattttttcccaaaacaaattagatagaaattattctcacctgacgtttggggtagcacagttgtttcaaccatagagaattattcaccatgtctgaaaatgggcgaaaaatagttattgcaactcaagcagaactcagtatcacttgttttttaacttaagtaaaccactagcaaaaaactgaacctatccgactaagcacacaaaacgatttgagtaaaataactgattcaataccaaaaatcaaaacgaaatccagtttaatctgctgaaatttggtacctaaaatcactctgatttccagatacattttcaatacctttcgacttttagatactttttaaccagtaaaatccagcacacagccattcggtgagtttttcaaatgaaatccaattgtttgtttctaattttcattcatttgtttcttttccag

SEQ ID NO: 16997 - DNA, 2226 bp, DROSOPHILA
tatgaaaataacgacaatgaagtttaagcgcaaatatggctgtttagagaatatttgaaaagaatttctcacttattaatcaatttggatttttgtttcgaccctcatttgttacgtagtctttgtattttataagtttcaaacgattgttttgcacaactcaagtcatcatccacccagttaaatccgcaccatacaataaaatacaacttgagtttagtttttcgaggagcaagaagtgaaatcagtatttagttagagttgagagagtttagagattggcttgagccgaagagttttgactaacattgaacaccgaaaaccaaattgtcggcaacaatggagagctttgcgccggaattactttggatggtagtcatcggattcctaatcgccttcgtactcgcctttggcatcggtgccaacgacgtggccaactcatttggcaccagtgtcggctccggtgttctgaccatccggcaggcatgcgtgctggccaccatttgcgaaatttcgggtgccgttttgattggctacaaggtatcggataccatgcgcaagggaatcctagaagttggcctatacgagggcgccgaggaggttctgatgctgggctgcgtggccgcattggccagtagcgccgtttggctgctggtggccacctttttgaagttgcctatttcgggaacgcacagtatcgttggctctaccattggattttcgctagtggcgcgcggtgtacagggcctaaagtggtctactttgggcacaatcgtcggatcgtggttcatctcaccggtgctgagtggaattgtgagcattctgctcttcctggccattcgtcgtttcatcctacgtgcccaggagccgctcaaggccggatttcgatcgctgcccatcttctacggtgtaacgttcttcatcaacgttatcagcgttgtgttggacgggcccaagctgctctacatggacaacatacccacttggatagcactgaccgccagttttggtctctctttgctggtggcattgcttacgcaattggtagtggtgcctttgcagcggcgcaagattgccaaacgattgcgggccgagaatcctgtcaagtttaatttcgaggactccgtggatcttcagggtctgcggtattcaaaatgtgttcgagatgtccttcttattcccaactcgatcggttcttcctcttgccatcgctggacaacggtagacttcttctttggtttcttggtggtgggagtcacggtggtgctgcttccggttgccgaaggcgaagtggtggacgtgtctgtatcagtggtcggaatagtgaccgaaggaatagtgaccgatggaatagtgaccgatgaaacagtgaccgtggcgggatcaatcagcaagacgaactccattggcacggacttggaaaccggatcgaccaaagccacaaataacaaccttcaagtggtggagagcggcggcagccttgatcttatgatcagttccactttatcgcccaattccagcaaggttcctctgatcgagagcaaggaggcgctgaatgagcaggaggaggagctgaaacgaacgacgggcggtggacgaagaaccagtggcgccgaggagactccggagatttcaatgctcttctcgtttctgcagatcctgacagccacatttggcagttttgcgcacggcggcaatgatgtgagcaacgccatcggcccactgattgccctctatatgatctatcgcgagggatcggttatgcagcaggccgagagtcccatctatattctgatctacggcggcatcggcatctctgtgggtctctggctgtggggacgacgagtcatcgagaccattggcaatgaccttacgaaaataacctcatcgactggctttactattgaagtcggagctgccatcaccgtactgctggccagcaaaattggcctgcccatttcgactactcactgcaaggtcggttcggtggtttttgtgggtcatgtgagtgcatcaggtcgcaagaagaagagtcagccgaatgatcagaccgataaggagacccataacgaagttgcgcccatggatgatggcagtgtcgattggcatctattccggaatattgcctatgcatggatcgtaacggtgccggttacggcgctcctcagcgccggaatgatgtacgtgctgtgtgccatcgccgtggacgacatgggtggggcctaa

SEQ ID NO: 16998 - protein, 628 aa, DROSOPHILA
MESFAPELLWMVVIGFLIAFVLAFGIGANDVANSFGTSVGSGVLTIRQACVLATICEISGAVLIGYKVSDTMRKGILEVGLYEGAEEVLMLGCVAALASSAVWLLVATFLKLPISGTHSIVGSTIGFSLVARGVQGLKWSTLGTIVGSWFISPVLSGIVSILLFLAIRRFILRAQEPLKAGFRSLPIFYGVTFFINVISVVLDGPKLLYMDNIPTWIALTASFGLSLLVALLTQLVVVPLQRRKIAKRLRAENPVKFNFEDSVDLQGLRYSKCVRDVLLIPNSIGSSSCHRWTTVDFFFGFLVVGVTVVLLPVAEGEVVDVSVSVVGIVTEGIVTDGIVTDETVTVAGSISKTNSIGTDLETGSTKATNNNLQVVESGGSLDLMISSTLSPNSSKVPLIESKEALNEQEEELKRTTGGGRRTSGAEETPEISMLFSFLQILTATFGSFAHGGNDVSNAIGPLIALYMIYREGSVMQQAESPIYILIYGGIGISVGLWLWGRRVIETIGNDLTKITSSTGFTIEVGAAITVLLASKIGLPISTTHCKVGSVVFVGHVSASGRKKKSQPNDQTDKETHNEVAPMDDGSVDWHLFRNIAYAWIVTVPVTALLSAGMMYVLCAIAVDDMGGA

SEQ ID NO: 16999 - DNA, 3704 bp, DROSOPHILA
tttcctattttcgtagaaaaaaaaacgagtctaataaataaaaaaatgagtgcctgtttttaataccaagcactaaatccaaatccaataagccaataattaatatataaaataaaatacacttgggagttacttaactaacacatgatggtaaagtaaaaagtgtattgtcttgtaaaattatttcgaattacctttttatgagatttgccgttgcctaattaggattcatctctccttgtttaccattctaatgggtatcattagtttactccttttagtgatttccttatcacggcaactatggtcttttatctaatcactaattagggtcgttaatattttctcaacttttctcaaatattaaatgtgccaagaaaacgatattttctaaaaccgaaaactaagtaaaatcctaacacctattttccacgtgcacctgtagagcttccgaatcctttcgatccaacacttgttaattgatttcgagtcttaactcgcattttcgtaattagcgcgcatatcttagttagcaacgaactaccgacattttgcgttggatgcttgggcgatgacaggtggaaagcaactggctgcatgtccagatgtcctgcccactttcggaagtagtgagtctcggcgggtgagtgcgcaggcgttgaagccgaacatctcgatattccgggctcgccagagtaactgcatgtgggtaataatttcggctgtacttgtggctttggggcaaaccgaagtgcttgggaatcatgtgaatctaataaggatgcagctttccccactttaccacattcgaggcactcgagtttcggccatgtgcctgttgtttaccaaaggtttatacattgttttccaaatccattaattataaagtcacattcaatttcattggctttataatagatgggtctcgaaatcaaagccccatttcagcaaaagtctttgaacatgagctgaaaaatgattcagtttgattcaattgttcgttgaaaaaacaacaaaataaaaaaaaaagaataaaatgacttctattataccgccgggctcgttagttccgcaggcgcagggcgtagaagcagccgtacccgtatggttcaagatggactggagcccggagatagagcagggcatctacaaggactggggaacctattacagtcgccggcgcagggagaatctgggcatgtactacttcgacaaagcccttaagcttggacctgcagatttcacgactctgtatcgccgaagccagagcaaaaggaagaatgcccaggcagatggggcacttaaggacagtttggaggcaaaacgtaagcttagttcgttcttcttgaaaacttgcattaagtagatcgatttcggccacaggactattgaaaaacttgcaacgctatgatgcgcctattaatttggaggtctgcgatgcattgtacgaactaaatcagcttgagaacgccaaagccgagctccacgacaatacccgcctctttactggaaacaaaactaaaatgttcgagcagcgactggtggtggtacgatggtgtttcgggttgagtttgggtttctcctgatttctggggtgcttccaggtggacgagaacattgaagatgcctgtggcccttcgatgactcagtacatatcggacaaggagaaactcatagtgcacttgaaggaggtacagaacaagtacaagcccgataccaggccgctttggaaaattctgaaggaacaggagaaatgcgatgtcctgagcattcccgaaatcgaagtgggtattattggcaaatttgcaaaattacccttactgttataggccgtcttactaggaagaaatgctttccccccttgaaattgcgaggcgaagtcgtgctttcgacgtgtttaaccagatgttcatagataggtcttggcatgatgtcatatttctcaagcacgttcgaaagtaaaaccatttgtgaaactataaaacattgattatagcatatgtacctacatttttgccttagaaatccaaaccttctcttgaatcagtgtaagaactccactgagtacttacaaacgctttctacaaagaaatatgacgagatcaaaagctttctggtgagtttgagtggtgaacccgaattatgagtacccaaattgtccctaattgtttatttcagaaaattctggaagcccgtagccccatgtacaatatccgataccaaaagttcacaaacaagaagttgatggataagtttcgccaggaatatctttttcgagttcagtaccaaacaagacgaaacatgatttccgcactgcgtagtattcggtaccttcgaaaaaccaagagtctaacagtaagaattttgaatgaattcgaacagagattggttaaatgattaatggttttagaaactcaccagttacgtggaggaagttatgggagattacgtggtgaaaaaaaccaacaggattatgccctggaaattcgaattcatcaacgaggtgtacaatattttggcgcttgcctacgtagatcagtacacgcttccgaagaactttcgcttttcggagaagaacgcactgcttcgattgcttcgctttcctatggacaagtcaaaggaagtgaaacacttcgtatttggggatcgaactacgcaccaaggctcggaaacagtagatccggccttgacaaaatcacggtaactcgcagtcgagataaaaattctattttaatttattttgttttcagtctaatgggaaaccgactcgagaaccgtatgaatttcgcaaagtaccctatagagaagtcctacctacttcaccaaatggcagagattcatcttaaatcacacaggtttgacgaatgctgttttagtgcccgaaagtctattgaaggtttggtccattagtgctatactattaaacggttatggaaatacctatatatctatctttttagaggcaaaaaaatgcaatagctacatttggcagtttctgtgctacctactgataataaaggcgaatgctgcactccacaaagtcgagcgaaccagtgaagctctagatctggcactaaaaatttccaaggaattgaaagaaaagcatattcataacttcttgactgcctgtatacactgtaatgaggaggaattcatcgtgaagaagcagagcatttttgcgaatagccggcgcgaaagcgaaaaatcggtgtatagttccctgtccgtgcgccatagcaattagagctttgtattatttgtataaccaaaaatattgattaataaattctcagtgcaattataatagtgtagtgacctattagatacctatactcaagtacccctgcgtatttggaatttgcattcttattatcaacttgcaagctccttcatggctagatcgactcggctactgatcctcttttaaaaataatgcttgtgtaacgtatatattacacaaacatcgggcttacttttcactagtctaagcaaattcttgtcttaatttataaaaatataaaatattttgcaacactttaaaatattttatgggagtacagataataagtgctcttctttttgcagtgtttttattttagtgtaacatacaacagttcttcgcttaaatcgatggttttgatactacaaatattacactgatgctttctctaccagcttggccatcatcttctcctccttggcct

SEQ ID NO: 17000 - DNA, 1167 bp, DROSOPHILA
gttgaaaaaacaacaaaataaaaaaaaaagaataaaatgacttctattataccgccgggctcgttagttccgcaggcgcagggcgtagaagcagccgtacccgtatggttcaagatggactggagcccggagatagagcagggcatctacaaggactggggaacctattacagtcgccggcgcagggagaatctgggcatgtactacttcgacaaagcccttaagcttggacctgcagatttcacgactctgtatcgccgaagccagagcaaaaggaagaatgcccaggcagatggggcacttaaggacagtttggaggcaaaacgactattgaaaaacttgcaacgctatgatgcgcctattaatttggaggtctgcgatgcattgtacgaactaaatcagcttgagaacgccaaagccgagctccacgacaatacccgcctctttactggaaacaaaactaaaatgttcgagcagcgactggtggtggtggacgagaacattgaagatgcctgtggcccttcgatgactcagtacatatcggacaaggagaaactcatagtgcacttgaaggaggtacagaacaagtacaagcccgataccaggccgctttggaaaattctgaaggaacaggagaaatgcgatgtcctgagcattcccgaaatcgaaaaatatgacgagatcaaaagctttctgaaaattctggaagcccgtagccccatgtacaatatccgataccaaaagttcacaaacaagaagttgatggataagtttcgccaggaatatctttttcgagttcagtaccaaacaagacgaaacatgatttccgcactgcgtagtattcggtaccttcgaaaaaccaagagtctaacaaaactcaccagttacgtggaggaagttatgggagattacgtggtgaaaaaaaccaacaggattatgccctggaaattcgaattcatcaacgaggtgtacaatattttggcgcttgcctacgtagatcagtacacgcttccgaagaactttcgcttttcggagaagaacgcactgcttcgattgcttcgctttcctatggacaagtcaaaggaagtgaaacacttcgtatttggggatcgaactacgcaccaaggctcggaaacagtagatccggccttgacaaaatcacggtaa

SEQ ID NO: 17001 - protein, 376 aa, DROSOPHILA
MTSIIPPGSLVPQAQGVEAAVPVWFKMDWSPEIEQGIYKDWGTYYSRRRRENLGMYYFDKALKLGPADFTTLYRRSQSKRKNAQADGALKDSLEAKRLLKNLQRYDAPINLEVCDALYELNQLENAKAELHDNTRLFTGNKTKMFEQRLVVVDENIEDACGPSMTQYISDKEKLIVHLKEVQNKYKPDTRPLWKILKEQEKCDVLSIPEIEKYDEIKSFLKILEARSPMYNIRYQKFTNKKLMDKFRQEYLFRVQYQTRRNMISALRSIRYLRKTKSLTKLTSYVEEVMGDYVVKKTNRIMPWKFEFINEVYNILALAYVDQYTLPKNFRFSEKNALLRLLRFPMDKSKEVKHFVFGDRTTHQGSETVDPALTKSR

SEQ ID NO: 17002 - DNA, 2395 bp, DROSOPHILA
gctcttatttgcatgcaacatggaatggaaatgaatgatggcgaaggtgggcaaatggggacagcaacaagctgcatgtgtgtaaatccatttatgctccagcgcatttatagccaatttaaaagcccaaagagctgcactttccgagaccgtcggcgcatagtggtggccactggtggccactgttggctactggtatctactggtggccactggtggccactggtgggcggataatgatagttggccactggccgtttggatatatcatttacagggcgcttcacttggaaaaaaaggggggggaagcaggcagttggcagtgttgatttgtggtaaatgactttccacgacatccatcccctccaaagcccgccttgagctgcacactttgtgtcctggcaacatgtcctgctcctggtgctggtcctcggcattccatttgcattgcgggccatttaattgcgcagttggcgcatgttttacgaccaatatgcataacatggcatccacattcgacatccgaaagtcggtaggatggcaataaaaaagaaaaaaaaaacgtgccgcatacttttctgcgcaagcagcgtcgaatatccttgttccaaagcccattaaagcaccgattcattcgcagaactatgcaaaattacgcttatcgagccccaagaaaaaaaaataaacgcaaatgaagatgggataaagcccactagttgcttgttcttccctttatcaaacctacacacacaattcttccttcacaaaaaatcaatgcttcttacaagaataaaaaaataataaaaccatatcccacattttctgaaaattttgccaatgtgtaattgcaaaagttgccactttggttaactaattcggtttagttatgttgcataaaatctaaatcaatctaaaaccttttcttaaagaatatatttatatattatatttttcgtttaggattctaaattaatattttaatataaaatattttcaatactcactggttcaggttgcgctcgttggaaccggactgactctgaacgttctccgtgtggcgccgctccttgtggacgatgcccatcagcttcatccatggattgttctgggagccatggcctcccatgccgccactctgccacatggtcatcttggcggctgtttcccaaatccggttccgatcgaagaaactgtggcagtggcagcagccgctctagctttccaacgaaaccgaaacgaaaatggacgcgaatacggaaacggaaacgcactcgcgacttggaacttcagatcagatatatatgtatatactatacaaatatatatagaggacagatgccacagggcaagagttgaaactgagttgtttctgggttcggcagccgcatcaataggttttttatctttctttttttttcagtttgaacgcctcacatttgtcatagccgagagtttggttttggttgttggatggaattgaactaagagtttttggctaatgctttccagtttctttgggcggctaatgttgcttctcgcttttgctttgcttctctcttgctttcgctttgctttttggtcgtgttgtgctgcttttctatttgtgagcaacgattccctttgaattgctgttggtttcttggcctatgtctaaaattaataatcacaatgggcgtagaactaatcctttatttcgatatttttgggtcttctgtttgttaaccaatttttaatgctaattattgttgggtctctctgctttgtttgtcctttcttgctttatttgcaatttccgtataggttcgttaaatttagtatgcaaaaattcctcttcttgtatattttgtcttctagctaaattttgctggccaaagattctatcgaatgaaaatgtccgattattgatataatttatgatttttgatagaaggtcgcagtaggtcgacaattgaatatccgatactctttaatttaaatggaagctagtcaggttatttgatcaattatgaaaaccgaaaaatggtttcatgttaaaaacgggatggatataaaatggatttggaagaagcctaatcgctatagcttgtatcgtcatatttcgggtatttcgcaatatcgtacaatttatttacaatgtatccgtaggtatgtacaacatttgttccaattacgacatttactattattctttgcttttacgattgctttttgtttgaaattttagttgtagttgttgctgatatatagtgcatagggcaggaaggcgattaaacgacgatatgaagaattacgtgcacgggcagctggaaatatgatataaattgaaaccacaaattagatataattgaatatatttacaaaattaatagtatataatgctaaatctctcttaaag

SEQ ID NO: 17003 - DNA, 395 bp, DROSOPHILA
cctattgatgcggctgccgaacccagaaacaactcagtttcaactcttgccctgtggcatctgtcctctatatatatttgtatagtatatacatatatatctgatctgaagttccaagtcgcgagtgcgtttccgtttccgtattcgcgtccattttcgtttcggtttcgttggaaagctagagcggctgctgccactgccacagtttcttcgatcggaaccggatttgggaaacagccgccaagatgaccatgtggcagagtggcggcatgggaggccatggctcccagaacaatccatggatgaagctgatgggcatcgtccacaaggagcggcgccacacggagaacgttcagagtcagtccggttccaacgagcgcaacctgaaccagtga

SEQ ID NO: 17004 - protein, 49 aa, DROSOPHILA
MTMWQSGGMGGHGSQNNPWMKLMGIVHKERRHTENVQSQSGSNERNLNQ

SEQ ID NO: 17005 - DNA, 7036 bp, DROSOPHILA
actaaatcccctaatgttttgcttaatagctcgactattaaaaaatcgttactgcagatcgctactctttgcctctttggaaaattccacaaaattccaagtgattactaactaaacaactttcctaagcccggctaaaagggctaaatttatacaacaattgaaacagcaaacacactgcagcatttgcaaacttaatctataaacgtaaagttatcaaatatatgaaaatacatttggcttctctgattatttatgcccaacattcagctttgggttaagcttcccagccagcagctcgcttctaacacttgcaaaatattgcgtctgcctgtgcgtcatttttcaattttccccgctggtgcacctggcaaatggaaaagccgagaaaaactgagcgagaaaacggaggaaaatatcctaataagaaagctaacatatgcagctgcgttggtatgcatgtgtgtgtgtgtgtgtgagtgggtgcgcaatcaataagatgaggagcggaaaaaccacaaggaaatccttctgcggcttaaaggaattttcccattccaattttatgtctgctgcgggcgaataaaatcacaattttatctaaggcatgtcgcataataatcgtagcaaagccaaagtttgaaatatttgaatcgcctaacaaagcccaaaagttcatatcctttcatatttaatagtaattggtatcagttgaaaattcgcagtcgagttgtccaaatgtttttttattcgctttaaccaaacaatatttttaacacctttctgggctttagaacaaatttcgctgaaccgaaaagtgaacatgcaaacagacataatctcctgttggccaactattccatttgtgtaataccacattaaattgtatgtgattgttattgttgtttcattaaagctctctggcttaagagagaaacttctgctttcgaattgaaagtatatactctatatatacatattgtttttcagagtttaaaacctattatttgtaaaacattagacttacctcgatacaaaattggcagccgcactgctgaagcgccatggcctcgcccacgtcctccacatcgatcaggcacagcttgcacgtgaagggcttgaaagcggtggtgggcgtggccggggtgcccaccgaaggtgtgacatcggcggaggccaacatctctcgtcgcttcagtgcaatcccatcacgaacgcagcatgcctgcgccgcctgattcgcactggccatggagagcagggagcttacggtcaatggatatgcatgattggtaccgaacggtcccaattcgccgctcccaggtgtctcagtgggcgtggtggcgggcgtcgacgtggactgctgcggttcctgattcagattattggcggaactggagtgcaatgtggccgtggtcacattggacggcggactgggactggtcgagttggcagttgctccaccgctcagtctgatctgggcattcacgttgatatgcggctcctgcgcgcgccgttgatcgtcctcccatccagcttctaggtgattgagggccgaagttggccggggcgcaaatccattcgacagggagtaacgcgatccggaggcagccagggataacagactggagcagcgcgaacaggtacccacgccgttaatgctgctcacgctgttccgcaggcgattcagtggtcgaatctgctccacgccacccgagctgaagatcccgctgccatggaccgccaaggagtgaccctgacttcgactctggctcaagccgtgaacgtggccatgcgattgcgattgacgggtgagtgctaggaccgtttcgcactttcgcagtcccgtgtactggacaatcgactgggacttctcctggtgcaagctgctagcgctaccctcgcgtcgcatgatatgccatatcttctgctggaccacattcaaggagctgctcgaaccgctgatgctcaggctgcctcgaccatggccgttggctagctgtcggccagaaggatctcgcagcacgacatcctgctcggatggagtgcgggtgatccgaatttctggggaggcaggacgttcccgatctggtactgccccgcccccaccaacattgccaccaccacctcctccgcgaccgctactcgccttgagtcccaccagcgatttgagaaagttctcgatgcgacgccttcgtggcaattgcccaccaccagatagtcccagcgagctctccagatctcctcctccgttcgctgccagtactccgccgtttccagatcctccgcccccgcctccaccgaatccaactcctgcacccgctccgccagcgtcaccattcgccgaggaaatgatgatcttgctgcgcgtctgcgtgtccagcagcgcaaccgtctcggcgtcggcggaatcgtgggcgcgatcgtggcggggcgtggcatgcagggcggtggatgccttttggctggcggaccgctggtgctgctttgtgttggccagattgtggattggcgaggagtcctgcgaatgaatttaatgcataagttggtggatttgtaacactaaactttgatttgtttgtctctaaagacgtttttataaactaaaaccagttaaaggtaacgaatataacaaagagtgcacccacccgcgagtcctgctccagctcctcctcgagcgcactgtagacgggcgcgtaccaggagtaggagagctgcttgcgggcagacggagccgccgctcccgctccaccggcaacaacgacgttcgccgtgggtggtgccgtgtggcccgctccgtggtgctgatgctgctgcttgagcggcacaagtttggctgctccaccgggacctcctgccccacctgctgatggagcggtggtcaccagattgttgttgtagctaagaggtagactgcgcctctggtggtgtcctctagttggcggtaggtgcttggtcggcttcctgcccactccgtacaaactgctatggtgcggacgccgttgctgctgctggtgctgctgattattgtgctgatgatgatgttccctggttccctggttaagttccttcttcgtgaagatcagcgaggcactgttcttgttcagccttatggagcgctgcttatccaccaccgtggcctcgatgtgggtgagcaggggcacagtctccgacagtggcagcaaatgctgcgaggtggccgactccgaggggaaattgatcacgaagttctcggcggcgtcatcaaagatattggccctggcagcactaacgcaatcctcgctggacgagggactgctgagggaacttctcttggatcggttttgattgtgactctggtgcttgaggtccttggcgtgctgctggtagctgctgtagctaatcttgttctccaccagcagttccagcggtggcagtttggcgttatggttgtgtggactccgatcctggtgtatatccgaaggatttgagggcgtggcatgcaagtgcagctgttgcaccggatgcacttcagtcggctgcaaacccgtcgacgcttgcatcgatggcatcgccattggtggccgcattctggcccagattgcgctcgatcagggggcttctggcgattgatgtgctcagcttaaccgtggctggcgacggcagcgtcatgttgacgaaggcctattggaaattaattaagtctgtaagtattggtgttttggtacttaaaataatatattaaactagaaaaagttaaaaggaattcctaataatttaagtgttctactagctctttaggcgaatctgacaagttaagcctagccttaaataggaactttcgccacaaagttatatttatatgaaaccaatgtacccttctgccaggaagcgagcttctacccccccacaaaaagcggtagctacctctacgaatttcatccaattgccagcagctgcaaccgcatttgcattttccgatttattggatttatagcaattggccgaaagggaatcgaatcggggctttgtattccgattagaattgggcattgtgcacggctttcccttcggatttaatttgcctgaatatgaattttcctttttggcagctggcatagaggagttagggggaaaccaggtaatcgatggatcacaattaacgtgacgcctgaattgaatctcctgctaatgcgaatgaatataatttgattgtgagtctcataaccgcattaagtggctttcaatgtagctcgcctccaatcgggcgaatgatttgattgagcattcgcatccatcatggtgggaaaaactcctggggcctattgctatttgccacggtatccatgtgcccagcgccgctaatccagccaatttaatgccaattaattggcagaaactctacatcagaaatttgcattgcgatgcaacaaacaaggaaaccaatttcaattcgcaaactcctccctaggcaaacagagttaaatcgaaaacgaagcgggcaacagcggagggaaagtctctggaggatctgcctctccatttgcatccagtcaattaagtttaattccactttgagcccgaatcaggtggcgctgccagtgcgcctaaaaatataccccatggccggcaaattgataaataataaatcgaaaaattgcattttcggtaattgaaataaatgttcttgcgctttttcgctctgaatggcaaagaatgccatttagatttttaaattgaaattgtgacaaaaatatacacttttaataatttctttcgttttggtcacactggtttctttctgttcacttgcccccggcttggccacactgtttcgctgaactcggtggcaacctgcaggaattttccattaatttcgacttaattacggtggcagcagaaacagaagccgcagctgactcaagctgcacatgccactccgccattcgaggtatgtggctatattaatttttggcatgcctgcgcctagccactccccctgccgcccctttttgtcgccacatcctcccgcatcagcgcaacgcaacgaagtatgcaacgaaaaaatgcgaattacgcataattgtgggacgcaacagagaagctgtattacaccgagagaaaagttgttaaagagataaagtacacttaagaatcaaaggattttgattcaaaggaattgattcaattcaattaaaatttaagtataacatattttgtattagtataacatataaatattattgaaatttaggaatgcaaaagaagtgtcagcatgctactaagatatttcttgctgtgtatttttactttcccatgcaggatgcgcgaagcgaaggagagaagccacaagccgcagcgcttgaaaaaagcgaaagataaattgcttgcccacgcccacataagcgttgctacaaggacaagtcaaaggacgaggttcggggtgtggcggcaggcggtgggcggtggtggggcggacatctacaagacacatttgccgccgggctcacatcgactgcccggattctgcaggcaaaattaatcgtctctggcgcactttgtgaattcccgaaatttgtcccttgtacatttacacttaacgccatttaggcacagggcgagggggcgggggttcaggcagaagtcaatgccgaaccgaagattgatggaagtcccaaatgcaaaaccgacaattgttttccagctcattcagcctgcatccggtgctaattatatctacgagatacattctgtcaagtcatcccgtcatgacatgcaatgaaacttcatctccaacgcaaaaatctggcaatcaagtcgcaaatcccgcacaacaaatggggttttgtttcatcatcgccacaacagaccaactaattgacatacgtccaaattggccaaatcggaattaatgaagagccgactgaacgagcgacaaaaacactgaattatttcagtcaattaccgctggcaatcaataaacagaccataccgaaacttaccataattcaaatggccagaaaatgcactagaacgaccgaatttctcgttgaacctgaaaagagtagtaattaaaatttggtttaaaaactgaaatatttataagatattcgcatttcaaagagcactatagttagggttgacctaaatttatgacttaaatatgcaccattttgtataacaaagcaaatgagcccatgaaaaaaaaaactcccgccagtcaggaaattaatttgacacgtaaatgtttgccctaaataatttggtattgggatttatttatttttagaaggatattaatatgacggctttattagaataggcttgttatctacaagcgagaatattacgagcttttggatttatatacaattttgtattatatgttattactatcggatagcgtcatctacagatctaagtaaagaaaaaaatgcatgttaatcatgaataagtataataagtacaagcatgtaattaaattttggatccaacatcgctagtaatgacttttcttttgctttttccggtacccaacattgaaagttacttcgcttcaaagcctcaattaattgttattagaccggcccctaatttaagttaacaaccttttggccatcatcagtggttggctaaaagggaattttaattggctgtctgtcgttgtgtgctaacgggtgtgggtgtgtgtgtgtgtgtttgtgtatgcttaagcggctaattagactcgcgaccctccaacaaaaccggaggcatacatatatgaccacttggctcggggttaagcctggccaagtggtcatacgtgcaactatacaagtgctcccatatgtagccatattcatatatataaattatatgaagacacccaggttgccctgagaattgtgctatgctttgtctacacacccacacactcggggcgaaactaagttaattgtaattgcagcctgctcatgacataactaacagttggctgacagcttttccatcgattatcgacgaagccaagaaaagtcagggacacaagtcaccgattcatttatcaagtttcaac

SEQ ID NO: 17006 - DNA, 2514 bp, DROSOPHILA
aggttcaacgagaaattcggtcgttctagtgcattttctggccatttgaattatggccttcgtcaacatgacgctgccgtcgccagccacggttaagctgagcacatcaatcgccagaagccccctgatcgagcgcaatctgggccagaatgcggccaccaatggcgatgccatcgatgcaagcgtcgacgggtttgcagccgactgaagtgcatccggtgcaacagctgcacttgcatgccacgccctcaaatccttcggatatacaccaggatcggagtccacacaaccataacgccaaactgccaccgctggaactgctggtggagaacaagattagctacagcagctaccagcagcacgccaaggacctcaagcaccagagtcacaatcaaaaccgatccaagagaagttccctcagcagtccctcgtccagcgaggattgcgttagtgctgccagggccaatatctttgatgacgccgccgagaacttcgtgatcaatttcccctcggagtcggccacctcgcagcatttgctgccactgtcggagactgtgcccctgctcacccacatcgaggccacggtggtggataagcagcgctccataaggctgaacaagaacagtgcctcgctgatcttcacgaagaaggaacttaaccagggaaccagggaacatcatcatcagcacaataatcagcagcaccagcagcagcaacggcgtccgcaccatagcagtttgtacggagtgggcaggaagccgaccaagcacctaccgccaactagaggacaccaccagaggcgcagtctacctcttagctacaacaacaatctggtgaccaccgctccatcagcaggtggggcaggaggtcccggtggagcagccaaacttgtgccgctcaagcagcagcatcagcaccacggagcgggccacacggcaccacccacggcgaacgtcgttgttgccggtggagcgggagcggcggctccgtctgcccgcaagcagctctcctactcctggtacgcgcccgtctacagtgcgctcgaggaggagctggagcaggactcgcgggactcctcgccaatccacaatctggccaacacaaagcagcaccagcggtccgccagccaaaaggcatccaccgccctgcatgccacgccccgccacgatcgcgcccacgattccgccgacgccgagacggttgcgctgctggacacgcagacgcgcagcaagatcatcatttcctcggcgaatggtgacgctggcggagcgggtgcaggagttggattcggtggaggcgggggcggaggatctggaaacggcggagtactggcagcgaacggaggaggagatctggagagctcgctgggactatctggtggtgggcaattgccacgaaggcgtcgcatcgagaactttctcaaatcgctggtgggactcaaggcgagtagcggtcgcggaggaggtggtggtggcaatgttggatgtcgtgctgcgagatccttctggccgacagctagccaacggccatggtcgaggcagcctgagcatcagcggttcgagcagctccttgaatgtggtccagcagaagatatggcatatcatgcgacgcgagggtagcgctagcagcttgcaccaggagaagtcccagtcgattgtccagtacacgggactgcgaaagtgcgaaacggtcctagcactcacccgtcaatcgcaatcgcatggccacgttcacggcttgagccagagtcgaagtcagggtcactccttggcggtccatggcagcgggatcttcagctcgggtggcgtggagcagattcgaccactgaatcgcctgcggaacagcgtgagcagcattaacggcgtgggtacctgttcgcgctgctccagtctgttatccctggctgcctccggatcgcgttactccctgtcgaatggatttgcgccccggccaacttcggccctcaatcacctagaagctggatgggaggacgatcaacggcgcgcgcaggagccgcatatcaacgtgaatgcccagatcagactgagcggtggagcaactgccaactcgaccagtcccagtccgccgtccaatgtgaccacggccacattgcactccagttccgccaataatctgaatcaggaaccgcagcagtccacgtcgacgcccgccaccacgcccactgagacacctgggagcggcgaattgggaccgttcggtaccaatcatgcatatccattgaccgtaagctccctgctctccatggccagtgcgaatcaggcggcgcaggcatgctgcgttcgtgatgggattgcactgaagcgacgagagatgttggcctccgccgatgtcacaccttcggtgggcaccccggccacgcccaccaccgctttcaagcccttcacgtgcaagctgtgcctgatcgatgtggaggacgtgggcgaggccatggcgcttcagcagtgcggctgccaattttgtatcgaggtaagtctaatgttttacaaataatag

SEQ ID NO: 17007 - protein, 480 aa, DROSOPHILA
MQASTGLQPTEVHPVQQLHLHATPSNPSDIHQDRSPHNHNAKLPPLELLVENKISYSSYQQHAKDLKHQSHNQNRSKRSSLSSPSSSEDCVSAARANIFDDAAENFVINFPSESATSQHLLPLSETVPLLTHIEATVVDKQRSIRLNKNSASLIFTKKELNQGTREHHHQHNNQQHQQQQRRPHHSSLYGVGRKPTKHLPPTRGHHQRRSLPLSYNNNLVTTAPSAGGAGGPGGAAKLVPLKQQHQHHGAGHTAPPTANVVVAGGAGAAAPSARKQLSYSWYAPVYSALEEELEQDSRDSSPIHNLANTKQHQRSASQKASTALHATPRHDRAHDSADAETVALLDTQTRSKIIISSANGDAGGAGAGVGFGGGGGGGSGNGGVLAANGGGDLESSLGLSGGGQLPRRRRIENFLKSLVGLKASSGRGGGGGGNVGCRAARSFWPTASQRPWSRQPEHQRFEQLLECGPAEDMAYHATRG

SEQ ID NO: 17008 - DNA, 2833 bp, DROSOPHILA
cataaaagttaactatttccgacggaccagcccggctggctatagctgaaaactgaaaaatcccgagcggcaagagctgagaatgtgtgggaaaaagtttccatttttgttgcccattgcggtgatcatacgatgggaggtgcaatggaaatggagtgggcccacagagccaacccctgacaaacagcggatgtgacgacgactggccacgcccactctgactgacagaaggcgcctttgcagtcgcagtggaagtctcagtcgaagactcaggcgctatcgtctggccatggccataaattaaagccaacaaaccaagtgcggaagcagattcactagagggaaatgggggaaagcggacaagtggactttcagccattacatcttgccatgggaatgagaatgggtatgggaaagggactgagcctggaactgtgaccaaacggaagcgcaagctgagctgctaagtagcctcgagcttcgctggctaacgatcaacttgtccagtcggagaaaactcagacatctccttaagggcatctaattcttttccccacaggcatacaaattgtcgccttgaaacattgtacttgtagtcccaaacatttcttgggttttagtaagcaaacaattgttttacaaaacatataaatacaataaaagtaaattaataatgtatatttttgattaagtgatgtaatccagatcatatgcaagactattcgtccatataaatacatatgatatgacttgatttttttttttttttggcagtgagctgcccagcaagttattaagaaccagatcaccaatttttttataagcttacgaacagcttttggaagtgcttcaggcacccaccgttttctgggaaaattcgcatttttgctgtattttatataacgaggtatcttatcgctaatcaatcacaagtagttcttaataattttgcgataattagcactacattagccgttaattcgatttaattcagtcaaaaatgattcgtgtctggtttcagttgttcctgctgggcactctgtgctctggcatattcccagccccctttaatacccattatgatgaaacagatccagagctgactgcaggatacttccagggtgatatggatgtggactacgcccggaatggacagctatccgagacacgacgctggccaaacgccacagttccgtataggatatctgaggagtttggtaagatacgcattggatggttaatttccaaaactaattttatttacaattttacttttcagatgctcctcatgtggaatatataaagcttggcatgcaattcatcgagtattcgtcttgtattcgatttgtgcctgctgatgaggatgaggaaaactatctttttgtgcttccgtccacttcaggatgcagctccaaagtgggctatcagccaggtgaaagaactgtcaaactaaagcctggctcattggatacaggttgctttaagctgggcaccatccaacacgaactgctccacactttgggattccaccatcagcagtgctccccgaatcgagatgagttcgtaaagatcgtggaggagaacatttccgagggtcacgagaagaactttgtcaagtacgaagaagacgaggtgggggatttcgatcagccgtatgactatggaagcattctacactacagttccttggcattttctataaatggggaagcgacaattgtggctctgaatccagagggtcaggagcaaatgggacagcgcttgatgatgagtgacaccgatgtcaaacgacttaataccatgtacaagtgtccgattcaattgtaaaaatagcaataaacttgaaggtcaaaaaggcctataaattttaaaaactttttgactttttttcagttttatacaataaaattctcagtcattgacttatgctccggctttttttatcatttggcctgactacggaaattataggcactaaaataagagattatttaacactcgattctgcaagcgtgttaactgattaatttcatcgcttagattaaacaaataagtatatataaacatcaagaaaagtatccaaaaagttgatgataaggaaatggcaagcaactaatttaacccaaattttatagctctgcattttccaaacaaatgaaagtccgaaacttggcgctctttcatcgaaacacgaacatagccgcatcagctgattagataataaaaaaaaacgcttatcttatctgcagtggaagtgtagagcacaagccgagcacattcataatcggatgaaattcgttctttaatattttgacggaacccagtaaatgtaaggtaactcaccattggaaagcagctcaactgttagtcatgaagtaagtggagagacgagttttgaacactcagtcagtccagaactaccaagcattcccaaaccaaccatctcgaaaatggcgatgaagtgtaattgagaaggttccttccagtcgttacgaatagtattcagcttatggctctgcaatgtgtcacaaaacccaaaatgtggttgggccttaagcagatacttctctatgtaggcctgttgctctgcgttcttctgcaggtctgcagaagcaagacccagtcgcagatgttttgccccactgtttgccactgtgatctacacgcccagcgcaatcgcgcagtatgcaggtgagttgtcatcggatttggggaattatttcggttgagttatattatatatatttctttgtgcagcgcaaagcgcttgataagcgccaatatagaaatacctacaacggttgagctgttggacctgagctacaatgatata

SEQ ID NO: 17009 - DNA, 771 bp, DROSOPHILA
atgattcgtgtctggtttcagttgttcctgctgggcactctgtgctctggcatattcccagccccctttaatacccattatgatgaaacagatccagagctgactgcaggatacttccagggtgatatggatgtggactacgcccggaatggacagctatccgagacacgacgctggccaaacgccacagttccgtataggatatctgaggagtttgatgctcctcatgtggaatatataaagcttggcatgcaattcatcgagtattcgtcttgtattcgatttgtgcctgctgatgaggatgaggaaaactatctttttgtgcttccgtccacttcaggatgcagctccaaagtgggctatcagccaggtgaaagaactgtcaaactaaagcctggctcattggatacaggttgctttaagctgggcaccatccaacacgaactgctccacactttgggattccaccatcagcagtgctccccgaatcgagatgagttcgtaaagatcgtggaggagaacatttccgagggtcacgagaagaactttgtcaagtacgaagaagacgaggtgggggatttcgatcagccgtatgactatggaagcattctacactacagttccttggcattttctataaatggggaagcgacaattgtggctctgaatccagagggtcaggagcaaatgggacagcgcttgatgatgagtgacaccgatgtcaaacgacttaataccatgtacaagtgtccgattcaattgtaaaaatag

SEQ ID NO: 17010 - protein, 254 aa, DROSOPHILA
MIRVWFQLFLLGTLCSGIFPAPFNTHYDETDPELTAGYFQGDMDVDYARNGQLSETRRWPNATVPYRISEEFDAPHVEYIKLGMQFIEYSSCIRFVPADEDEENYLFVLPSTSGCSSKVGYQPGERTVKLKPGSLDTGCFKLGTIQHELLHTLGFHHQQCSPNRDEFVKIVEENISEGHEKNFVKYEEDEVGDFDQPYDYGSILHYSSLAFSINGEATIVALNPEGQEQMGQRLMMSDTDVKRLNTMYKCPIQL

SEQ ID NO: 17011 - DNA, 2797 bp, DROSOPHILA
tgaaactgagtagttggaactgcgacctaaataaaaataagggtattaaaaagcgaacattcttcaataatgttattgtttggctttgactatgtggcaacaccgttagctgcggcaacagctgatcgttttcagagtttaataaacgtgcaagctgaacaatacaatcggaaataagtgtttctaaacagaatacaataaattaagcatttataatggcaggccgcggaaggggcggcaagacaggcaccctcacggcggagcaaatggccatgttgggatgcacaaaggatatgccggtgcagacggcgccgccacctacatttccgcctgttttgaacagacccactaccctagaagtgggtacaaatccatttacattagtttaaaaaacatcgatcaactttttacctgttttacttcgatagacaacagccacacagaactatcagctcctgtggaaggaggactttctgaaccgaatgcgagattccccctattacatgatctccgccagtcgggacgcaaaaaaccttgatcacaaggactggcgagaagtaataatactggctattttaaattagctgcttataatcctgcttttacacccccagaaagccatggagcgcatgaagctcacagcacaacccgattttaactacaaagccatgccccaagagctaaacatctccagtcgaaaacgtcgtggagcagatgcaaggccgaatctgctgaccaagaagacaaacatcgaggacagactgaaggttctggagcagaaagaactgaaatcaggtggcggtgagcaggacgagaacaaacaagagtccgattccgaacaggaggaggaggaagatccggaggcggcgttggatgatgagatggacgaggacaacgactacggtgcaacgtactttgataatggagaagccttcaatgatgaggacgacaacttggacgatggtcccgtttactgagacaaataaaaccatcgaactgattactttcggatctgtgatttactatgtcgccactttaagcttatttaacacaaatgttggattaatttacacgtaagggaacgctggcttagtccaggctcttgggcgcgtagtagttgaagtggatgataccagaagatttcacctgcaaagcgtatttcaataagaccgatatgggatggaaggaatatggcagccacttacgaatccaatagtgccggccaggacgagaatgccagtgatgagcgcggcattgtacttggcgttcttctggctgtgctgctccttccagtctccagcgggcacgggcagatcgttcatggtggagtggggaccatgtccaccgtggtaagcggcacgcgacaaagcgccagctgaaatgagagaacaagaaagaatattcaagtgattggttttaaaaagggggtaatcccaacgaaatgcaacttggttaatgatctcatccaagtttcttccgatatctgtttggctaattctgataatatccatggctatgctgaagattggtgggtgaaccattccttcgcagttccttgaagtttctccctttgcttatccacattatgtaatttttaaggttagcagttttgctgaaaagaggtgttgggccactccaactcaccgttcttgagcagaagcccctgcttgacaatgtgcttaaccaacatgattgctcgaaagtagctggaaatgggtaaatatgggtttattttcactgccaatactttttcgcattataactcacccgaagattaccttgtgttgaacagtgtgaccgttgtgttgttatagaataatatctaccctacagttgggatgagatcacgagctgcatacttgttattacctacgatgcgatgaaaccttcaatgtatctattatactgaaatgtttaaataacaatatgatttaatacattttaattggtttctgtagtcttagcatatttttgctatgtgacttttaaccacgtaaagaacactcacgcaatgcgctcatccccaaccgatagtctgtaaacgcctctgcagaagctctgttaaatcagctgttggtgcggaggcgttctccaattgctaattgcaagtgcaaacaactggccagttgttgattcttgaaaggactttattcgagaccagtgcatcccgaagatatacccagccatgctgtccattggcgctatggccaacatcaagcacacgctgcagaaggaactcttcttggcctccggagaacgcctcctttctgtggtgacggtggtcaagaagaaggacaagaagccgtgctacctttgcgttgtcaccacggcgccaccggtacccgtggtcactttgtgcctgatcaaacagtcggagcagcgcgagggcgaatacaagcgcaagcggagctggcagctggacgagattaagtgggttgacggccggaacgagcagttcgagacgcacgagttcgatctgcagttggaaaagctgtacaaatggtacgcccttaaccctcacgagcgccaaaactttctggccgtgctcaatcgccaaatccaaaaaagcgtgcgtggccagcgggcggaattccggaatgtgcccgcagcgtggttgtcggagaagtcgccggaaaaggtggcattgggcagagcggttcagaagacgcaacacatggacgacgaggaggacgaagaggaggaggcccaggagtttaccgctctgacggacaaagaggccaatgagctgggcaaacttttctccgagtgcgacttcgccattaaagatgctgagcag

SEQ ID NO: 17012 - DNA, 408 bp, DROSOPHILA
tcacactgttcaacacaaggtaatcttcggctactttcgagcaatcatgttggttaagcacattgtcaagcaggggcttctgctcaagaacgctggcgctttgtcgcgtgccgcttaccacggtggacatggtccccactccaccatgaacgatctgcccgtgcccgctggagactggaaggagcagcacagccagaagaacgccaagtacaatgccgcgctcatcactggcattctcgtcctggccggcactattggattcgtgaaatcttctggtatcatccacttcaactactacgcgcccaagagcctggactaagccagcgttcccttacgtgtaaattaatccaacatttgtgttaaataagcttaaagtggcgacatagtaaatcacagatccgaaagtaa

SEQ ID NO: 17013 - protein, 90 aa, DROSOPHILA
MLVKHIVKQGLLLKNAGALSRAAYHGGHGPHSTMNDLPVPAGDWKEQHSQKNAKYNAALITGILVLAGTIGFVKSSGIIHFNYYAPKSLD

SEQ ID NO: 17014 - DNA, 2713 bp, DROSOPHILA
ttcggttacattgataacaaaatgttgctaatccatattagatattttactttacccagtaaacaaacaaatattcaatgctcaccccatttaagcaaccattaatgtaaaattttgcacacaaatgtaaatcaaaagagtcgaggggatagaaaaaaaaaagcagagagaggccgataaacgaggagatgggcaaatagaaaagtccaaattgagggggggggagggaggccaaaacacggagagccagccagtcagccagccagcgcgcttagggtaagaaatatattataggaaaaatccaccctcggggggccgcagcaacgttgaaaactgcacaaaggcacaaaaccatgaaggacagctagctgagacccgggactgaggttctgaatcgaaatgagtacgaggatgttgacgttgcccgctgcacaaaacatcaacatcaacagcagcaacacaatcaaaagggttacagaatcaaaggcctaagcagaaggttgctgaacccacggcgagaccgtgacataaaatcgcacagcaaagtaacgacgctgcagataccctttcttcgaatagaacaaagactttttcaagtcaaagaacaactgtttaatctttagatatttgaattataaaagtacattgacaggagggtattaacatttggattcgaagtcggtcttacaactttttaaccgaatgtgtttataatgaaatcatttacaaattatcattacatgaattctttaaggggcacaagcatataataggatatgacgttaatacacccttttctgcattctataccacctattgtcttataattctcaaatataattgcccatttcggcgggatgtctttggacaaccagcaaaacaacccgaaaataaccatgcttgctaaaccaagaaaaaatttgattgtaccaatactatggcaacacccttcgcccataatctggattattgcactgagatatagaatcattatacttaccagacaactccgaatgctccatagccgataggacgatccggctgaacatcctggggaacagccggcggttgatagtagggagccgctgcggccaagattgcgctggcgccctgtggcgcaccaccggcagcaccaccctgtaccagtgacatcgaaacgctcattgatggactacgcggcaagttttccaaataattcgagcagctgcacccggttctggtatttgttggcgatggagctcagtggttgtggtcctgctaggctgtggcttttactggtggtggtggtggtttcgactgggtcttggactgtggttctgattcccaaagctgtgacggcggtggtgactgaggtggttgaggtgatggtgttgctggaagtggtgcttgatttgatgtgggagaaatggtgttgattgctcaatggatgccgctggggccaactgatggccgccattcaattgttggccatttgttgctgtttgccttggcgtgctcctctattcagcgctatttgtttcgctgcgtgtcgcttgttacacttcttacttatttaaattagatttgaggacattgtgatgaaaattttcatgcttgaagaagcacagcattttcagctcgcgaaaaacgcgcttcgatgagaccaacgattggaacacatttggcagcttcttcaatgccactcgtcgtccatcgcgaggatctgtgacggccctggaaaatatgaaaaatattgattatgaataaaagcaatgcaacaaaatagtataaagtctaagaataagtttgccttctttctccattgttacatatcagctttgctgttgtgcaaatattcttgtgcttttcattgcagctaaagttaatcttcaacttcttgttcgccgctcaagtgtcgcattataaacagaccttaatggagaattcttgagcacgccagccctggcataaatgtcattttatcctgtcgaccagacaaagcacagtgaaaatcagacagaaccggcgaaagcaaacaaacattcgatggagtttaaaaggttcgttcaactttttgccttgacaatgccagagttatttttcttcttttgttttccagtccagcagaaccaccccccttccccctctcggaaaatagcttttctctattcgagcctacgaaatggcgcctagaagtaggcaaatgtgtattgtctcgcaattgataggcgcacacaaacacacacacacagtaatggccacaaaattagcaatacgaaaatttgcgaaaaaaggtcaaacagcagacatgtgggttgggtttcacttggtctggtgcagaaattgaggagaattaatcgagtggtgtttgctgtgtcttcgaacaccgacgacacagaggcgtcgttttggctttcggacaacttttataatgccattggccatagctgttggggtgttcgatgttagtcagcgcgtcctgttctgtctggggccaagtccttgtcctctgtctgcccgactcctttttggagcattatacacagccagaaaacgcggaaaactaaggttttgtttcatgttttttaagcctttttaccataatataactaactacttccatgtgtgtgttctatagtttgaaaatttatttttcctgtgtcctaatattttgccaagttttctacttttttcccatctttcagccttgtcctggtcgtggtgaaaaatattt

SEQ ID NO: 17015 - DNA, 2759 bp, DROSOPHILA
cggaacgtcgagcgcacgaattcggaattatcgttgaaacaaacgtcgccgcgtgtgatcgaaaatccaagttaggctcattcgttgggaagctgcgagttcactctctctcacacacacacgcacgaatattacccccggcgcgttttacttccatctcgctcccacaaaggcggaagagttaaacacaaaaaaaaaagaaaaatagaaaagaaattataaacgaaaaactgccaccgccgctgctcaataatttgtgcattttttaagtttcatcacaatgtcctcaaatctaatttaaataagtaagaagtgtaacaagcgacacgcagcgaaacaaatagcgctgaatagaggagcacgccaaggcaaacagcaacaaatggccaacaattgaatggcggccatcagttggccccagcggcatccattgagcaatcaacaccatttctcccacatcaaatcaagcaccacttccagcaacaccatcacctcaaccacctcagtcaccaccgccgtcacagctttgggaatcagaaccacagtccaagacccagtcgaaaccaccaccaccaccagtaaaagccacagcctagcaggaccacaaccactgagctccatcgccaacaaataccagaaccgggtgcagctgctcgaattatttggaaaacttgccgcgtagtccatcaatgagcgtttcgatgtcactggtacagggtggtgctgccggtggtgcgccacagggcgccagcgcaatcttggccgcagcggctccctactatcaaccgccggctgttccccaggatgttcagccggatcgtcctatcggctatggagcattcggagttgtctgggccgtcacagatcctcgcgatggacgacgagtggcattgaagaagctgccaaatgtgttccaatcgttggtctcatcgaagcgcgtttttcgcgagctgaaaatgctgtgcttcttcaagcatgaaaatgttctttcagctctggacattctacagccaccgcatttggatttctttcaagaaatctatgtgataacggagctgctgcaatcggatctgcacaagataatcgtgtcgccacagcacctgtccgccgaccacatcaaggtgttcctgtaccagatcctgcgcggcctcaaatatctgcactcggcccgcatcctgcatcgcgacatcaagccgggcaatctgctggtcaactcgaattgcgtgctcaagatctgtgactttggattggcccgcgtcgaggagccggatcaggccaagcacatgacccaagaggtggtcacccagtactatcgcgcaccggagattctgatgggcgctcgccactactcgtcggcggtggatgtatggtcggtgggctgcatttttggcgagctgctgggccgtcgcatcctcttccaggcacagaatcctgtgcagcagctggagctgattaccgagctgcttggcacgcccaccatggaggatatgcgtcacgcctgcgagggcgcccgcacccacatgttgcgccgggcgcccaagccgccatccttctcggtgctctacacactcagctcgcatgccacgcacgaggcggtgcacttgctctgccagatgctcgtcttcgatccggataagcgcatctccgtgacagatgccctggcgcatccgtatctggatgaggggcgtctgcgctatcactcgtgcatgtgcaaatgctgcttcactacctcagccggaatgcgtcagtatacggctgattttgagccctccgccggccagcccttcgatgatctgtgggaacgtaagctgacatccgtgcagcaggtcaaagaggagatgcacaagttcattgccgagcagctgcaaacgggtcgtgtgccgctgtgcatcaatccacagagtgcagccttcaagagtttcgccagaatgagaaaatctactactactaccactaccactactaccacaacaacttgcactgctgctcctgccgctgctccaatccgccgccgcctactgctgcgctgtcctcgagaaccgatccaggtccagatcgagatactaggcgcgcgatctcctctcactagaacgactcgatatagacacgcataagtcgccagatactatacgcaatctgccggccgattgattgacgaatgaaaatgataatgaaaacgaaagcgaaatcgaaatcgaaatcgaattgaaagcacagccaagataaagatacaataatacagatacagaaaatgaggcctcggggcggcaactgtctctctactccttcttagttcgactgtggcacatccttcggagctcccgccttcgcctcaccaatgggaatgacggcaaaatgaggcgattgctgcctaaaatcaaaacaaaagcaacacagccaaacgatagacacttgccgccgagaacatggaggagaggagtcgattcccagtccaaaaaatccctagaaaaccaccatccccatccgacgaaacccagagatgataactcagccaggaacaactattgaataatttttaagcgccaaacggcttttaagtgggcgtttgtctgtttgaaagtcaaagcattccaccaccgaaattaactaaaacaaaacaaaaacaattatttaataatactatagacaaacaaatatgtaacgtaactcaacggaaactagtctaaacaacaaaactgtagttaaagcagcagcggtatcgacgcaaaccagcaagttgaaagcaaacgaaaatgtta

SEQ ID NO: 17016 - protein, 474 aa, DROSOPHILA
MSVSMSLVQGGAAGGAPQGASAILAAAAPYYQPPAVPQDVQPDRPIGYGAFGVVWAVTDPRDGRRVALKKLPNVFQSLVSSKRVFRELKMLCFFKHENVLSALDILQPPHLDFFQEIYVITELLQSDLHKIIVSPQHLSADHIKVFLYQILRGLKYLHSARILHRDIKPGNLLVNSNCVLKICDFGLARVEEPDQAKHMTQEVVTQYYRAPEILMGARHYSSAVDVWSVGCIFGELLGRRILFQAQNPVQQLELITELLGTPTMEDMRHACEGARTHMLRRAPKPPSFSVLYTLSSHATHEAVHLLCQMLVFDPDKRISVTDALAHPYLDEGRLRYHSCMCKCCFTTSAGMRQYTADFEPSAGQPFDDLWERKLTSVQQVKEEMHKFIAEQLQTGRVPLCINPQSAAFKSFARMRKSTTTTTTTTTTTTCTAAPAAAPIRRRLLLRCPREPIQVQIEILGARSPLTRTTRYRHA

SEQ ID NO: 17017 - DNA, 3662 bp, DROSOPHILA
tacgaattgtttaattagaactccagtttcagttctcggtgttcaggttgcatccaaaggtctgcaaatcccgcgttgcctgcaacctctgcacgtttgtatcttttggttcttgctgcttttccctcgcttgtttggggctgcataatcttttctgtaaacatgaaactcgcgccattatatcgagccaacgttgagaatggaatggaatggtatggttgaggtatggctatgggtatgggtatggggctcagatcttggccagaacctggctgctttttacatgttcgcttgttttgtgccgtgtggcagcgatttgaaatttaaaatctgtgaatttgaagcagtttatcgagactcctcgtcctttcttaggtgttgtccccgattcgtttggccgattaaatcattaaatattccgattgtgtagcgttataatgaaatgtttttaacgcttgtctgacttggaattatgcagggaattaaaggatctcacccccccttggctatcttttatttgcgaagctaagaaacttctttttatgtggaacatgttggtctgttgtccccgataagcgaagatgttcctggcatttggcgtattcactgggtattgaaagataatactgtagacacagaggcttcacattttcatcaaataattgtcccataaagtttattaagaagttttaattatgtcactttttataaactcataagttgggtgttccttaagaatatatatagaaatattcagctagccaccggtaacaatattgaaaagcatagtgaatggttaaaaatgttttaaaggaacaaacaaatattttaaaatcactagaaaatgtttaatctaatttaaaattcaacagcccggcgataatcgataatctaatcgatcttctaatgtgtcttctgcgtaatcgatatgaatagatacgggcgaacagctgactcgttccatctttagcaagtacaggtactacctatatatcaacagattgtaaacgcggttaggtttcaaaagttatagtagttgtagttgttatgaaaagcaactatgtacctaataatcatcgccctgcttgcaagtgtatccgctttaggccgcccagacttggaggactactgcaatgattcctattgccatttacttggtcggagccggacgtttagcgataagaaggctaccaaactaaccgagttccacatggactcctgcgaaaagaaggtactcaaacttatgcccaatctgcgcaccctggagctggagaactgcgacagtccggacttcaccatgaacgacctgaatcaactgccgtacctaacaagccttcaattgcgacgtggaaatcttttggggctgcacgacgaacacttctcgaagtggccaaacatgaagatccttatgctgggggggaacaacataacgagactatccaatgaatgctttaaaggcctagctcagctctggctgctgtctctgccggggaatggtattcaaggtttgccatgggatgtatttcaaaacctaccagaacttctgcatctcgacctaagtggcaatagaatcgaaactcttcacgaaaacatttttacaggcgttcccaagctagagatgctgctactcaatgggaatcccttgacatggatagcgcctacgtctctaaaatctctaagtaacctacgccttttggacatgagcaactgtggaccgctgccggatctttcattgcccggtgcacataccttgatcctcgacaacagcggtgtgcagcgcctggacattttgggcagtgtccataaactccaggcgaggaaaaaccatataaccgagattaaattacccgacaaaagctctgttatcgaactggatttgcatagcaatttactgaccgctaccgatattcccaaacttctaacgggcatgtggcgactgcaacgactggatctatccgagaatatcatagggatatacgcagccgccggaagcgacaatacgagcgagctcttcatacttcccaatcttatgtatatgaacctatcggcaaatcgcctgacgcgtctgcacttcgattcgccaattccatgggaaaggcttactcatttggacgcttcgtacaatagaatatatgctcccgcaaaggttggcattgacgaagctttcaatcttcaaagtttgcatttggagggaaattatattaacaattttgaacttacaccctggaaacctcatccaagtctgaaagaggttgctctgtacgataataaattccagcctaagggctataaaaatattacaaagttcttcaatgaaattggagtaaacgtcttagagaaaacgcaatacagtcaatcaaacaacacgactccaacttgtaagccgtgcataccagatgccagagattttcctacgagtataagcgccgacacaaaccaaaccatagataccaaagttaatcctttaagcaacgacacttatcaatggaatgtatggaacgtactgatgctagtttccctgattgtttccttgttcgtaaactcttttctaatcgtgaaactcattcgtttgagaggaagaaaccagttcacgcaatcatcatcggtacctgccataatcgaaatgttttcaaacgaatctgatgatgaaattatcctgtaatataatcattctacttaacatgtatatatttaaacttttccttaaataataataaagaatctcttgagtttttcctaccatgcacatttaaataaccggctactcatttggatgtgcctacatgctgaatgatatatatatacaatatatactactataacgaataattgaaatgcatcaaatttaaacatcaattattacattttattttccagggccacatctattttgaacacaagcatttccccaatggtttgtaaacgtaggttgaaacatctcagtatatgtatctgaaatatgacggaattgattctgaattgccttatcaactaactgaacgaggcgaaagctttactttgttgctctcggcaaagctcccatgggtatttaaattacccactatcagcagtgagtaaagctccacccgctggtccacaaatccagatgataagaacatgatgctgttgccgcttcgatcggggctagtgcaatatttgcagtcgaacaaagcgcgagcaaagtgatacggaataacatgcatttttacaagtacattttactcggtatttgcggcttaacggtaagcgatgcacttgccgtgtacgatgcctccggacgctttaatctcagtgccagttgcccggattccttctgcagcttaagtgatcggccagtggcatactctgcgactccggctcttcagctccgggaattgcacttgagaaactgcagccggcaatcgatcacatggctggttctgcaacttacacctggtcttcgcaccttggttatccgcaactgtgccacctaccacattagcaaggagagtctgaggccagtggaaaatctaacctccctgcagatgcagggcactagtcttggcgtcctccgggatcagatctttaatgcagtgcctcgtttggagatcctgcagctaagtcagaacttcatccacacggttcacgtagccgccttccagggcttatccaaactaagatta

SEQ ID NO: 17018 - DNA, 1662 bp, DROSOPHILA
attgtaaacgcggttaggtttcaaaagttatagtagttgtagttgttatgaaaagcaactatgtacctaataatcatcgccctgcttgcaagtgtatccgctttaggccgcccagacttggaggactactgcaatgattcctattgccatttacttggtcggagccggacgtttagcgataagaaggctaccaaactaaccgagttccacatggactcctgcgaaaagaaggtactcaaacttatgcccaatctgcgcaccctggagctggagaactgcgacagtccggacttcaccatgaacgacctgaatcaactgccgtacctaacaagccttcaattgcgacgtggaaatcttttggggctgcacgacgaacacttctcgaagtggccaaacatgaagatccttatgctgggggggaacaacataacgagactatccaatgaatgctttaaaggcctagctcagctctggctgctgtctctgccggggaatggtattcaaggtttgccatgggatgtatttcaaaacctaccagaacttctgcatctcgacctaagtggcaatagaatcgaaactcttcacgaaaacatttttacaggcgttcccaagctagagatgctgctactcaatgggaatcccttgacatggatagcgcctacgtctctaaaatctctaagtaacctacgccttttggacatgagcaactgtggaccgctgccggatctttcattgcccggtgcacataccttgatcctcgacaacagcggtgtgcagcgcctggacattttgggcagtgtccataaactccaggcgaggaaaaaccatataaccgagattaaattacccgacaaaagctctgttatcgaactggatttgcatagcaatttactgaccgctaccgatattcccaaacttctaacgggcatgtggcgactgcaacgactggatctatccgagaatatcatagggatatacgcagccgccggaagcgacaatacgagcgagctcttcatacttcccaatcttatgtatatgaacctatcggcaaatcgcctgacgcgtctgcacttcgattcgccaattccatgggaaaggcttactcatttggacgcttcgtacaatagaatatatgctcccgcaaaggttggcattgacgaagctttcaatcttcaaagtttgcatttggagggaaattatattaacaattttgaacttacaccctggaaacctcatccaagtctgaaagaggttgctctgtacgataataaattccagcctaagggctataaaaatattacaaagttcttcaatgaaattggagtaaacgtcttagagaaaacgcaatacagtcaatcaaacaacacgactccaacttgtaagccgtgcataccagatgccagagattttcctacgagtataagcgccgacacaaaccaaaccatagataccaaagttaatcctttaagcaacgacacttatcaatggaatgtatggaacgtactgatgctagtttccctgattgtttccttgttcgtaaactcttttctaatcgtgaaactcattcgtttgagaggaagaaaccagttcacgcaatcatcatcggtacctgccataatcgaaatgttttcaaacgaatctgatgatgaaattatcctgtaa

SEQ ID NO: 17019 - protein, 533 aa, DROSOPHILA
MYLIIIALLASVSALGRPDLEDYCNDSYCHLLGRSRTFSDKKATKLTEFHMDSCEKKVLKLMPNLRTLELENCDSPDFTMNDLNQLPYLTSLQLRRGNLLGLHDEHFSKWPNMKILMLGGNNITRLSNECFKGLAQLWLLSLPGNGIQGLPWDVFQNLPELLHLDLSGNRIETLHENIFTGVPKLEMLLLNGNPLTWIAPTSLKSLSNLRLLDMSNCGPLPDLSLPGAHTLILDNSGVQRLDILGSVHKLQARKNHITEIKLPDKSSVIELDLHSNLLTATDIPKLLTGMWRLQRLDLSENIIGIYAAAGSDNTSELFILPNLMYMNLSANRLTRLHFDSPIPWERLTHLDASYNRIYAPAKVGIDEAFNLQSLHLEGNYINNFELTPWKPHPSLKEVALYDNKFQPKGYKNITKFFNEIGVNVLEKTQYSQSNNTTPTCKPCIPDARDFPTSISADTNQTIDTKVNPLSNDTYQWNVWNVLMLVSLIVSLFVNSFLIVKLIRLRGRNQFTQSSSVPAIIEMFSNESDDEIIL

SEQ ID NO: 17020 - DNA, 10487 bp, DROSOPHILA
tgtgcctcgtcgacgacgctgcttaatgtcaaggttttttggctgctgttgcaagtgcagcagcagcaggaaaaacaggaaaaccagaaacggccgaatgagaacggcacgtggccagcccccgcaacgaaaaggggccagaaagggggtcgattatgccattaccagggcaaagctgcaccttccgcccccggaacccccaaccccctgccagtgcgccgcgcatgaatgccgcgacagacccgattcgaaagccaatgtcaagtgcacgcggcacaaggatatggaggcaggagtatattacaggccgccatctgccccactgtcagttccccttcctcagtgcccacagcagctacagtggagcttctataaattgacattgggctttcatcaatattgaactcttcgatatggactggcttatgaagactcgtttataataacacataaatcctattttcatatacggcttaagtttgacatacacaggctcgactgtacctcatcatcgagcattaggacggtcgttgttgtgacctccaaattggttggcacactcacctaaatgggagtttatctatattttatgtgcacgacttatacctcaggcccatttcacttgatcaccaattagtgactatatgctcaatatttgccaatatcaaacatcaggtgcttcgtcaattaacttgttaattagataggaaatagattctgtggttataattgtttttgtaccgtattataattgttactacttattgtagacgaatttacattaatcgatatccatccaaattagtctgcgaattcattagttcaacaaactactcaaggatgatgaacttttactaaaactaattccgttcatcggctttaaataaaataaatcaactgtttcataatagtaattaataagtcatattagtcatataaataataagggtccacacacaaaattgaatacaagataaaacgctcttctcatttgatatttattcaaattattatttaatgtaagttttgaacttatttatgttaaataacctagtgagaatgaaatacaatgttttgtttgtttcttctttactgactgcagtggattgactgcttggcataacttgtttattacttcttaaaaattcttcaataatctctttataacttaggcgtataaactcataattccggctagtttcgagaacggattaccaaggacaaaagtaaattacatatcttctactaaaactagaatctaaggaagagaacagaccaatccgtctacgaccaggtcttgggaacactgaacggcccgaatcgttcgtgactatcaacgccccgcacagcgaagtaatacctctggttctcctggaactgatttaaagtcactgccattggcagcaacatagcgctgacatcgcccacatgccgccagctatccgtgctgggctcgttaatcgtctcctggtatgcatagatctggtacattacgcactctgcgaaccgcgggctcgaatcctccagagtccaggatataacgataccagtatcaaggagactaatccggataacgggtcgcgaaggaggcaccttccaggatggattgaagggctggggaggagacgtgggcagtggtgcaggatgtgagtatcttagacgagacgctggaggcggggtgttttccgaacgtatctgcatagttacgtttgagcccaagggactttgctgacctttgaatacgtttgaaaataagtacgccgaatattttgaatataatgattttccaactcacctcctccattattatggactatctgtcgagcatttacgcgaggcaattgcattggagaagctcgcaccacatttccgcctcctcgtcctcctctcgtcgctgctgcagtctgagcattccgcttaagcatctccatacgcaaacgagcgttttgtgcttgggcagccctagccgccgccgcagccgctgcatcatcctcatctgtgaggtcaatgactgccttctccttgggcttggccggcgccaagctggactcctgctgctgtccatagctgcccaattccgatccactgctgctagatgagatgggcaccgagaccgtggcccccgaaagcggtggctgcttggcgcgcactttagttgtgcacttcggcacttgcttggcgggactcgaacctggcgtgggaccgggactaggtcgaggtctgcaatatgaaacaattgtaagttagtaatgtgaatatgacatgtttcttttgacgaagaatttgagatctcggcgattatacggacggacaaatggacggacggacataaacatattgattcgacaagtatatttttatattggtaacgcttttatttacccatttgggtttattaccccaactataaagattttcaatagcaataaaatatacttgaatgttaagaaaacaaaattttttctggcatatcaatacaaattgggaaatagaataataaaatttaaaaaaaaatctatgtatgcttttatagccactgagttcgaggcgttcatatggacacacggacggacatggcctgattgatccagataaaaaaaatatatacggaaactctgccttctaccagttatatactctgtaacgaatctagtataccgtattactctacaagtaaaaatatgaatctatttagctaattgggtctgaaacgattcccaataaattgctaattgtaaacttctgcacaagcgtggaattcgcttttaatcgaagatcacgattaggattatactcacagtaggaactgttgctgcgcctgttgttgcttttgttgttgttgcaggtgttgttgctgttgttgctgctgttgctggtgctgtttctgctgttgtttttgcgccaagaaagcggcttctgagttccgggcacgcatgacggttttattaatcgcattggccaccgatgaaggcgtggagccaggcgttccggtgtgcttggaggcgtgcattgtcctttgagctataggcggtgaggactgcagacgttgaacgctggactgattcataagcattggcgcgggctgtaagttagtaggtaccggccgatggggcgtgaccttctgcaagcagccccggcgcacaggtggcgtgacactagccgttgttaaggattgagatgaccgtgctgctggctgctgttgctggtgattggaattcggagtgacactgacgcccgcacccgtttccgatgaggatgtggatggtccaaaggtaggcggaggaggtcttggtcgcacggtcgcacgcgtcggggaggtgctggccttgggtggtgttccgctgggcggcgccaacacgctgccagcagcatgagttgactctggtgcggcgacggtgggctttatagccttgaacggaatgcccacctgaagaccaacagctcgtgttatacgcacaggagcggtgaaatgagagttcttagcctccaagtccttaagcacacgcttgtgcaccgtctccaaatccaggaattgcttcgacacctcggcaatcttgcggcgataattggcgagagtgctctcgcatttgtccagctgcatacgtatttctgcgaaatcacttttaaccatcatcgcctcgacgactttctgcagcaccagctcctccaggtcgtcacgggtcattgtgtcgaaactacgtcggaaggtcttaaagaattccaagcgcaggggcttaacattctgtttaatttctggaacggggttaaggtcgaagtccagtttcttttgggtatcttttttgggggattcttctttgtcttcctgaccacccatatcaatttgtagcgtgccttcgtgggagctatttgagtcagagtcttcagtcttagctttcttattaggtatttcctcctgagggctgctgtccagatgttcatggctccgcttggttacatccttcaaaccaccctctgctctgctgagtattggtaatgattcttgattcgtctccgcttcgaattcatttttttcatcggtactaagacgcagccgttttggaaccgactcttccgcgtactcggcgggtcgcaatagattgctggaattactgttcccatcctctgtggtagtttgcttcaccatatcatgggtcttcagtttctcgaactgatcgcatgcattgtcggaattgtctatttggagattctttgcttcaactgattctgtagttgactcattgggaagtccttttaaagctgtttccttttggatagtttgaacttccttttccgatatcccattctgcggtgtttcatcctcatcctcggagacgagaacaacttcgtcatccttagcttgtggtttcacagaattttcgttcgttggattggctgtggtgcccacattttcggtcttatctaggggttcaaagaatataacttcgtcatcggactccgtctctttggtctcctcttcaacaaccgttgattcattgctttccaaatcctttaaatttccatcagtagaaatttcgcatgctccatttgtcgtgggttccttatcgccttttggtatcaccccgagttcgtcctctgcagccttcttttcttctatctctacaacatccttgaccgcttcatcaagcttatcatctatggttgtgtagttcatttcgtggtctgcagttcgaacatcaaattctttttggactttcttttggggatcttctgtttcttcaccttcgatcaccacaggttcctcaagctcttcagtgtcttctatttcctttttattttctggctcttctgtttccttaacgtcttccacttcctgggttgggcttggatcttcctcttccttggtgtctcccagtatctgtgctactttcgaagctttgatgattttgatctccgacttttctttttcagtcgcctcttctgaatcttttgtttccttgcagtaatcaggctcttctttttccttgtgctcttcaagttcctcggattccttggattcttctggttcatccacttgtattgactcttcgctctggattgggatagactctttcgacttttcggttacttcgtctccaactaacatgggttctttaccttctgtcaaatgttgatcagctttgacagactcatattcggccgcactcgctgacttttctgagatattattttgcaaattcaatgatttcttcgtagaaaccttaccgtgagtaaggacttcggtatcttctgtgttagcttcagtttcctcgacctctgattccgcttcgcaaggcacacattcactcgacgagtctaaatctataacctcagtgttgggtttttccgtttccttaattatatcatcgtcatcagatgaaatgtcttctaaatcattgacagatgagttgttttccgtgtttagttttttgcttggcttcgccttcttggagtcctgagaggcaaaggcatcaaactcgtcggcactcgatatacagtctaaagcatacataaacacatcatctgttgatgtatttttccggtctttttcaatgttatccgcagtattggctgggacttcatcctcttcctttgactttaatatttcatctgaatcagctaaatcttcggttttctgtgtggattctttagctgaagcgtgttcttcagtttcatctaatttctcctcagtctttaattcagaatcaggatcgatgcactcttctccttctagagaactaagcacctcttcgccttcttcttcttcttctggtttttctctttgctcttttagattttcgtccgtatcagcagctgttctcttcttcgccgacgcagagtcgcattcctcgtctctatcgagtgaatcgatatcgtcggaattcctgggactacaatccacaatagagctaatcttgtccagaagagcgtccaaatcactacctggattacgctctcggtccgatatcttttttggtttgtcaataactttgacgttatcggagctatcgacgccattggttagctcacaaagatccacttcatccacagaagtttgactggattcgttgagaatggctgtaattcagatatcgatatatcccaaacggatttatccaaataactaagtcgcacttaccgggggtggagagaggttccacttcattgccgagctctgtggatagggttcgcatcaaagcttcctctgtagagagttccttcagttccatggtctggtttactcccatcattttgaatgtttttatcgatttacttaatcgtcattgaattgctaaaagtaaaaccatattatagttcacgacgtatgttgacaactctgggatataacaaacatgtcacaaccctgctaccgccatattttttttaaaaattaaattcaatctcattcaaaaatttcttgtaaatagcttttaaaagaaagctcgctaaaagcttattcccagttctcgccagtcaaaatgctaatgcaataacttgggaattatacctttaagtgagtctgaagccagcgatattttattaagactccgccaaaactcataaaccgctttcccgaattcattttgaagtcctttctaactctaaagtatacgaagccattaaagcaatgttatctttgagtatggatgttccatagtcaaaggatgataggaacatcataactcaagaccaacatttttgttttttttttttacttttttttgtgttcggtttggtgtgtatctactccgttgttattgttcttgttgttggtagtattaagcgttcgtcgctttccgaacgcaacaataactacacgattgtagcgaaaagacaaagcaaagcgacgataaatattcgtgcaagggaaaaaagtgcgtgacgaaaaatgcgaatatggggagaaagagaaaattaactgctacctattaatttatgctcataactttatagttatagtttttactatcgaaagtggggttatgttgagtttgttgcgtttttacgtgatagcgtaactgcacattgttatattgagtttagtaacttacatgcttaaacttcctgataccctgttaacgatttattttgatttggctacactcgaagaaatcaaaatgacttcaacatcttgccgcgtttagtgcaaaaatgaacgaggtgaacgccaaaccagctctcgacgaacgaaaatgagagcgagagagcaaacagctgagagcggtaaaagcggcaggggcgtacgggtaagaggaagatagtcggcgggagggcgtgtctcgggatgatatgataagattcgataatgtaattccacctggagtttaaggaaactacattcacatcttgaactttaacctttcgcgaaaaatagggcaaagctacagtcctcattgttattgtgctctatggcaagttggcagtctcttttggtatggcagtttctccataaaattataaaaataaaagcaataggggatggtataaaaatcgaaatgaagtgagcagggatcctcattgaatcaaaaaacattgtttgataacaacgagtaaaaagcaaagcgtttaataataacgcaaatagaacgcgttttgttggtcgcgagcggcagggtgagatgaggaaacaggcagctagagcgggacgactatacgtttacaaattaataggggagcaatataagtaaagaacattatggaatatccatttcttagtgcaactacacacagctccaaccagtgttaataaatagatgatttgtagatggaggccgaacgcaaagattatgtggaatcagagaaggctgaagcaaaaatgtaacagaatgtaaccctgtcaaaaaaagaaactttccaaactttccaaactttcaaaacttagaacctatagtccgtccgtccttctggtcttttcgaaacgaacttaggaccttgccaggataccggttttgtagaaagttgcggagtgagcgggacggacagagagagcggccggagagtaattgcaagagagagcaagaggccaaatttatatatgcacgtggctatatatatttgcctgtatgtaggaattgaataaagttcgcgtagcgccaaacacagcacgacaaagatacagcagcaagccgaaagcaacaactacaacaccgggcaaacaaaaatagaggcgtaaagtcgttgtttttgtagatgaaatgctaaaaccttcgatatcagctctattaaagaaattgatcctagaagctagtgacattggatcattaaatttcgacttgctctgatggcaatacttttttcaagatgcttaggtccattaaaaccgttgcttatacacacaaatgtagataacaaacatgtttaggtgtcgtatttttgcaacttaaagtatatatggccaatttatcgtctttaaagttcggtcttgtatttaagccaattttgggctatatgtctattatagctgtcccgctctaacacgcgcacacacaccagttaagttcgttgtagcaacggcacatcggtgtgagcgtgtatgtatatcagaacgtgtatttgtgcgattttgcaacgcatttacattctttttaggttacgtatcgattttgatgcagagtgaggttagatcgaaaaacatccaagtttttgcatgctttacgaaagcaaggacatttttgaaatcccctcggcgccctctgcatgtttctggtatcagacgttcgataaagactaaaccccgaaaaacctaaaacgagcaggttgcaagcagaagcaaaagcaaaacgggcggcgtttttattcacctattgtacaattttatgtttttagggttgccaggtatgcattatgtttatcatgaatataatataaaacctcgatgtgtccgattagacgcaaatcaaatgtctttaaatgtataattgagaccatgatgtcgcgcagggttgccaccggcaggtcattttttgtcctattgcaatggcattgcggtatatagtcttgcctacacgtcggtagtctagtctaaaatatagcatagtaacaaatccagatatatatcagatttcgcctgatttgcaaatcgcggtcacttgacaaccctgaaaacacaaatgtctttaaagagactcgtaccatatctggcgtatggtacccgtacccagtccaaataaaaaaaaacttcaaaacccagtaaaaaaaatgcaaatcccaaatgtaccattcgattggaccattatattacagggtatttttataaagaaaattataaatataacataaaatggataaaaaaaactacacttacctttctacgacacgacaaactcgtttattaacttatatattaccgaaaactattgaaatatgacttgtggtctaacggcaactatcaaatgtcaatgatttgaatgaatttaacagcttctccgtgatttgtttacaattcgcaggcaactccacttccgatgcccttaaacgacgaagactgaaacacagactaaaatcgcacaacaacagaaggtgccgaaaagaaccagtctatgcacaactggttccgaagagcagcgcccagattgcaagctagcggcacttggaatagagattggcgcgtgattccggatgccgatttctgatacgcatcgagaagacattttttatggacgtttctaacaatacttattatttttgtatttatttaggttggattttggcaaaacttattttatcttatattcaactttgcatttttacgcaatttgtattattattattattattattattaacatgatgaccagatataacttaaactggttaccttctcattacgatagtaatattataaaaggatgtatatttaatagctgaggagaagcagcatttctatagtatttatatacaaaaataaaaaacgttatgcagttcatgcacgtgtacatccctagtttggaaccaaacaaaatcatatgttgttactagggctgtatagctaaacgttttatttatgggagcagaactattaagtgccagttggaactaagacgtgatctcccctgtcccttcttttgcttaaaactgaatcatattgacaaatgttttcggcccgtttaagtaatgtgacgttctcatgaaatacaacggtgaacattgcaaaaatcgtgttattttcgttaattgttccaatgggtgaactagtgaacggagtcagcatgtgccagccctgatggctgctttgttgaactagttccagttccggagctagtgaaccaatagcaaacggaacaaaacaaaaacatctgtagattataggttaatttgttttataataacaaatgcgggaattattcaattaagatgagcaatctgctgaattttgccctgcggcagggcgtcaactccatcaagcgccttagcctccagagtttcagactggcagctccggccattgtaacaaaaacgccggttacttccacgataaagagattctcctc

SEQ ID NO: 17021 - DNA, 4774 bp, DROSOPHILA
tttcagtcttcgtcgtttaagggcatcggaagtggagttgcctgcgaattgtaaacaaatcacggagaagctgttaaattcattcaaatcattgacatttgatagttgccgttagaccacaagtcatatttcaatagttttcggtaatatataagttaataaacgagtttgtcgtgtcgtagaaagcaattcaatgacgattaagtaaatcgataaaaacattcaaaatgatgggagtaaaccagaccatggaactgaaggaactctctacagaggaagctttgatgcgaaccctatccacagagctcggcaatgaagtggaacctctctccacccccgccattctcaacgaatccagtcaaacttctgtggatgaagtggatctttgtgagctaaccaatggcgtcgatagctccgataacgtcaaagttattgacaaaccaaaaaagatatcggaccgagagcgtaatccaggtagtgatttggacgctcttctggacaagattagctctattgtggattgtagtcccaggaattccgacgatatcgattcactcgatagagacgaggaatgcgactctgcgtcggcgaagaagagaacagctgctgatacggacgaaaatctaaaagagcaaagagaaaaaccagaagaagaagaagaaggcgaagaggtgcttagttctctagaaggagaagagtgcatcgatcctgattctgaattaaagactgaggagaaattagatgaaactgaagaacacgcttcagctaaagaatccacacagaaaaccgaagatttagctgattcagatgaaatattaaagtcaaaggaagaggatgaagtcccagccaatactgcggataacattgaaaaagaccggaaaaatacatcaacagatgatgtgtttatgtatgctttagactgtatatcgagtgccgacgagtttgatgcctttgcctctcaggactccaagaaggcgaagccaagcaaaaaactaaacacggaaaacaactcatctgtcaatgatttagaagacatttcatctgatgacgatgatataattaaggaaacggaaaaacccaacactgaggttatagatttagactcgtcgagtgaatgtgtgccttgcgaagcggaatcagaggtcgaggaaactgaagctaacacagaagataccgaagtccttactcacggtaaggtttctacgaagaaatcattgaatttgcaaaataatatctcagaaaagtcagcgagtgcggccgaatatgagtctgtcaaagctgatcaacatttgacagaaggtaaagaacccatgttagttggagacgaagtaaccgaaaagtcgaaagagtctatcccaatccagagcgaagagtcaatacaagtggatgaaccagaagaatccaaggaatccgaggaacttgaagagcacaaggaaaaagaagagcctgattactgcaaggaaacaaaagattcagaagaggcgactgaaaaagaaaagtcggagatcaaaatcatcaaagcttcgaaagtagcacagatactgggagacaccaaggaagaggaagatccaagcccaacccaggaagtggaagacgttaaggaaacagaagagccagaaaataaaaaggaaatagaagacactgaagagcttgaggaacctgtggtgatcgaaggtgaagaaacagaagatccccaaaagaaagtccaaaaagaatttgatgttcgaactgcagaccacgaaatgaactacacaaccatagatgataagcttgatgaagcggtcaaggatgttgtagagatagaagaaaagaaggctgcagaggacgaactcggggtgataccaaaaggcgataaggaacccacgacaaatggagcatgcgaaatttctactgatggaaatttaaaggatttggaaagcaatgaatcaacggttgttgaagaggagaccaaagagacggagtccgatgacgaagttatattctttgaacccctagataagaccgaaaatgtgggcaccacagccaatccaacgaacgaaaattctgtgaaaccacaagctaaggatgacgaagttgttctcgtctccgaggatgaggatgaaacaccgcagaatgggatatcggaaaaggaagttcaaactatccaaaaggaaacagctttaaaaggacttcccaatgagtcaactacagaatcagttgaagcaaagaatctccaaatagacaattccgacaatgcatgcgatcagttcgagaaactgaagacccatgatatggtgaagcaaactaccacagaggatgggaacagtaattccagcaatctattgcgacccgccgagtacgcggaagagtcggttccaaaacggctgcgtcttagtaccgatgaaaaaaatgaattcgaagcggagacgaatcaagaatcattaccaatactcagcagagcagagggtggtttgaaggatgtaaccaagcggagccatgaacatctggacagcagccctcaggaggaaatacctaataagaaagctaagactgaagactctgactcaaatagctcccacgaaggcacgctacaaattgatatgggtggtcaggaagacaaagaagaatcccccaaaaaagatacccaaaagaaactggacttcgaccttaaccccgttccagaaattaaacagaatgttaagcccctgcgcttggaattctttaagaccttccgacgtagtttcgacacaatgacccgtgacgacctggaggagctggtgctgcagaaagtcgtcgaggcgatgatggttaaaagtgatttcgcagaaatacgtatgcagctggacaaatgcgagagcactctcgccaattatcgccgcaagattgccgaggtgtcgaagcaattcctggatttggagacggtgcacaagcgtgtgcttaaggacttggaggctaagaactctcatttcaccgctcctgtgcgtataacacgagctgttggtcttcaggtgggcattccgttcaaggctataaagcccaccgtcgccgcaccagagtcaactcatgctgctggcagcgtgttggcgccgcccagcggaacaccacccaaggccagcacctccccgacgcgtgcgaccgtgcgaccaagacctcctccgcctacctttggaccatccacatcctcatcggaaacgggtgcgggcgtcagtgtcactccgaattccaatcaccagcaacagcagccagcagcacggtcatctcaatccttaacaacggctagtgtcacgccacctgtgcgccggggctgcttgcagaaggtcacgccccatcggccggtacctactaacttacagcccgcgccaatgcttatgaatcagtccagcgttcaacgtctgcagtcctcaccgcctatagctcaaaggacaatgcacgcctccaagcacaccggaacgcctggctccacgccttcatcggtggccaatgcgattaataaaaccgtcatgcgtgcccggaactcagaagccgctttcttggcgcaaaaacaacagcagaaacagcaccagcaacagcagcaacaacagcaacaacacctgcaacaacaacaaaagcaacaacaggcgcagcaacagttcctactacctcgacctagtcccggtcccacgccaggttcgagtcccgccaagcaagtgccgaagtgcacaactaaagtgcgcgccaagcagccaccgctttcgggggccacggtctcggtgcccatctcatctagcagcagtggatcggaattgggcagctatggacagcagcaggagtccagcttggcgccggccaagcccaaggagaaggcagtcattgacctcacagatgaggatgatgcagcggctgcggcggcggctagggctgcccaagcacaaaacgctcgtttgcgtatggagatgcttaagcggaatgctcagactgcagcagcgacgagaggaggacgaggaggcggaaatgtggtgcgagcttctccaatgcaattgcctcgcgtaaatgctcgacagatagtccataataatggaggaggtcagcaaagtcccttgggctcaaacgtaactatgcagatacgttcggaaaacaccccgcctccagcgtctcgtctaagatactcacatcctgcaccactgcccacgtctcctccccagcccttcaatccatcctggaaggtgcctccttcgcgacccgttatccggattagtctccttgatactggtatcgttatatcctggactctggaggattcgagcccgcggttcgcagagtgcgtaatgtaccagatctatgcataccaggagacgattaacgagcccagcacggatagctggcggcatgtgggcgatgtcagcgctatgttgctgccaatggcagtgactttaaatcagttccaggagaaccagaggtattacttcgctgtgcggggcgttgatagtcacgaacgattcgggccgttcagtgttcccaagacctggtcgtagacggattggtctgttctcttccttagattctagttttagtagaagatatgtaatttacttttgtccttggtaatccgttctcgaaactagccggaattatgagtttatacgcctaagttataaagagattattgaagaatttttaagaagtaataaacaagttatgccaagcagtcaatccactgcagtcagtaaagaagaaacaaacaaaacattgtatttcattctcactaggttatttaacataaataagttcaaaacttacattaaataataatttgaat

SEQ ID NO: 17022 - protein, 1420 aa, DROSOPHILA
MMGVNQTMELKELSTEEALMRTLSTELGNEVEPLSTPAILNESSQTSVDEVDLCELTNGVDSSDNVKVIDKPKKISDRERNPGSDLDALLDKISSIVDCSPRNSDDIDSLDRDEECDSASAKKRTAADTDENLKEQREKPEEEEEGEEVLSSLEGEECIDPDSELKTEEKLDETEEHASAKESTQKTEDLADSDEILKSKEEDEVPANTADNIEKDRKNTSTDDVFMYALDCISSADEFDAFASQDSKKAKPSKKLNTENNSSVNDLEDISSDDDDIIKETEKPNTEVIDLDSSSECVPCEAESEVEETEANTEDTEVLTHGKVSTKKSLNLQNNISEKSASAAEYESVKADQHLTEGKEPMLVGDEVTEKSKESIPIQSEESIQVDEPEESKESEELEEHKEKEEPDYCKETKDSEEATEKEKSEIKIIKASKVAQILGDTKEEEDPSPTQEVEDVKETEEPENKKEIEDTEELEEPVVIEGEETEDPQKKVQKEFDVRTADHEMNYTTIDDKLDEAVKDVVEIEEKKAAEDELGVIPKGDKEPTTNGACEISTDGNLKDLESNESTVVEEETKETESDDEVIFFEPLDKTENVGTTANPTNENSVKPQAKDDEVVLVSEDEDETPQNGISEKEVQTIQKETALKGLPNESTTESVEAKNLQIDNSDNACDQFEKLKTHDMVKQTTTEDGNSNSSNLLRPAEYAEESVPKRLRLSTDEKNEFEAETNQESLPILSRAEGGLKDVTKRSHEHLDSSPQEEIPNKKAKTEDSDSNSSHEGTLQIDMGGQEDKEESPKKDTQKKLDFDLNPVPEIKQNVKPLRLEFFKTFRRSFDTMTRDDLEELVLQKVVEAMMVKSDFAEIRMQLDKCESTLANYRRKIAEVSKQFLDLETVHKRVLKDLEAKNSHFTAPVRITRAVGLQVGIPFKAIKPTVAAPESTHAAGSVLAPPSGTPPKASTSPTRATVRPRPPPPTFGPSTSSSETGAGVSVTPNSNHQQQQPAARSSQSLTTASVTPPVRRGCLQKVTPHRPVPTNLQPAPMLMNQSSVQRLQSSPPIAQRTMHASKHTGTPGSTPSSVANAINKTVMRARNSEAAFLAQKQQQKQHQQQQQQQQQHLQQQQKQQQAQQQFLLPRPSPGPTPGSSPAKQVPKCTTKVRAKQPPLSGATVSVPISSSSSGSELGSYGQQQESSLAPAKPKEKAVIDLTDEDDAAAAAAARAAQAQNARLRMEMLKRNAQTAAATRGGRGGGNVVRASPMQLPRVNARQIVHNNGGGQQSPLGSNVTMQIRSENTPPPASRLRYSHPAPLPTSPPQPFNPSWKVPPSRPVIRISLLDTGIVISWTLEDSSPRFAECVMYQIYAYQETINEPSTDSWRHVGDVSAMLLPMAVTLNQFQENQRYYFAVRGVDSHERFGPFSVPKTWS

SEQ ID NO: 17023 - DNA, 3091 bp, DROSOPHILA
cttcaacatgatgttcccggagggacgcaattttcatgccaactacaagtgcttctccgtatccatgttgccaggaaacgagcgaaccgacgtggaaaagggcggaaagagtgagttacgagtgtaggctggacagaaattatgtgaacaacacattccatccacagttattatgcctccctcggcgctggacacgctcacccgcctgaatgtcgagtatccaatgctgttcaagctgaccaacgtcaagaaatcgcgatcctcgcatgccggcgtactcgagtttgtggccgacgagggcaaatgctatctaccccactggatgatggaaaacctgctgttgggtgagggcgacatactcaacatcgagagtgtctcgctgccggtggccaccttctcaaagtttcaaccgcacagcaccgacttcctggacatcaccaatcccaaggcggtgctggagaatgcattgcgcaactttgcctgcctcaccaggggcgatgtcatagccattaagtacaacaagaaggtctacgaactgtgtgtcctggagacaaagcccggcaatgcagtcagcatcattgagtgcgacatgaatgtggaatttgaggcgccagtcggctacaaggatcactccgaaacgcaggcatcgggctctgggcagcagggtgctgctggaactgttggcggcgaaatcgctggagccaccaacgccatactcgaagaggtcgtggagaccttcaagggttccggcgtacgtctcgatggtaagaagaagaaggaaagccagttggaaacgccggtcgttaagaaggtgctagcccgcggcgttccagactatgatttccagtttggactcatccgtttcgatcgcaacattcggcctatcagtgatagaagccaagaagatgatgccgtagctggcaatgcggacgcttccgatgcggagagcttccacggcaccggtttctcgatgaagaaaacgcgcaaatagctctgtatctctagttctagttatatattgtgtgacacatagaaattaaaggaaaaacctcacaggggcagcgtcaacttgatggcctcctccttgggcggagccggtggcgatatggtggtcatgggcggcaatcggcgtatcttgcgtccgtgtttgccttccttgcgcttccacagaccggaacgtggtcgattgcccatctcccgcatccgctgggcactgcccacatgctccttgttgtgttccgggttggacaggcgaccaaccgtcgccatgcaggtgcgctggaaggcgaactcccgcttcgagggcagctgcaccaccaccttttcgtcgaacttgcgcagaatggtgccgaaggtgccggcggcatggatcaggtggcacatctggccggggttcttctccagacagtgaatgcgtgtgcccacgggcaaggcgcccaatggataggcatcgccttcgttgggacgcactatgggatcatacaaaaaaaaaaaattatattggcataactggttgtttcagagccagtaaaatttctagattccatgctcagtttaagactatactcagaggattacttagaaaacgtttaatactcccgatgagtaacagtaagtaaatttacccggaatcctaggaataaagcgcgaggtcttgaggatatcgccagccttcatgttctcggtggccaggatgtacttcagctcatcgccgacggcaaccagggccactttggcggtgcgacagccatcgcgtagcacctcgagtaccagttcctcctgggcgccctccgtgggaccatcccgcacccatttaacccagcgatactgctgtttgatgcctccgccaatgcccttggccaccaagcgaccggagacgggatcccgaccagccaaatgggtgatcttcagcggctcaacggtgtacttctccggaaagtgcacggttcgtcggaattgctgtccggcaccaggttttggtttctccaccactttggttttgccgcgcaattgctgcagaaacgccggcgccgtgcgaaacggcgtttgtatagtcagcgttgtgctcagcaaacgtgttacactttgcattttcgatagttttatttgaaaaattaaatagaacgaaaatatatgcaaactgttacaaaatcgaaatgcggctgaaaacagctgttacgcggcgttgccagaccacgaacgggccatgcctgatttcgggcgctagcgttgccagcattttgctcgaactgatctcttcttcttctccttcaccgcgctgaagcaataagaatcgggaaaaccgcattaaaatcgctgaaaaagtgcacaaatcggctttaaattattgcccaattactagtgttacgtgcatatcgagagatttcataaattgcaacagccaacgattttttccaacaaggtacgcaaaataataaaaataaacaagacgaacagaaaaataatatacacacacaaacacgcagcgaaaaacgtgttgtgtgcaaaaaaaaaagactgaaaaaaaagaacaacaaaaacagttcgagtttgataaccaacggcgaaaatataaacagcaaaagagagagcgagaattagtagtaataaaaatcaatagcagagtgagcggaaaatcagcttaaccagctaaatggcatataaataaatataaggtttttattttggaacacgctcatccaacacacatgcacacgcgcatacacgcacgcacacacacaggagtaaaggtatgggtggcctcaagtgtgtgtacatattttgatgttaggtgggaaaaaagcgggcggcaagtttacgcaatcgccgagcgaaaagcaaagagcagcagctatacgttgtgaaaagtgtgctttttgtgtgtttacaaagagacaaacaagacatccgtcgtttgtatgtacgtgcctatgtatgtatgcgcaggtggagtcggttgctagctgaaaaatcaacgagcggcattttttacgcatttccaatacgccacatacatatatacgtgcgtcgtttgcgcgtgtgtgtgtgtggttgtgtgtattttggtgtttttatttatttattgtgcttc

SEQ ID NO: 17024 - DNA, 935 bp, DROSOPHILA
atgcaaagtgtaacacgtttgctgagcacaacgctgactatacaaacgccgtttcgcacggcgccggcgtttctgcagcaattgcgcggcaaaaccaaagtggtggagaaaccaaaacctggtgccggacagcaattccgacgaaccgtgcactttccggagaagtacaccgttgagccgctgaagatcacccatttggctggtcgggatcccgtctccggtcgcttggtggccaagggcattggcggaggcatcaaacagcagtatcgctgggttaaatgggtgcgggatggtcccacggagggcgcccaggaggaactggtactcgaggtgctacgcgatggctgtcgcaccgccaaagtggccctggttgccgtcggcgatgagctgaagtacatcctggccaccgagaacatgaaggctggcgatatcctcaagacctcgcgctttattcctaggattccggtgcgtcccaacgaaggcgatgcctatccattgggcgccttgcccgtgggcacacgcattcactgtctggagaagaaccccggccagatgtgccacctgatccatgccgccggcaccttcggcaccattctgcgcaagttcgacgaaaaggtggtggtgcagctgccctcgaagcgggagttcgccttccagcgcacctgcatggcgacggttggtcgcctgtccaacccggaacacaacaaggagcatgtgggcagtgcccagcggatgcgggagatgggcaatcgaccacgttccggtctgtggaagcgcaaggaaggcaaacacggacgcaagatacgccgattgccgcccatgaccaccatatcgccaccggctccgcccaaggaggaggccatcaagttgacgctgcccctgtgaggtttttcctttaatttctatgtgtcacacaatatataactagaactaga

SEQ ID NO: 17025 - protein, 294 aa, DROSOPHILA
MQSVTRLLSTTLTIQTPFRTAPAFLQQLRGKTKVVEKPKPGAGQQFRRTVHFPEKYTVEPLKITHLAGRDPVSGRLVAKGIGGGIKQQYRWVKWVRDGPTEGAQEELVLEVLRDGCRTAKVALVAVGDELKYILATENMKAGDILKTSRFIPRIPVRPNEGDAYPLGALPVGTRIHCLEKNPGQMCHLIHAAGTFGTILRKFDEKVVVQLPSKREFAFQRTCMATVGRLSNPEHNKEHVGSAQRMREMGNRPRSGLWKRKEGKHGRKIRRLPPMTTISPPAPPKEEAIKLTLPL

SEQ ID NO: 17026 - DNA, 2340 bp, DROSOPHILA
tgacgttctcatgaaatacaacggtgaacattgcaaaaatcgtgttattttcgttaattgttccaatgggtgaactagtgaacggagtcagcatgtgccagccctgatggctgctttgttgaactagttccagttccggagctagtgaaccaatagcaaacggaacaaaacaaaaacatctgtagattataggttaatttgttttataataacaaatgcgggaattattcaattaagatgagcaatctgctgaattttgccctgcggcagggcgtcaactccatcaagcgccttagcctccagagtttcagactggcagctccggccattgtaacaaaaacgccggttacttccacgataaagagattctcctcccaagccgcccccttcgatgtgaacaccagtgtccccaaggacataatacttttcaagtatgaaaacccccgattctaccagatgcttaactttttcggggtgtgtcagtttgttttctggacatatctctcgcacttcgccttcacgacgcttaaggatgctccagtggtggaaaaacccggagaggagctgaagtggttccagcgcataaatctgggcgataataagtacagaaatggcattacagcctgtagctttctgataggtaagagtggtttactacgttctcggcaagccgaaaataaaactcaaccaacattttaggatatggcatactgtttgctgtctggatgtttaccctgcgatcggtgcgttttcttatcttgagaaagggtggtcagagcgtttcctttgtgacctacggtcccttcaaccggaatcgcattatgaccgtgccattaaagtgcgtctccgccgaggaatcacggaacatggccagggtgcagctacccattaaggtgaagggcaagacactgtattacgtcctggatatgcgtggcgagtttcggaatggcgagttattcgattacacggcgggcctcaagcgtcgcatttaaagggcaagttttgttgttttgtagcttattatttgtaaataaagatgtacactaattaaaactaaaatgcggcttagtaaatgggctccggcttctgggtgagcagcagtccaaagcgcttcttgatggtcagcctctggcgggagtacttatcctccggtgaaaaacgtgctggatgagcagatagtgtgggacgaccatcctcggtgcgtttctagaagagcaacaagtggtgacttagttgggtaatatatatatagggttttgataataatataccttcagggtgtaaacgcgatcgccgttttcgttaattgtgtacatcagatacatttttgcagtttttggattgtttttctgtagtcaaagaagcagaaaataaaacacgtgtggcgtgcgttgcaaggtgctaccaggctttaaaaaaaaataagcactaaataatccaacttaagagaatagtcaagcctcgaaccgtggaataaatgttagctagattttcgtagctagatcgcttgttatcgattcacttccatctctaagcatatttgtatagaatatttggcggacttttgtacacaatgtcaaataaagtggacaagctgcacaagcaggctttacgcgaacaacagaagcgtattaagcccggagaatgtatgaaatatgtgcggatggtcatagatgccggatttctgggcattcccgtgggccaggaggcactgcagcaattgaatgcgacgggtttgaagtatgaaataaggagcttgcccgtgagccactgcatcctgtgggaacgcaatgttggccagcagacgattgctctgggcagcagtcccaccggcctagatgaagcctggaaatcggaaaaccaagtggtccagtggctatccgaaagcagcttccaacgggctgtaaaggatcaaagtctagtttgcctgggaccgcgcttgcaggactcatttccggactgccagtacaccattgccctgccaacgctccgtcacagcaagcatggcagctcatccagccaggacgctctgattgagatgcagttgctccaggagctacacgtggaacagctagatcaacccgaaagccaggatctagtggccctgctgcagcgctatacaaaagcaatagccgaagccccctataagaagcaacgcaacgagacattgggaggcttcaagaaatacctggccaacgacaagaagcagtgcgtccgtgtggatcagggaaacggatacggaagactctggcagcagcatctgaatcgactgccaatggtcacgctggaagtggccgagtccataatagcgcagtatccctgtcccaagaaactgatcga

SEQ ID NO: 17027 - DNA, 275 bp, DROSOPHILA
ccaaaaactgcaaaaatgtatctgatgtacacaattaacgaaaacggcgatcgcgtttacaccctgaagaaacgcaccgaggatggtcgtcccacactatctgctcatccagcacgtttttcaccggaggataagtactcccgccagaggctgaccatcaagaagcgctttggactgctgctcacccagaagccggagcccatttactaagccgcattttagttttaattagtgtacatctttatttacaaataataagctacaaaacaacaaaa

SEQ ID NO: 17028 - protein, 64 aa, DROSOPHILA
MYLMYTINENGDRVYTLKKRTEDGRPTLSAHPARFSPEDKYSRQRLTIKKRFGLLLTQKPEPIY

SEQ ID NO: 17029 - DNA, 16499 bp, DROSOPHILA
aaaattgtttatacctttattcatatatcatatcttcccccgacacttttcagtcaaatatttcttgttcagtgtggtaaaaagttgtattctatccatgttctttgagtattttgtaagttgttcttgtgtttccatcttgttctcgccgactttctattccgcgtttttcagataaaatcatgaatacatctacacgtacagtaatatagtttttgttcattttgttttgttaatatttatagacgtttcttccttcatatttaaaacgttttgcgtgataatgctttttgttttgttttgtttttttgtgggcattgtgggcgtgactgctgctccgaggagtaactaaatcaacttaaagtaaatgtacattcacgttaaagcttaaatgataagtaaggcaaagggttcgatgaggttcgcgtttgcagttcataaattaatccataaactagggtaactagacgactaaatgctaggtgtaaaaagatggcaatcattactcgtaacttaactgaagctttgtaaatggcaaattaaagcttttacttcacatttcattcaatcgaatacaaatacaaatggatgtggaggtggatgtgaaaatcaggggctggggggacacatttgataaatgctcattccaggtaagttactaaatagttaaatatccgtgtgtaaatgttcattgtgagtggggtgtgtttgtgagatagctcaatcgtacaactaagataatgaaattcatttgcagtcggctgcaaaagcgctttcgagaccgtttgcatgaattgtgtttgtttgttttttgttttaagtattttttgtttgtttaagagaaatcatatttcaggtacatcacaacttaaaatttaaaaaattaaatgcaattttttaaataattttcaatgtcaaatgcctaatgcattccatatatggcaagcaaacattttctaatcttaagcgaataaaatagaaccaaaactacacgaccacattagcatttgtccgcctgtcctcggctaatcctcttctgcagagctgcctgcagcttctctctcctagttgatgaggatccaagccggccatgtcgccaatacttgtgcagagccagcgatcccagagtgtggtagttgaagctgatagagctgttcttacgcaactggttgcacttgaggcagcccaaacgctgacgtaccatgcgattgaggtacttgtccctcagtaaggtgaccaccgcctcgggcgtcaagcggatcttctttggctgcgcctgcttgcgcgagctggacttcttgctaaagtccagcggtgcagcgagatactcttgctgactggccgcatccgcaagcagtggcaatagggtggccaactggttgagggacttgcgggaggcattcgaggcactgttgctgtgggccggagccgccttcttgggactccgacgaggtgtgctgagatccaactgccgtttaagcagagatgtcaccggcgctggtggctgaacctttggagcaatggtcagggttatgtcctccttgttccgcagatactcgatgtactcctccgtttcgctgagcagacgacgacgcttgctcggcgacaggttctcaatgtccagctctggctgttgctgctgacctgtagtcgtggccgtgggcaaagctgctgctgcagcggccaacatcagtggcgtctctgccgcatagtacttgttgataatgtccttgacgtagttctggaactgggtgccaatgcgattgagattctggtactccatttgggtgaggaatggagtctggttgctggggccgctgatgcttggcggcgatgttgctgccgcagctgcaacacttactgctgctgtgcctggcgacttggtcttgttgttttccttgtcatcctggcgatgatggtgaacggcatttctgtgcgatgtcttgtccttgtaatagttgttgttgttgctattgttgttattgttgttgttcaatttgtacgcgggagacgatttaataagctgcaatcgctgctgctgctgctgctggctgtgatgttgctgatggggctgatgctgctgattctcttggtcctcgtcgttgtcgttctcgaccttgatcttccgtttgctggccagcagctcgatggccgtctgctcgtagttggccgcctctagaaatgccgttgccatcatcgccttggtgggtcccatatccttggcgtccatttcatccatcttctccagcttgatggcatgacgcgacagcttcaatggcgatgtggcgctcatattgaactcatcgccagagaagctcgacgaagatgcagacgatggtgtattctcgtcatcctcaccggtggaatgttgtcgcgctcgcatgccaaacttttggcgctgggatccggaaacggagctggcggatccgccacccatgttgctcaggctgtacagcagtgcagcagcctctcgtgtcgtccattgcgaaggcagtttattgttaaacaggagttgatgattggctggtattttcaactcgtgcacgcctcccgccttatgaaaatcctgagcgaccgaagcggtgttgcgactaatggcgtccattttcagcagactgcaaggataagtgaataaaaatgtcttagtttattgcgtatgatatgatattggtaattaaacgaagattaacaaaacaggtggcaaactgtaactgagggtgaaattgagatgaaccaccgaataaaatagttatatcaacaaaagaaaaacataaatagggaacatacaaaaagaaactgtggaacctgaaaccaactattaagaaaggtacaaacaaaacaaaacatttttttaatctgtggacattcaaacaaggatttcgtaaacaatgtgaaatgggtgtgataaaaacacaagcgattagaatttgcagagtggcttataaacacgatgaccaattttgtgaaacttaaaaaccaacatcaacggaaacaaataagtaaacttctcgggaaattatgcagaaggtaatcttaaagcattagataagcacgcttaagacacgaaaataagtatatatgtaaaataggaaactgagtgaaaaccaacgaaaacgcaatggatcggggatatattgggttatccaaataccgcgcatagtcctccggatcgctgccctcggcctcgaggtactgaaacaatcgctccgagccgcgcttttgcgtggctgcatttggcaatccgccggttagcagatcgtgcggcggtatcagcgatccgttggcgctcagccgccagccgaccatcgacgagggattcacgatgatctcctggagcggtccgccgccggaaatgttgccgctaatgccgccaccaccgcctcctccgccgccggccacgccctcattggttgtggtggtgtagatggttacggcgccgccgcctccattcgcatttcccacattgccactggacgagctaaccgaaatggtggtgaagtggtggtcgatggtgatgtggagatgtggtgatcatggtggggatgtcgtgggaatcgagagtcgagagaacgagagaacgagggtagtaactagagttaggaacgttgtgcgcgctcggttgggtttttgtattttgtatttttgttttttttttttttggttttggtttcttgggatgtgttggttttgtttttgggagggattgcttggtgttttttttttttggtttggtttggtatttttgaatggggcagggcggtctgagaatgttacccaaaagcattgccggcataggtgttcagctggttgttggccaccaggctgttgccaatagtacgcagcacattgaggttctggctgtggcctccggcattggcattgttgttgccattgccgccgccgttgccgttgctattgccgctgctgctgccgccgctctggttgccgttgccgctgcgcgccggccgattatcgtgcggactgatcagatcagggtatttatgtttagatatagagaacgtccggggattttggggggtagccagagaagtggggcgaaagagagttcaaaagctgtttagagtttttcgtaattcccaggacaaacgagagggacaggctagattcggtcaaccgaagctttaggtatccctgcagctggatgtggcaatcaaatgattaacatttattgtcaactgatggttaaagccttttgtttagcttattgaaaacatgcggacacacagagtcaggagtagatgcaacgtattatgttgtcttctccctatatgcattgatagccaaatccactgcaaggatacagcaaagggacacggtttaacggcgtatacttactgcacatcgctcatgtgagcctggtactcctcctgcgtgtccgccaagtaagagcacttgctgcaggcccgcttgttgtgcacctttagcacatgggtggccaggcgctcggaacgcgccgccttgtaatcgcagagcaggcaaacgaagggctttgtatgcgtattgaggtgccgcttgagaccccacttgtccgctccagaccacgggcagtagcagcaggtgaatcgcttctcccgcttcggtttcaggaggccggagccgctgccaccgtttccgttgccaccatgactgccactgctgccggaactcgagctggccaccggctgttgcataacgcccacgtgaaggggcaataccacaccggcgccatcgtccattttctcctgcttaagctgggccagcggcatgtcggttgccgaagccactgcctcgatggtctccacaatgctcatactgctcgaggtgggatgtcgttgggcctccaaaaaggcattgtctatgttcacgcccgccgagttaatggtcacatttccacggccgccggagtgatgagaaccgcttccagaggacccgctgcccgaggaaccactgccagcggagacatgtcgccgggtcttgttaatgtcgtactgcagctcgcggtgcatgcgcaggaagtgcttcttgacatgatcggctcggttgaactgcttgaggcaggcatagcactggaagggcttctcgtccttgtggatgttttcatgtcgggtgtacagatcccgccggtccgtcgagtatggacagtgcgtacaggcgtaacgcttctggatgtgcactccattcgccgcagcggcagctgcagccgcttgggcggccttcttccgaccgcctcctccgccggaggagctggtgctgccgccactgctgttgctgggcgctgaggtgggtgtggattgggccagattttgggccgcattggccgatgtggaggggctggcgtagatcaattcagccgcatgctcctgacggtgttttctatgggtagagagaagttttaaaacgtaaataaccattgttaattctccattttcaatacacaaaagaaaacattttctagtttctagactcttacttggacttgggtgtgctctgatgcggctgttgttgctgctgctgctgttggttgacatgagcgtagctctggagctttccgcccgaggtccactgcacgagttgtggttccgccgctgcggccgccaccagaccagatccgtcctgagcccagcgctgttgctgctcgccggctttcagcagacccgcctggccggctgcgaaaccgttctgcatcagggctgccagcccgaaggcagtgctcagatgatcctcggacttgaagccaccaacggccgctacactgggtgccggcaccacagtcgccccactgctggccgtcaccaccacggagttgcccgactccgcttgctgttgctgctgttgttgttgctggattacattggcctgggtggtggccacgttgttgccagaggcaccggccgcactggactcgtattcaatgctgggcgctgccgagcgatcgagttgttgctgaacgggggaaatagtaaagggtttcgttagatacatctcttttgacttcaccttcgtcatcttacttaccagatttgtaaaggagcgctgctcgccctcgggcaccgctgttggcccgctggtggccacttgcgccaccggcgtgccgagcgtatgcaaaccgtttccggtctcctcgccgtacaatttgcgtgtgatttccttgaacatatcttcatatgtcgcctccacattggaggattgtccgctcgctgctggatggccgccgttcactggtattagtgtggccattgcaggtgcttcactttgccgtcggccttggctagcgggcgtgctgctgctgttgcttttagggggcggaggctgctgcttttgctgttgcctccacgtccactctccgagaactgaaaaatggcagagagagagagagaaaaagcggatgttcttgagtaaacgtatttttttttaacaattgtaaagacttaaagaatagagactgattaattgaattaacgagagtaaataaggctaaaactggtttaagtttcctactttcttaaaaaagattaataaaccatgttaaaaaaccgtgtcccttgccaccaaaagaattcgtatagagttcttcaaatctaaatgctttgggtttccccacagcaacagcaaggaggagtagcgctaataaatataactatcttagagccacatccggtaccaaaatacccagcgcctcccgccaacgacgtcactggtgggaaacgactgctgacacatccaactttgatttgttggggaaggggcagctgtggcgggcggcgagggggtggtaccagtctgccttggggccgcttgcgtggggggttttgcctttggtttcggtgggcattgggcattgggcttggatttcgatttgacgcagcatcgctgagtcagccagaaatgctttcgagcgcgttttttgtttacgaatctccgactttttggaccaccgatgtcgggtgtcaggtcacaaaaatgtgaaaagcgttctgttttacggtacaactaagaactatgggctagcagtttaaaatatctaatactatgactccttaaagaaacaaactgaaatattcgtcgcctgaaccagttgtttagtgcacagcaatactcacacactcgactctctttttggggtctcagctgcataaattaataaatttaccaccttgacgtgcccaactaacgaaccaacccaaaaacccattgatcgtcttcctctcgacgggtcgggtctatcatcatcatcatcatccacatcactagcccagcatcatccgcacagagagacaaactgccaacgatcgcggcattttttttttattttggcggcgcttttgttgtgcggtgggtgggtgtgggctgtgctagactttcctccctctttctctgcactcagaaaaatatttcgcaatactttgttattgaaaatatatattgaactaattaatatacaactgggccgtattagaggttatcagtttttggtttctttcatgattaaatttccccattctcggaaaggatgtaagatgctgaagagctactaaatgtgacatttttatcagtggcttgtatttttcttagccacattttgctgtgccctgtttttcgagaagaaacgataattctgccactctgtggcgacaaaaagcgtgtgttcgatttgccgctgggccctgggcacgttctacggcccagcgccaacggctgcgcccacccacacacccactggtggccccagcccaagacgccccgctaacatgtcatcgcaacaccaacagcaccaacaacaccaacagcaccaacagcaccacccacacacccacgaccgttcccagtcccgagatccgttccgattcaatccgatccgatccaatccgatccacagtccgtttctgttcgtctcttttaagttcatatttcgtatctgagttttgcatatttgatttttatgcttcgtgtgctttttacagtggggtgttgctggtgttttctgccgccatgggggcgtttgttgttgttgttgttgctgctgtgttcgttgtttgttcaagatcgagtgtttcgggaagtctgggggtctgtggctctgcgggtctgggggtctggggatcggctcggggatctgatctgctggtctggcctcactcagttctctgcgtgtggtttctcaagccaagggcacgtctttgttgttgccattgtggtggttgccgcttgactttggccacgctctcaagatcatgccgcgccataagctccatttggggatctgaaaaacctcagatgggcaagaaaagtgcaagtgtggggctgcaaaccagttatataccacaaaggaaaggaatcacctttgtacctatgtatattacagtttgaaatcttaatattgggtaaattacatagtcccttaagtatatgccctttatttcgtaatgacaaattattattgaatggcttacaatttatttttttccgataaaaaatgccaacacaaaagaaacataaacttacagttagtattgccttcataagatcgatttagacaagttcgttaagttaaatttccaaccgctcccaagatctctatcaatttgcgacaccacaccgccgccccctgaatttgataacccgccgccaaggggtcaactgttgtgggcgagacacacacagcacaacagaaaaataaaacacaacagcaaaatgggggaaaaaaaagcggaaagtgtcatgcgttgccaacagcaaaagcgcgcgtgtgggtgctgtgcctccccctttctgtgttttttgttgtggctgtggctgtttctgcttcttcttctgccagcaacaacaacatccgctttgctaataacagacggcagcaaaaaaccaacaacaacaaaaacgagagtgggctgaaaatgggcgcgcaggccagcaacaaaatcaattcacaacaacaacaacagcaacacaccacgcgcacatcagaacagcgatcgcagtcgacgcgaaattgtgatgggtgcgcaaacagacgccaacttgggggagtttgtgagagcaagaaaaagcgaaagagagaggcagagagaaaccggttgggcagctgaaaaatgccggttgggggaattttcgctgtctgtggctctcacgtaataagtgagagcgtgcttgatccccacactctttttctctttctcgctattggcagatgttgcattttcgcagatgccgggcaactggtaacggtaaacgcattattggctctcccttttttgggtgccagtggggtgtttttgttgaatctaatttggtgggtttttttttgggtatttgcaataattatttaaagcgtaggctaatcaaatgttatagcgcctaggcgagggcggtcatcaaagtgccaattgcagaacacacagagatattcgcagatacagtgaagattcactaagttcattgaaattgtgattcttttgatacgaactctgtaagatctaaaagggtcgttagaaaagttgtggcaggactttactactaagttaatttaaaattaaaaaaaaaaaatttagaagataattaattaatttcaaattcaaaagcttttctgatttttttaggaagttagatctgtagaagtcggcctgtagagttatgcacacagtttttaacacccgtgggttgggccaagcgatctgacaatccggcgacctggcagctcagggtgagccacaacatttacttgttgttgcggtgaaaggccacaagcgcgaccgtagagggggcgttccggtgggagggggccgacgggatgggggcggagtaccagcagcaacagcagagtcagcagacacaacagcggacgaagccaccaagctaatgacatgttaacacaatccctccactcagctccactcacctccttcctgaccccagcccctctaccaccccacccatggtaaccaacaactttgcgagcgaccagcacgcagttattaaaaaacgctttagccgatgacgcacagtgggatggaacgggtggagctgcacgaggacgttacttgcatcgcagtgcagcagtcaattactgaagcgctattctacgggttccatccacaagtccatttacagatctgaccggactgggaactgtgcacttcgattttatgacttactgtacttaaatatatattttttaaaagttaaaaaaaaatccatatacattgttttctaacagattttaaaccactgtgccattagtatttggcagcaaccactaatcatcaaaggtgggtgggtgtctagcagcaccatcgtatgtccaatccaactgaccgcagctgtcccaatgatccaaccgattccaccgaccgaccacggaataaaatcgaagattttatatgcgagccaaattaacaccgaacagcaaaaggccccaacaaaagccaaagcaacggcgactgccaacggtattctcgctgttaatttcagctacccgcgcctttttcaacgcccaccaaccaaaaatcggcggcgacagagacgcaggcgcagctgggtggctaaaatggaagggggagtggaaggggcgcgggctacgaggggggtggcgagtgggtggctcgctgggatggggcgaggtgagctaagcgcgtatctgtgtgggccgtagtagctgttgtcatcgattgcatttgttggcccattcgctgcggggctctatgtttcttttgcaatttttactttaaggaagattcaagcgtaaaatataatttttaaagcactcgctcaaaaacagctggctttctaacaaaataaacccattactcatcgtagtcagttctatcttagttagacgtcataagaaaaatctgcgagggatccccggtaacggattgcgtgttgattgttttgaataaattgaatgaataaattgtttgaataaatttcaacttcaaagatggtttccttttgaagcaaattcaaccaaatctagcagctgagttaccattttaagcctgtttagtatttccataaggactttctccctttctgcccccaaaggaaattgaattgtatccttaggacgcacgttttctcaacacttcctttcccattcccatggtggcatatccttgggttaatggggctgccggcgaacaaaggacagcggttgtggcgacatgtatatgggcggcaggtggtactttttgtggccacgatgcgatggcagctgcttctgcttctgctgctgctgtttcttctttgttttcttactatactttttttggcgtcttctctttgagcttgtttttaggtttttcgaggcggatgatggccggccagcagacaacaaaagcaaattgcttttgggcccaaaagtcttcggagctggtttcgtttgttgcttcattccaattttttgtatttagttttttttttttcctctttttgggtggttcatctgctggcggtgggcgtgcgacggcttcaagggcaggcccagaaaacaagtcagcgaccatagcttttggctatgattgcccgcgcttactttcctcatcttttgcggcggcggcggcagctgttggcaggtgcgcgccctcataaaatggccagctagccagcaaaaaaaaaaaaaacgaaaaataataaagtgaaatacatgcacaaggtacagaaatgcaggcgcagacgttgcacatgttcgtctgtccttcgccttgaggacttcaggggtcgtcttgagagacctaagtccaagccgtgtcagatgcaccctccctgatctgctccttttctggtgaaatctttgccgcatgcaacatgtgctcggtgtccgatcatccatggggtagcaatttgtgccatgttttccattccctttttaggggtggttttccgtcttactgcttcgtttctcaactgcaatccaggccgacaacaacctgctgcccagggtagagatcacttttagggttgccccgttgggctgcaggttgcagctgccatttgccagtggttggggtggccgaggggatttgggtttgtgcggggtggagtggggtttttagtgccgatcctgttgcttttgttgcggaccaacggatgcgatccttcagaaaaggaggaggaggagtagaaggaggttccaggatacatacatacgagcatgatgaatggatttggattctgaatttgaagaggatgcatttaggtgtgactttctagttgaatctatcgccaagtagcgctgtggtatacagataaattcctttagaatgatttatctgatctcattcatggcacacaaacgctttgagatagatggtagatcccctagtttcacagggcttccacatacacccatccgcattttggaatggcgatcgggttgaaagcttcaattctcgaccgtcagcaaatgactgctcctccttcgcctctcagccggttgggtttcgtgttgtactctttgggttatcatatgaacaaatggatttccgagaaaccacctacctacacacgagaaatgccacagcccaagcagccatcatcatcccaatcccataccataccatcccaatccgtgggccagcctatccgtattcgtgtataatacatatagccaagacaacccaacccaacccaaaaaccgaaacccctcgctgaaatgttgacgctggacgcctcttaaaaaaaataacaacaaccacatgcacagcagcaggcaatcagaggagtaggaggccgaggtgggggtggggcttggttgggtttgggatggggtaggagtacgagtaccaggaggaagcagtgggaggtggaggcgaggagacagacccagacccataatgaaatttcacaacaaccttcaagcagacatcgtcgccgtctgtcgtgctcttcctcttcgccaccatcattttctgagtttcttcttatttttttattttggttggtttcgttgaatattgaaaaacggtcgaaacggttggggttttttaggcaaattgtagtaggaggagtggctggtggcggtgttggtggtggtggtggtgccatagaatgagccagcgaaacgaagataatgatgatcgccgggcacaaaagcaaaaacgagaccaaccaaaactcaagacgcccaaaagattttcggttcggttcggtttggatcgactctgcccgcttttgggccaacaaaagaaatggagaagaagatgtgagtaagtctcccccctcccacctggtaggtacaccccacccacccaaagcgaacaaagaagtgagaaatgtacatacacataagaagtggattgaatcctacgcaatggggtggctgtgctgcgaaaggggacgaactccgatgccgaatccgattcaaaatcccaatcgaactgaaccgactgacgccaacaggtaaaaagtagaaaccttgaaagccgcaaaacaaacagctgctgcagagagcgggagggagaaaacaggtaaacgaggagcgcggagacgagggcaggtaactttcgggcagggggcgggtgtaacaggaaattcctatgtgattttcggtgagattgctgcctcactggggtcgcatcaccatcgtcgtatcgcatgggcataggcatcggcataggatcggtttagggattgggattgggatcggtatcgggatcggtgcagcacaacaaccctctttgcgacacgggcaggtaccatccatcggcggcgcaacccctcttttcaccctccctcccctggctgcataaaattgctctaccaccgacgacgggaagtgcgtaatttatttttgcccttttttttggggtcgctttttccatgggaatgtcgaagttgagtggcggggggaggaagccaagcgtgggttggcagtaacataacaagcggggggtccgtgcagcggacgcagaagtaagatggcagatgactcaatacggtagagttctagaaacttaagttccacaactccccacattatcaacaagtatttataactttttatttgattttgcagaaagcggatctttcagaaagagcatttcacagaaaaattaaatgtttgatttgaaacttgattatttagacagaaccgaagccaaatttgcaggtttgaagttttcagtttaaactgaatttaaaaaatatagaagtaaatttttcgctttccatatcaacaagtatttataattcactataaagttaaatttactaatatatgtacatttgtgattaaattatggaattatgttttattgcgtgtgtgttcgtttccatctccccacgggaacatgacgttttccaacggcaaccctttttcccaaccgatcgttccaatgacaactccttcgaaggcgagcaaaccacgaagatgagtccataatgaacaagcaaataatagagggcgactgtcagtgggggcggcaacacagcgagaagtggaaatgagagggaaggaggcggagtaggttgaatgcaaaagtcgctatcgatgggtgggtgtaaaaaattcatcagaatgcaaagggagagtgtgggagagacagacgaagtgataaagcagcggggaaggaaaggggacaagagccacgccaaaatgagaacctacaagaaatcaccatttgaaacagcgggcgtcgcgacggtcagtcgcctccctccccttccctacccacaccacggttttttccttctcctgcgcgcaacagggtgaaagggaaaggaagaggaacatgtgacaaggcagaacgaatagaagaaggcaggcatgatttctcgctgtgtgcgtgtgtgtgtgtctgcgaagatgataagcagggcagcgaagaaagtaggataatgagggaggaggcaaaggaggcgaaggtggcggaggagggggagtatgagcaaggattggtggtgggtttctttcgatttcttttctttttgagcccctcgcggcgtcgcatttgggatctttggtctcatttttcaggaaaggggtgcccactgctctttctgtcttttttttattgtggggcgttggagtggctcggattttttgtttttttggtttataattggaaattgggtaaccggttctgggcctagctacctgtgggttgttgggcttgtctctgcacatggccttcgaggtgatttctcgatgctcgcagattgtgtgggttcggttttggcttttgggtctgctctattaattatatgcagcaaacttccccgaaaataattaattccccttaattttgtagtcactaacaattatgttatacctttttatgctgatcagtattagttatttccagttggccctatggccattgctctccttttccgatttaggccttccagccggcttgcgttgttttccttgaattacagtcactgtttgttcacaatttgttcacttctgtttaattacaacagtttagttacaattgaaacgcaatcacgcacaatcagcagagatattcgctgtatatatttttaataagaactcgtgccaaaattcgcaagaaaaccacgcgttgtaatgattcttataataatgccgcacaaagtcaattgcaagcacgatgaagaaggaaagcgagagcgaccgaaccgcacaccacgagaaattccaacagactgagatggaaacaacaaacgatgacgccggcaatgccgacgcacaaagcagcgcacagtggggcgatgtgcggtggattcgttatccatcttaaatagtaatacgataggcatgaacaatattttcaacaactcttttgcgaacactgtaagcagaatgacatgcatttttgcagaattgtaattataattaattccggcactaaaattaaatgatttttgtttagtttttaaacacgatttacttgattcgtaaatattatcagtattaattaattacttaagcgatagttaaaactgtaaattagccccaaacaatatttatgtttcaagcccactatgcaagtggccaccttacaaacgaatgatcgcataaaagagaaattgcaacaaacaggcggcaaggcaagccacccgctcattcaagtcgcttgttgttgcttctgctgtctctctcccgcttttcagttattgtgtgtgggccggcgtcgcacagtggaaaatttgtaccgactgtcaatgaaaacatattgaaaaataaacatttcacgtttcactacaatagttcaagttcttggcaaatgaccatcattttattataaagtttttcgagctgcctgatttacaatttatttatttatttcagaaacaccactgataaccaagcacagagttccggcatttaaacatggcaattgctcaactctgcccactgtgcaatgtgggagtgggaaaccgtgtagggtggtttcagagtagaattttcggaccaggtcagtttgcgtttgcgacggcgcaacttgatttcgatgttggtggtgtcgttgctgctggcttacgtttttttttatgcgccgctcgggttggtaatgatc

SEQ ID NO: 17030 - DNA, 3710 bp, DROSOPHILA
taagaatcattacaacgcgtggttttcttgcgaattttggcacgagttcttattaaaaatatatacagcgaatatctctgctgattgtgcgtgattgcgtttcaattgtaactaaactgttgtaattaaacagaagtgaacaaattgtgaacaaacagtgactgtaattcaaggaaaacaacgcaagccggctggaaggcctaaatcggaaaaggagagcaatggccatagggccaactggaaataactaatactgatcagcataaaaagttctcggagagtggacgtggaggcaacagcaaaagcagcagcctccgccccctaaaagcaacagcagcagcacgcccgctagccaaggccgacggcaaagtgaagcacctgcaatggccacactaataccagtgaacggcggccatccagcagcgagcggacaatcctccaatgtggaggcgacatatgaagatatgttcaaggaaatcacacgcaaattgtacggcgaggagaccggaaacggtttgcatacgctcggcacgccggtggcgcaagtggccaccagcgggccaacagcggtgcccgagggcgagcagcgctcctttacaaatctgcaacaactcgatcgctcggcagcgcccagcattgaatacgagtccagtgcggccggtgcctctggcaacaacgtggccaccacccaggccaatgtaatccagcaacaacaacagcagcaacagcaagcggagtcgggcaactccgtggtggtgacggccagcagtggggcgactgtggtgccggcacccagtgtagcggccgttggtggcttcaagtccgaggatcatctgagcactgccttcgggctggcagccctgatgcagaacggtttcgcagccggccaggcgggtctgctgaaagccggcgagcagcaacagcgctgggctcaggacggatctggtctggtggcggccgcagcggcggaaccacaactcgtgcagtggacctcgggcggaaagctccagagctacgctcatgtcaaccaacagcagcagcagcaacaacagccgcatcagagcacacccaagtccaaaaaacaccgtcaggagcatgcggctgaattgatctacgccagcccctccacatcggccaatgcggcccaaaatctggcccaatccacacccacctcagcgcccagcaacagcagtggcggcagcaccagctcctccggcggaggaggcggtcggaagaaggccgcccaagcggctgcagctgccgctgcggcgaatggagtgcacatccagaagcgttacgcctgtacgcactgtccatactcgacggaccggcgggatctgtacacccgacatgaaaacatccacaaggacgagaagcccttccagtgctatgcctgcctcaagcagttcaaccgagccgatcatgtcaagaagcacttcctgcgcatgcaccgcgagctgcagtacgacattaacaagacccggcgacatgtctccgctggcagtggttcctcgggcagcgggtcctctggaagcggttctcatcactccggcggccgtggaaatgtgaccattaactcggcgggcgtgaacatagacaatgcctttttggaggcccaacgacatcccacctcgagcagtatgagcattgtggagaccatcgaggcagtggcttcggcaaccgacatgccgctggcccagcttaagcaggagaaaatggacgatggcgccggtgtggtattgccccttcacgtgggcgttatgcaacagccggtggccagctcgagttccggcagcagtggcagtcatggtggcaacggaaacggtggcagcggctccggcctcctgaaaccgaagcgggagaagcgattcacctgctgctactgcccgtggtctggagcggacaagtggggtctcaagcggcacctcaatacgcatacaaagcccttcgtttgcctgctctgcgattacaaggcggcgcgttccgagcgcctggccacccatgtgctaaaggtgcacaacaagcgggcctgcagcaagtgctcttacttggcggacacgcaggaggagtaccaggctcacatgagcgatgtgcatctgctgaaaatggacgccattagtcgcaacaccgcttcggtcgctcaggattttcataaggcgggaggcgtgcacgagttgaaaataccagccaatcatcaactcctgtttaacaataaactgccttcgcaatggacgacacgagaggctgctgcactgctgtacagcctgagcaacatgggtggcggatccgccagctccgtttccggatcccagcgccaaaagtttggcatgcgagcgcgacaacattccaccggtgaggatgacgagaatacaccatcgtctgcatcttcgtcgagcttctctggcgatgagttcaatatgagcgccacatcgccattgaagctgtcgcgtcatgccatcaagctggagaagatggatgaaatggacgccaaggatatgggacccaccaaggcgatgatggcaacggcatttctagaggcggccaactacgagcagacggccatcgagctgctggccagcaaacggaagatcaaggtcgagaacgacaacgacgaggaccaagagaatcagcagcatcagccccatcagcaacatcacagccagcagcagcagcagcagcgattgcagcttattaaatcgtctcccgcgtacaaattgaacaacaacaataacaacaatagcaacaacaacaactattacaaggacaagacatcgcacagaaatgccgttcaccatcatcgccaggatgacaaggaaaacaacaagaccaagtcgccaggcacagcagcagtaagtgttgcagctgcggcagcaacatcgccgccaagcatcagcggccccagcaaccagactccattcctcacccaaatggagtaccagaatctcaatcgcattggcacccagttccagaactacgtcaaggacattatcaacaagtactatgcggcagagacgccactgatgttggccgctgcagcagcagctttgcccacggccacgactacaggtcagcagcaacagccagagctggacattgagaacctgtcgccgagcaagcgtcgtcgtctgctcagcgaaacggaggagtacatcgagtatctgcggaacaaggaggacataaccctgaccattgctccaaaggttcagccaccagcgccggtgacatctctgcttaaacggcagttggatctcagcacacctcgtcggagtcccaagaaggcggctccggcccacagcaacagtgcctcgaatgcctcccgcaagtccctcaaccagttggccaccctattgccactgcttgcggatgcggccagtcagcaagagtatctcgctgcaccgctggactttagcaagaagtccagctcgcgcaagcaggcgcagccaaagaagatccgcttgacgcccgaggcggtggtcaccttactgagggacaagtacctcaatcgcatggtacgtcagcgtttgggctgcctcaagtgcaaccagttgcgtaagaacagctctatcagcttcaactaccacactctgggatcgctggctctgcacaagtattggcgacatggccggcttggatcctcatcaactaggagagagaagctgcaggcagctctgcagaagaggattagccgaggacaggcggacaaatgctaa

SEQ ID NO: 17031 - protein, 1108 aa, DROSOPHILA
MATLIPVNGGHPAASGQSSNVEATYEDMFKEITRKLYGEETGNGLHTLGTPVAQVATSGPTAVPEGEQRSFTNLQQLDRSAAPSIEYESSAAGASGNNVATTQANVIQQQQQQQQQAESGNSVVVTASSGATVVPAPSVAAVGGFKSEDHLSTAFGLAALMQNGFAAGQAGLLKAGEQQQRWAQDGSGLVAAAAAEPQLVQWTSGGKLQSYAHVNQQQQQQQQPHQSTPKSKKHRQEHAAELIYASPSTSANAAQNLAQSTPTSAPSNSSGGSTSSSGGGGGRKKAAQAAAAAAAANGVHIQKRYACTHCPYSTDRRDLYTRHENIHKDEKPFQCYACLKQFNRADHVKKHFLRMHRELQYDINKTRRHVSAGSGSSGSGSSGSGSHHSGGRGNVTINSAGVNIDNAFLEAQRHPTSSSMSIVETIEAVASATDMPLAQLKQEKMDDGAGVVLPLHVGVMQQPVASSSSGSSGSHGGNGNGGSGSGLLKPKREKRFTCCYCPWSGADKWGLKRHLNTHTKPFVCLLCDYKAARSERLATHVLKVHNKRACSKCSYLADTQEEYQAHMSDVHLLKMDAISRNTASVAQDFHKAGGVHELKIPANHQLLFNNKLPSQWTTREAAALLYSLSNMGGGSASSVSGSQRQKFGMRARQHSTGEDDENTPSSASSSSFSGDEFNMSATSPLKLSRHAIKLEKMDEMDAKDMGPTKAMMATAFLEAANYEQTAIELLASKRKIKVENDNDEDQENQQHQPHQQHHSQQQQQQRLQLIKSSPAYKLNNNNNNNSNNNNYYKDKTSHRNAVHHHRQDDKENNKTKSPGTAAVSVAAAAATSPPSISGPSNQTPFLTQMEYQNLNRIGTQFQNYVKDIINKYYAAETPLMLAAAAAALPTATTTGQQQQPELDIENLSPSKRRRLLSETEEYIEYLRNKEDITLTIAPKVQPPAPVTSLLKRQLDLSTPRRSPKKAAPAHSNSASNASRKSLNQLATLLPLLADAASQQEYLAAPLDFSKKSSSRKQAQPKKIRLTPEAVVTLLRDKYLNRMVRQRLGCLKCNQLRKNSSISFNYHTLGSLALHKYWRHGRLGSSSTRREKLQAALQKRISRGQADKC

SEQ ID NO: 17032 - DNA, 4409 bp, DROSOPHILA
tgcgtagattgtcgtgttgcttctttacgaagtgatcgaagagctgtaaaaaccgttgacattgaggcaggtcgggattgacagactgctgattggtatatttacatatgtgatgacccagaaggtggcccgtaggtagagcattataaagtatgcatcgcagcgccgatcggttggaaacgaggctgcaagtacgatccccacaatggagattgcagtggagataaccagatgaaggctacgggtggacagagaatggattaaattatgtgcattatcggtcgtttgaaagctccatggatgattcactgccgccggctgaggtctctcccccgtacaccgcataaaatctcacctaaatgcgggcactgtatttagcttgtagcttccattgtcgttggagaagaggacggggtccaggagctgatccgtgtcgtggatgtgcgctggggacacgcccggttggacagcggcgcctccagttgctggttgctccatttgctctgctctagaatgcgtagttttcgaactattgctgctttgtttatttgtcggcaggaaaacaacacttattttccttggatgtggcagcactgccaaaatattgcttttttcagggtggcagctctgtgatgaccatgaaaaacaagacaaccctaaaatgtaaacaataaacttactgttagaatttgaatatctaatttatttatttaagccattcttacttttaaatcattttgatgtattttatacatcactctccctcactcaaagagtgtgcttttatatttgcttgttgtcaacactaaattataatttaggtagttttcaatatttcttaatttaaaatattaaacatttatttaaatcctcattttcgtttaattattttaaaacttagccttcggctacttaagttttattaactattaaaggcttcattcagcgcgctttggatgttttaaattttgaactttggtcacacttgaataaaaaataaatttaaaccccgcatttgatttgcaattggatatttaactatttgtcgggcagaataaatcgggttgcaagatgaccacgcctgtgccccgccgcaccaaggacatgatggcactgggactggactccgactccgaggacgactttaacacgccataccgaccacgacaagcggcggcgggagaacgaaaacagcagccggtggcgtctttccaagtccaaacgaggggcaaggagaacgaaccgcatcccctgcccataaatatgctgtaagaactgggacagcaatgtccagtatcgcatgacatctcctgttctccatacataagtcctcctgagtctgcaaggatctaattttccatgaattctttcaggaatcctagatcttttctttccaaattggtctgtccatcgaaactaacctgtatcttctaggcttagtatataccctaaaagttaatctatattaacccacaagtcgagggatttttgttacaagatcacctagaaatgttcattacttctacatacaacgtttttatcgattctagacctcgccgagtgtccgagttgactatgatggattcggacagtgacgaggaggacatcaagagcaatcacaaccttaactgcgccatcctaaacgattcctttgtgctgagcccatcccaagagttaacaaacagcaacagcaacataaccactcgtagaacaccaagtgccgccccccttaagcaatccgattcgaatctctcgttcctgggaagattcaacgacatgggcatcaattgcagcagtcaaggatcccctgttgcgaattcggaaaaacaggtggccaaaaagacagcacccacgcttcaagctgcaccaagtgccaccgaaaggcgcccactccaagagacagagacgccactgcgtaatgaattaccctccacctcgaagacgaagccggatgcagacttcattaccccccaagtacgaacaattggttccacactggcgggaaaaagtcggagtgcggtgtccaatgacttccgtgcgcagaaagtgctcttccaaacacctatgaccgtgagtcgtgctgctccagtggcctccgatagcataagcttctccctgtgcgacaccatcacagaaagcccggacattccggagcctccgaaaaaggcagaaccaccaaagagtcagcatccttccaaaaagtccctagatcatgttttccgggagtcggacaaggataacgtgccagacaaagtggataatgtggaaccaaaggagctggtatcgattcccgcagttgctgtacctccagagcagccttcccacaagacatctaatattttaaaaatcaagaatcatgagtatacgattgataagaaactgggctgtggcggctccagctctgtttttttggcacgccgatcggattccggaaatgagttcgccctgaaggtggtggatctgcaggccgatccacaagtggtgcagggatatctaaacgaaaccaaacttctggcaaagctacaagggaacgtttgtgttgtggcactttacgattagtaaatatttctaaatactgacttcttgttaacgtcactgtttaagtacttttttttccttagtcaacttgtgcgcgaggagtccaagctgtacatggtgatggagaaaggtgactgcgacttgaacaagatcctgcagagctacaccaccaaccttcctctctatagcctgatgaacatcctgtaccaaatgctgcaagcggtcaactacattcaccaacacggtgtcatccattcggatctcaagccggcaaatttcctgatggtcagcggcagactgaagttgatcgattttggcatagccagcaatatcgctgtggactcgacgagcatcatcaaattctcgcaggcgggcacctttaactacattagtccggaggcgttgacggacacctccacggggaatagcccgatgcgcagagccgatcagccgaagatcaagatctcgaccaaatcggacgtgtggtcgctgggctgcatcctttacctgctactctaccaaaagacaccgttcggccacatccgaaacgtctatgccaagatgagtgcaatcaccacaccgggcaccagcatcgagtatcctgccattccgccctactatcccatcatgctggttcatgtgagtgttgcgcaatatgaggcttttagactaacataagctaactaaaattataaataaattgaatccaagtttacaactgtctctgctctatttgcagatggccaagaactgcctacagttgaatcccaaaaagcggccgtcgtgcaccgaactactacagtacccattccatatgatcattccgctgcagaacctgcagatacccagcagaaccgccaacagcaattaagcacgaaagctcagctatttattagtgaaatgtcaaaggtcaaatgtctttctcatatgtgtgtgtatatatttaattctcattttatcgtaaattaaacatcataaatccttataatgctgttatagctcgttcttttgtttgttgtggttgctgatgggcttgaatttgttggttttcctaatttttcagtatgtcgcatgcaacaggttccgacaatagattgctagttagcattcgtgtttaatttgcgtttacttataagataggttctcattcagttttatataaaaatagttgttttcttgtttatttacgcttaattaaatgttgctgctgccatttgctcttcctgggattaaatactttgcgctgcctggcggcggaaaattaaaagttaacacaaaaacagaaaacatgaatggaaaacatacaaaattcacaatggcccaagtacaagagcatacgtacattcatactattattttgtttatttttttgtggatttgcattttaagtagctgggttttaaattcatttgcttaacataagatacatatacaattgtttaaagcgcgtttttaaatgcaagtgtaacacaaaaataataatcgcatgcaaagtatgtgttaaataataattagaaagtagcagcagcaatggatttttcgcggtttttccgggttggtttgctttttattgggagggcttgggtggaaattgcctgtttctgtaatcagagtcggacttttcctttgctagcatttcttctcttctcgtttaacattgcacaagtttcgattgttatcattatcttgctttagttatgtgtatataatttcttaaagcgttccatagttcttcattctcataattgttggttctcgctactataaaatgttaaatgttgctgttgtggggcatgctttaggtttacttttttctcgccttttttttttgttacattaactttaaacttaatagattgttagagttgttt

SEQ ID NO: 17033 - DNA, 1964 bp, DROSOPHILA
atttaaaccccgcatttgatttgcaattggatatttaactatttgtcgggcagaataaatcgggttgcaagatgaccacgcctgtgccccgccgcaccaaggacatgatggcactgggactggactccgactccgaggacgactttaacacgccataccgaccacgacaagcggcggcgggagaacgaaaacagcagccggtggcgtctttccaagtccaaacgaggggcaaggagaacgaaccgcatcccctgcccataaatatgctacctcgccgagtgtccgagttgactatgatggattcggacagtgacgaggaggacatcaagagcaatcacaaccttaactgcgccatcctaaacgattcctttgtgctgagcccatcccaagagttaacaaacagcaacagcaacataaccactcgtagaacaccaagtgccgccccccttaagcaatccgattcgaatctctcgttcctgggaagattcaacgacatgggcatcaattgcagcagtcaaggatcccctgttgcgaattcggaaaaacaggtggccaaaaagacagcacccacgcttcaagctgcaccaagtgccaccgaaaggcgcccactccaagagacagagacgccactgcgtaatgaattaccctccacctcgaagacgaagccggatgcagacttcattaccccccaagtacgaacaattggttccacactggcgggaaaaagtcggagtgcggtgtccaatgacttccgtgcgcagaaagtgctcttccaaacacctatgaccgtgagtcgtgctgctccagtggcctccgatagcataagcttctccctgtgcgacaccatcacagaaagcccggacattccggagcctccgaaaaaggcagaaccaccaaagagtcagcatccttccaaaaagtccctagatcatgttttccgggagtcggacaaggataacgtgccagacaaagtggataatgtggaaccaaaggagctggtatcgattcccgcagttgctgtacctccagagcagccttcccacaagacatctaatattttaaaaatcaagaatcatgagtatacgattgataagaaactgggctgtggcggctccagctctgtttttttggcacgccgatcggattccggaaatgagttcgccctgaaggtggtggatctgcaggccgatccacaagtggtgcagggatatctaaacgaaaccaaacttctggcaaagctacaagggaacgtttgtgttgtggcactttacgattatcaacttgtgcgcgaggagtccaagctgtacatggtgatggagaaaggtgactgcgacttgaacaagatcctgcagagctacaccaccaaccttcctctctatagcctgatgaacatcctgtaccaaatgctgcaagcggtcaactacattcaccaacacggtgtcatccattcggatctcaagccggcaaatttcctgatggtcagcggcagactgaagttgatcgattttggcatagccagcaatatcgctgtggactcgacgagcatcatcaaattctcgcaggcgggcacctttaactacattagtccggaggcgttgacggacacctccacggggaatagcccgatgcgcagagccgatcagccgaagatcaagatctcgaccaaatcggacgtgtggtcgctgggctgcatcctttacctgctactctaccaaaagacaccgttcggccacatccgaaacgtctatgccaagatgagtgcaatcaccacaccgggcaccagcatcgagtatcctgccattccgccctactatcccatcatgctggttcatatggccaagaactgcctacagttgaatcccaaaaagcggccgtcgtgcaccgaactactacagtacccattccatatgatcattccgctgcagaacctgcagatacccagcagaaccgccaacagcaattaa

SEQ ID NO: 17034 - protein, 630 aa, DROSOPHILA
MTTPVPRRTKDMMALGLDSDSEDDFNTPYRPRQAAAGERKQQPVASFQVQTRGKENEPHPLPINMLPRRVSELTMMDSDSDEEDIKSNHNLNCAILNDSFVLSPSQELTNSNSNITTRRTPSAAPLKQSDSNLSFLGRFNDMGINCSSQGSPVANSEKQVAKKTAPTLQAAPSATERRPLQETETPLRNELPSTSKTKPDADFITPQVRTIGSTLAGKSRSAVSNDFRAQKVLFQTPMTVSRAAPVASDSISFSLCDTITESPDIPEPPKKAEPPKSQHPSKKSLDHVFRESDKDNVPDKVDNVEPKELVSIPAVAVPPEQPSHKTSNILKIKNHEYTIDKKLGCGGSSSVFLARRSDSGNEFALKVVDLQADPQVVQGYLNETKLLAKLQGNVCVVALYDYQLVREESKLYMVMEKGDCDLNKILQSYTTNLPLYSLMNILYQMLQAVNYIHQHGVIHSDLKPANFLMVSGRLKLIDFGIASNIAVDSTSIIKFSQAGTFNYISPEALTDTSTGNSPMRRADQPKIKISTKSDVWSLGCILYLLLYQKTPFGHIRNVYAKMSAITTPGTSIEYPAIPPYYPIMLVHMAKNCLQLNPKKRPSCTELLQYPFHMIIPLQNLQIPSRTANSN

SEQ ID NO: 17035 - DNA, 4198 bp, DROSOPHILA
ttcatcccgtccacagagcagcggtacgcccgtgaaggtctccggtgaggtgtgcggcctggccaagggtctgcacggattccacgtgcacgagttcggtgacaacaccaatggctgcatgtcgtccggaccgcacttcaatccgtatggcaaggagcatggcgctcccgtcgacgagaatcgtcacctgggcgatctgggcaacattgaggccaccggcgactgccccaccaaggtcaacatcaccgactccaagattacgctcttcggcgccgacagcatcatcggacgcaccgttgtcgtgcacgccgatgccgatgatcttggccagggtggacacgagctgagcaagtcaacgggcaacgctggtgcccgcatcgggtgcggcgttattggcattgccaaggtctaagcgataatctattccgatgtcggccactgtgctgatctactctatttagcactacccactggagatatacaaacgatatacatacttctaaacataaatacatagcctgtggtctgttagttgatacgcaacctttgaggttcaataaattggtgttttgaaattgccccataaacaaaagttatagttttcatttgagttgagatggtaagaatgaatatatcacttgttgctcgacgaattcgcaagtagaatcgggttatagattcgtatgaaatgaattacatattagatgagtgcagaacccaaaaatcacgatgagacacacattcgttcatgttttgataacatatctccgttttagattatttatttatttttgtaattactttggttactctccgggcagcctggttaaaagtctttaaaacacactttataaacaatgagttaggtagtattatttacaaaaaatattgtaaatcaagatactcgccacatgagtagaaactaatattaatttcgtgtgcggtataaattcactacaaaagaacaaagtcatatactacgacggggatttaaatgaacctaggtcttgttgaaatatgattggtagacaatgcccagcgatgaagtggcgaatagggtgaagtagctccaccaggtggcaaagcccaggaaacccttgtacacctccgtggagaaaacctgaaaaagaaattatgattaaaactggcattgacgtgcacagcaaggattcttacgtttttcaggctgctaaacgaagcctgcagcgattgcgccgactcaataatattaaagtcaccatctccttgggaaacggcaacaccagctccttccgtttcgctagccgcacactcgtgctgcaggacaacgctctcgcggaaaatacccgaccagctaaagccgcccagacttttgtacataagtgtgagataaaggcataggatcagtggggcagcaaattgcagcgtcacaacacatagatagtagaaaatagacgagatctgtaaaagggaaaggaggatttactcgatgaacgtttgtataaaataaagactgcctccaccttctgcttgaactctacgttggtgatccgaccggcctccttgcgcagatccatgatcttgtcgtgggccagattcaggtacgattgcagatatatgggcatcaaggcgaaacgaaccaccaccacaaagatcactagcagcaggcgaagtgtctcaaaaacgtgtggcttcagtctgcaaaaataatcgggatgaacttgttaattagtaaaaactaatttaatgtgagtaggttaactcacagtggctgttgcattccttggaagacgcgcaccgtcaggtaatcgcggctaatgggccgaatccacaggatgaccagaataaagggcagcacaaagctgagattcaggagcacttgcagcaaccggttgccgcgacagtacttcaacgaatcccagtgcatcttggccatccgcaagccggggaaggtgaacaatgagccgagcaggccgcaacccatggccaaaaagaacttgaccacgatcttggaggcgggaccactgaaaaaataagaataagagtgtaaataaatagagatacgcgaaacaggggcgaactcacgatgatggcaggccctgctcggtgaggaacttggaagcgctggcattaaagctcgcataggcatcctccagtcccgtctccagaatgcgctcgtcaacgatcagcacgaccatggccaccagcaggtaaaccaaacaggcaacaatcaccatcgacctctcgccgatggactcctcgctctggaagtagagcaccgtaagcgaggacagcagcttcagggcaaagaagatgaccagcaggcaccacaccatgctcaagttgacctcgtggcgcagcgggtagtagaagtggaacagctgtggaggggaatccaaaattagtaagttatggtatgcattcctagaactaggatcacagtagtcggattttcaggcgaacaacccgagctttacccacctcggagaccacgtagacgatccccgtgtagacactgaagtccagcagccattgatattcggtgaagtagcgcaggtggacaacatcccgttccaacaccggtgacgtcaacagctccacctcaatgctgcgcggtatgtggaattgtgcacccgccgctcctcctgaaccatttgcctgcttatttcgaccaccttttggtggcttctccttgggcacaccgccgcgggaccgcagctcatcgtccgtgggatgcaggtatcgatagagtccggtgcggcacagaatccacttggcgaaggagtagtgtggactcaacttctggataacgctgaccatcaccaaggtgatgaccaattgggcgcccagcacagcctgcaatggtttcgagagacagcttattagaagacatttgggagcacatgtagtggctatttttgggtcactgcgctacggtctatttttggtccattattacggcggacttttcatttttccgggcaagccggttggccagttgtacccaattaaaagtccagttttccgtcatgtccactcatcttaccatcgctttctattgccgtggagccgagaaaatgtgtgaagttacagcttgtgctaattccagcgttaattaattcatcattgttaattaaaaacggaaatctcgaacaattttcgttgaaaattttcttttgtgcgggcagtgtgaccgtttttgcttgctgaaaaacgtcgaaataaaatatggcacacttttcgcgaatcagattagcggtttttttaaatctggaaatgttcaatttaacctaatttcactgtttttgttttgtgagtttttcaattaaatgttttaacaacattcctttgactttagtttcctaaataaaactatttagctatatccaaattcctgtgaaatctgaaaaatgtcgcatgggaataagcaaaatttcaccaagatctgggatcttggaaagtgggaatcgcgggatataaagcattacagcacaatatcgcgaatccaaaaacaactacgtctcggaaactgggaatatctctgtcagcatccagaggtattgatgcgattcaaattttcaagcctaccgattcagtcaatcgcctttttttgtttcagatacgggccataattcgtgttatccttcatcaggcactcaatggaaaaccgaagccggaaaatctccgaaaatttgttgctgatttgttcaactgcgcacagaatccgctgctagtgcctatggtaaaaaaaatgtctacgcccaaacgaatatatcttaaaatatttatgtttttaaataaccaaatttgcgtagattaacacacagctgaagtacgttaagaacgaattgaaacgtggccgctggagtcagttcgacgccgagatgctcttcatggagagtccatcgacgcactcactcctctcgacggcatccgaggatagcaatgtccatccggtgcttacatatgcgctggtcttcaagaaacccgatgagtgcggcatcgacaagccgccgttctagcaccaaaactaaatttatgtattaaagtccaaagtactacaattaactccttggtttgcgttcattggaatctcgaaaagattggattgtgcaagggcaaaagctaatccaaatatatacatatgctgtttatgcattttttacatctttatttactattggagtctattttatcagtagtgtatcgttagaagaag

SEQ ID NO: 17036 - DNA, 1625 bp, DROSOPHILA
cgacgtttttcagcaagcaaaaacggtcacactgcccgcacaaaagaaaattttcaacgaaaattgttcgagatttccgtttttaattaacaatgatgaattaattaacgctggaattagcacaagctgtaacttcacacattttctcggctccacggcaatagaaagcgatgatggtcagcgttatccagaagttgagtccacactactccttcgccaagtggattctgtgccgcaccggactctatcgatacctgcatcccacggacgatgagctgcggtcccgcggcggtgtgcccaaggagaagccaccaaaaggtggtcgaaataagcaggcaaatggttcaggaggagcggcgggtgcacaattccacataccgcgcagcattgaggtggagctgttgacgtcaccggtgttggaacgggatgttgtccacctgcgctacttcaccgaatatcaatggctgctggacttcagtgtctacacggggatcgtctacgtggtctccgagctgttccacttctactacccgctgcgccacgaggtcaacttgagcatggtgtggtgcctgctggtcatcttctttgccctgaagctgctgtcctcgcttacggtgctctacttccagagcgaggagtccatcggcgagaggtcgatggtgattgttgcctgtttggtttacctgctggtggccatggtcgtgctgatcgttgacgagcgcattctggagacgggactggaggatgcctatgcgagctttaatgccagcgcttccaagttcctcaccgagcagggcctgccatcatctggtcccgcctccaagatcgtggtcaagttctttttggccatgggttgcggcctgctcggctcattgttcaccttccccggcttgcggatggccaagatgcactgggattcgttgaagtactgtcgcggcaaccggttgctgcaagtgctcctgaatctcagctttgtgctgccctttattctggtcatcctgtggattcggcccattagccgcgattacctgacggtgcgcgtcttccaaggaatgcaacagccactactgaagccacacgtttttgagacacttcgcctgctgctagtgatctttgtggtggtggttcgtttcgccttgatgcccatatatctgcaatcgtacctgaatctggcccacgacaagatcatggatctgcgcaaggaggccggtcggatcaccaacgtagagttcaagcagaagatctcgtctattttctactatctatgtgttgtgacgctgcaatttgctgccccactgatcctatgcctttatctcacacttatgtacaaaagtctgggcggctttagctggtcgggtattttccgcgagagcgttgtcctgcagcacgagtgtgcggctagcgaaacggaaggagctggtgttgccgtttcccaaggagatggtgactttaatattattgagtcggcgcaatcgctgcaggcttcgtttagcagcctgaaaaacgttttctccacggaggtgtacaagggtttcctgggctttgccacctggtggagctacttcaccctattcgccacttcatcgctgggcattgtctaccaatcatatttcaacaagacctag

SEQ ID NO: 17037 - protein, 484 aa, DROSOPHILA
MMVSVIQKLSPHYSFAKWILCRTGLYRYLHPTDDELRSRGGVPKEKPPKGGRNKQANGSGGAAGAQFHIPRSIEVELLTSPVLERDVVHLRYFTEYQWLLDFSVYTGIVYVVSELFHFYYPLRHEVNLSMVWCLLVIFFALKLLSSLTVLYFQSEESIGERSMVIVACLVYLLVAMVVLIVDERILETGLEDAYASFNASASKFLTEQGLPSSGPASKIVVKFFLAMGCGLLGSLFTFPGLRMAKMHWDSLKYCRGNRLLQVLLNLSFVLPFILVILWIRPISRDYLTVRVFQGMQQPLLKPHVFETLRLLLVIFVVVVRFALMPIYLQSYLNLAHDKIMDLRKEAGRITNVEFKQKISSIFYYLCVVTLQFAAPLILCLYLTLMYKSLGGFSWSGIFRESVVLQHECAASETEGAGVAVSQGDGDFNIIESAQSLQASFSSLKNVFSTEVYKGFLGFATWWSYFTLFATSSLGIVYQSYFNKT

SEQ ID NO: 17038 - DNA, 4067 bp, DROSOPHILA
tatatatattcctgttgagtatgcgaggaagtgctcgatgcctatttacactttacttaggaatagaggagtacgggtctttggaaatgcatttgtctttacagttacgtacttaacatagatgtaggtgtatgtgagtaggtatattcggtatgctgaggacccttcactcttgatttgctaatcgattcgctaaatgtgggtaccgttattgccgagcctgagcacggtttctcatccgtctcaagtcccgcctaaagtccatctctcctgccattggccatcctatcaccgcaccgccctgccaaaaagtcgagcctccaacaggttccacagccagttctcccaggcggcgaaaacccagaaacttggccacaacagcaaaaacaaaatcggatgccaggcaaatggtccgcaagccgcatctgaaataaaacagaacagaacagatttgcttaggcggggctagagattgaaatccgcttcggaaagggcactcgccggtgaaattaatctttgaattaattgcttccagcttagcgcagagcattaataaatcgctgccggtcagagggccaaacacacaaggataataaggtgctcggttctttttcgctaactttgatttaatgccccacagtttatcactgtaatggcgggcgtataaatgtttcccctgtgcatatacatatgtactcgtatgtatggcatgtaaaaacaatcaggacaagatcttcaggcccgcttgggtcagttggttccctcatcttcctttctgtcggcttatttttcggcagaacaagctcacctaataacgaccgaaagtatcttatcttttgattgtctttgtaaattatttatacgttcgaaatagtgaaaagttacttcctgatttttccatgggtgaattgtattgtaattgtacttacttgaatggatcaaaaatagttcgttatgctcatctgcatcccctggctgatcaaatggatacatattcatatcaggtgatctgccagaggccagaatcctgggacgatcttcctcgattaatttttcgctctcctgtgcgtaaatttcgtgtatccttgccgaacatttcaactgcaaaattaattgaaaatttttgtttgttcttttgctgctaaggaatgtcgacttacctttaagcgactcttgatgaagtgatgtaccgtcaccacgaatttgatctccaaaaccgccgactccagatgctcggccacgtgccgctgaatgtcgtagatgcggagataattgggtggcacctgtatgtcattgatccaccaggtgagattcgcagccggcttggagtaatccgatgagcagttcccatttataacgtcccccagacggtatcttgaatggatgccagtaattatgggtcgttgggtgggcaattctgcggcagaacgcgctgtgggttagtgggagggtatgagaaacatctgcttacttaccaaccacctccatgtcggcggccacgatggaagtatcgaaggtgggtgcatctgcggacacttcgcaggcaaatttgcccgatattgaggtgggaacatttcgcaaaagaacgtggctggcattcgattgggcagtctgcagagtatagagaatttgaaaagtaccagatgaagttaaatcttttttggatgtcaatgtatacattgaatgaatcatcaaaccggaactaataatttgtcaacacccattgcccttacatatacaaacatcattttttgtaataaattatttgtgcgcaggtaaatagagcttgtaaagcaaccaccaactatttgctttcagcttttacgtacatacatatgtaagtgattacataagataggcgtaaacttctttgctgcgcatcgacaatatttaaatatacactttttatttcatgcggtttttgtactttttcccgttttaatatcgaaatgtcagctaaagtcaacactgagagcgcagcaaatgggaagtcaaaattgttaattaaaactttttaacatgcataaaaccaacatggatgcacacatgaacatcgaaaacaggtcgattgtttgcaatgccccctgctgcaactgctgctgtcgttaataccatcagcagccttgcagcagcagcatcaacaacaacattgcaactgcaaacagcagcagcagcaacaaagaagcccatcagcagcactttgccttcagttatttaaagcaatttacattggcaactttttgctttcgttgctttggccctccgtgcctgtctttcagtttcaataaagcccgtcatcatcatatcacagcactaagcgagtgttgccaacttggctattaatagccatttaagccatttaatcagcattcgacaaccaaaaaaacgcggaaaaataaaaaatgtaaaatacgcttttgtaaattccccttttgaccaatctgtctcagtaaaatcctttgctttttatattttcaaaatgtataaccaatttttaatgccggctttttaattgtttttaatattatttttgtataatttaaaattatacacaattttaaatttatatattttattttagtttatataaaactttttttttattagtttataattttagttaacatttaaattgtagccttttaaaatagccacttagttgacatctctgcactcacctcgacatcgatttcgttcgttttggtgaatatcttccaggccggattttccttgggcgtatagcggtagaactcccgtctgccacgataccatttcaccgtgtagagcgtgtcgttctcgatgtcataattgcagattaagagcgcattatcgccacgcttaacggcggacggtatgcgaacgttgacgttccgcagcccaacagtgagacctggaaaaagaggacgggagcgttgtaatgagttgtggccatggactcggagtagcagccgggggaggcttaaatatgacaagttattgtggcttaattatgatcccccagtggattacacgggattccacgcgtacggtagcaacttaaactgttcctcaccaaggggtaaatcatgggaaataagcccaaaaataaacaaactttaaacatttatataaaacacactctaattacacctttacagctggtaatgtattgtgaaatctttaagtgcaagaaaaatatgacgcttaaatagcgccttaaataagaatcctgaaaaatcatgattacttaaagttatgcccaataatatttgtgatttacataattaaaaaatatatgaaataaaccttataaatatttatcctatattgatatatatattttttatattatatttttttatattttttaaatatttttcttttgatattatttttatgtataagcttatatttatttttggcgctgtgtaccgcacctctgctgcgtggaataaaaagtaggtcaccgaccatgaaacccccgaaaaaggccaaaaacaaataaactctccggtatacgaatagcccgcgtgtgtgaaagagacaaccggaagagtcgccctcaaaaagttgattataaaatacaattgtgcgatcagcagttggaacgcctgcctcaagctgttcgcctgttcgaaattataaaaagcttcctagaaaatttaaaaccgaaagtgaatgcttcagaaggggctgatgctccccgagagagccgtaaatcataaaggggctcggttttttcttttacaagcattgattgctcgtgaagtgaagtctgccatgtaggaaatcgagttggggcaggcgaccaggtgcccagaaacttcaggtggaccccactgtcaaaggttgctgggcagctcgcagagttcattgacctccgggaaagaagctaagattttgtggctgtgagcatattataacagatgggagatccgagtaagtggtagtttatgggtgcgtatctggtgtttgggtatctcgagtggaaagtatctttgcggcgatggcagtatttaaatcaattttgtatctaactactacacttgatatacttgcataggaggttgaatctgtaaaattatggg

SEQ ID NO: 17039 - DNA, 672 bp, DROSOPHILA
atgatttaccccttggtgaggaacagtttaagttgctaccgtctcactgttgggctgcggaacgtcaacgttcgcataccgtccgccgttaagcgtggcgataatgcgctcttaatctgcaattatgacatcgagaacgacacgctctacacggtgaaatggtatcgtggcagacgggagttctaccgctatacgcccaaggaaaatccggcctggaagatattcaccaaaacgaacgaaatcgatgtcgagactgcccaatcgaatgccagccacgttcttttgcgaaatgttcccacctcaatatcgggcaaatttgcctgcgaagtgtccgcagatgcacccaccttcgatacttccatcgtggccgccgacatggaggtggttgaattgcccacccaacgacccataattactggcatccattcaagataccgtctgggggacgttataaatgggaactgctcatcggattactccaagccggctgcgaatctcacctggtggatcaatgacatacaggtgccacccaattatctccgcatctacgacattcagcggcacgtggccgagcatctggagtcggcggttttggagatcaaattcgtggtgacggtacatcacttcatcaagagtcgcttaaaggattctggcctctggcagatcacctga

SEQ ID NO: 17040 - protein, 223 aa, DROSOPHILA
MIYPLVRNSLSCYRLTVGLRNVNVRIPSAVKRGDNALLICNYDIENDTLYTVKWYRGRREFYRYTPKENPAWKIFTKTNEIDVETAQSNASHVLLRNVPTSISGKFACEVSADAPTFDTSIVAADMEVVELPTQRPIITGIHSRYRLGDVINGNCSSDYSKPAANLTWWINDIQVPPNYLRIYDIQRHVAEHLESAVLEIKFVVTVHHFIKSRLKDSGLWQIT

SEQ ID NO: 17041 - DNA, 3636 bp, DROSOPHILA
actttctcggttgtgccaggtgcctcagtggctggtttctcagtggtgctctcatccaggttgctcggcggaatggtagggttctcgatgttgctatcatcacgagcctcgaaagcggcaatggactgaacgcactgggccatcgaggagctgaagaccagaccagcggggcagcgcaggaagcgcagagagtagccaccgtaggcggttgactggcaggcatagaagtcgggtgtgttatccactagggcgaagtagccgctgctgcggcacagggacttggcctggatcgttgatggggccaggatgagggccaggcccatcagcatcgttagcttaaacatttcgtttggggtttcgtttttcggcacttggttcgacggactaactggccggacaatcggccgggctcttttatagccagtgacggtggcaatcttctagatggccaacgattagctgataaagacagaattcgtaggcatgtcgatagtgatggccgaaagtctggcccggtgactaagcttcagataggggatcattataaatgtcagtacggtcatatctccttgccctcgaagaaacgtatctcttccgtaatggaaattaccatgtttgagctcctttcaaactcgtttagtccatagataaagtgtgaaaatcccttaaaatcaaatagtaacttcctaagatcttattttataaacaactattttcttattgctactgtgtattttaaagatgtatttaaagctcttgcttataaatatgtacataccgttgactggaatatttttaccctaccacgtttattgcttagtttgcttagttgtgataaagaaagttagactaagttactaactctggaaaaaaggttatcataactaaacaaatcttaaaagatttcgcactttaaccttataagatggttaaggttttctattttaacaaaaaacgcatatttttttaatatttatttacgccacaaagcaaaaaaaaattagtatagataatttcgctagactagagcaagggaccaacataaatggaagggtttatctgtagaaaaggagcgtggagctcgcagcttggagcaagttactccgcggactcagcgctctcgatggactcgcccttggcctcggccttggccttgtccttctcggccttcgcctgctgcttggcctgctccttggcggccttcttggcggccttctcctccaacttctgctgcttcttggccagcttctcctgctccttctgcgctttgaggcgcagcttggcctcggccttgtacagcttcagctcccgcttgatggcagccaggtcgctgatttcggttgcctcctgtccgggcacaatctgcgtccagtcatagcgccagcatcctccaatcaggggctcgaacctctggccactggagcagcgcacaatgaacttgtggaagccgccctgcaaactggccacgcagctgtagtagtaggtctcatcaattccggcaaatctgcccacggacaggcacgggaagctctccacctggcactcggccaagtccctcacgcatctgcccaggctcggcgagaagacggtcagttccgggcacgtgagctcaatgtcctgcagctgtcgcagcacaggattcaagagacagttgtggtaacggctgcaatcgccactgatgtgtggaaacagtcctgccgtctggcatttgaaagtgggcggggtgggtgcaatggtggtacctgccggcgtggaaggactggctgcagaggaagtgctagaactctctggctctgcaggagcggaggaggtttcttcgggagcggaagatgtctgctcgggcgctgatgaggtttcctctggaggagcagagctttcgttgggagctgatgatgtctggtctggagcggaagagctctcctcgggagcggaagtggtctcctcgggagcggaagagctctcttcgggagcggaagagctctcctcgggagcggaagtggtctcctcgggagcggaagagctctcctcgggagcggaagagctctcctcgggagcggaagtggtctcttcgggagcggaagtggtctcttcgggagcggaagtggtctcttcgggagcggaagagctctcctggtcagctggtgaagtttccggcgcagcagtggtggtctctacatctccagaggcgtccgtggaggtctcctcttcggaaacggtggtttcctcattgcccgcagtagtttcctcactcggtatggtggtgtccgcctccgtggtcagttcccagccaccggaaccgctgttctcctcgctgggcgaaatgatggtggtggtggcatcatcgctccatagctccgcctggcccacatcctgggattggggcaaaccgtcgccgctgagcgccaggatgccgcaggacttggtcagcagctgcaagttagcaaatggtcaggtatcggcctaatccttggcctaacttgggtcctccggtgaaacttaccaaggcggcgcagaacagcaggactgtggatagctttgacattcgccggcccgtcatcttgcgaaccgtaaatgtggtctgtgtggtttctctaggtgatgtggtcgttgtcatcgttgccagtggctaacgtcggtcgatcgttgtgtgagctgctagccgagaatacggccaattatatagctggccgatccgtcggggatgctgtgatggtggcgggccttatcgggcttagcacctcgcatctccccggtaactgtgccgtatgtccgtatctgtatctggcagatagacaggcagccagatacgttccgtatatggtgcaaataaaatatctggttgtttttcaccccgctctgacgtcgccggagggtttttggggttgcaaaatacagttgtaaaccggcaccacatgcccccgcggatgtgaaacggaagtgtgtaaagataagtcggttaaatctggggggaggtcaagtgggcgtcatatggcagctccagataaacatgtttgtccgatcttcttcccttcaccgctactgtttttttgctgccgatctttccggaggagaaccataacaatggtagtgacgcatcccaaatctgcaaaccatggtgacattccatcctaacatcctcactgcgcagcttaacacgtttttcgttaaaaaggatcatttgaagttcataatcgtttataactctaattatttggtagcttttcttttattgtttacaaaataagctaagtataaaattgtaggcttaaatgattagcataacttatgatcaccgtaaaaattatctttacaggactatttccattgataaaaatgaacgaaacatggtttattttattccctgaagtactggtctctatttaaagaaacttagaactttgtcgtcattatgagctagcgcactcaaagaaactccgtgatgtacaacttaatcgcatgctgacaccttatctatatttaaccatatcccccttctgagtcacttttctctttaaaaaaaaagccaaaataccaagatttgcccatcataacatgaaggatggaatctttggattgggaaagtacatatgtgcgcgaaggtatataaataataagggaaagtgcaaaggcttatca

SEQ ID NO: 17042 - DNA, 1566 bp, DROSOPHILA
ccgacgttagccactggcaacgatgacaacgaccacatcacctagagaaaccacacagaccacatttacggttcgcaagatgacgggccggcgaatgtcaaagctatccacagtcctgctgttctgcgccgccttgctgctgaccaagtcctgcggcatcctggcgctcagcggcgacggtttgccccaatcccaggatgtgggccaggcggagctatggagcgatgatgccaccaccaccatcatttcgcccagcgaggagaacagcggttccggtggctgggaactgaccacggaggcggacaccaccataccgagtgaggaaactactgcgggcaatgaggaaaccaccgtttccgaagaggagacctccacggacgcctctggagatgtagagaccaccactgctgcgccggaaacttcaccagctgaccaggagagctcttccgctcccgaagagaccacttccgctcccgaagagaccacttccgctcccgaagagaccacttccgctcccgaggagagctcttccgctcccgaggagagctcttccgctcccgaggagaccacttccgctcccgaggagagctcttccgctcccgaagagagctcttccgctcccgaggagaccacttccgctcccgaggagagctcttccgctccagaccagacatcatcagctcccaacgaaagctctgctcctccagaggaaacctcatcagcgcccgagcagacatcttccgctcccgaagaaacctcctccgctcctgcagagccagagagttctagcacttcctctgcagccagtccttccacgccggcaggtaccaccattgcacccaccccgcccactttcaaatgccagacggcaggactgtttccacacatcagtggcgattgcagccgttaccacaactgtctcttgaatcctgtgctgcgacagctgcaggacattgagctcacgtgcccggaactgaccgtcttctcgccgagcctgggcagatgcgtgagggacttggccgagtgccaggtggagagcttcccgtgcctgtccgtgggcagatttgccggaattgatgagacctactactacagctgcgtggccagtttgcagggcggcttccacaagttcattgtgcgctgctccagtggccagaggttcgagcccctgattggaggatgctggcgctatgactggacgcagattgtgcccggacaggaggcaaccgaaatcagcgacctggctgccatcaagcgggagctgaagctgtacaaggccgaggccaagctgcgcctcaaagcgcagaaggagcaggagaagctggccaagaagcagcagaagttggaggagaaggccgccaagaaggccgccaaggagcaggccaagcagcaggcgaaggccgagaaggacaaggccaaggccgaggccaagggcgagtccatcgagagcgctgagtccgcggagtaacttgctccaagctgcgagctccacgctccttttctacagataaacccttccatttatgttggtcccttgctctagtctagcgaaattatctatactaa

SEQ ID NO: 17043 - protein, 481 aa, DROSOPHILA
MTTTTSPRETTQTTFTVRKMTGRRMSKLSTVLLFCAALLLTKSCGILALSGDGLPQSQDVGQAELWSDDATTTIISPSEENSGSGGWELTTEADTTIPSEETTAGNEETTVSEEETSTDASGDVETTTAAPETSPADQESSSAPEETTSAPEETTSAPEETTSAPEESSSAPEESSSAPEETTSAPEESSSAPEESSSAPEETTSAPEESSSAPDQTSSAPNESSAPPEETSSAPEQTSSAPEETSSAPAEPESSSTSSAASPSTPAGTTIAPTPPTFKCQTAGLFPHISGDCSRYHNCLLNPVLRQLQDIELTCPELTVFSPSLGRCVRDLAECQVESFPCLSVGRFAGIDETYYYSCVASLQGGFHKFIVRCSSGQRFEPLIGGCWRYDWTQIVPGQEATEISDLAAIKRELKLYKAEAKLRLKAQKEQEKLAKKQQKLEEKAAKKAAKEQAKQQAKAEKDKAKAEAKGESIESAESAE

SEQ ID NO: 17044 - DNA, 2927 bp, DROSOPHILA
gattagataatattcggggaattctcggttgattaaaaaggcccacatacgttaattagttttcatttaataatgaacataagaatcaaaacaaaataccataaaaactgatataatagatgtcaataggttcaacgcaaggaaacaataaaaagttcatcaaaagtttcatcaatcaatgacaatttaataaaatatagataagatatgattccaggaactggaaagggtctttggagacccgagaacgaggaattattatttttcaattatgagagctaaaatatatactactttcaaaattaaaaattaaaagttattcaatttcatttcagaaaagacaagactcggctgcagtctgcaatctataaacgaagtgagtcttctgtgaaagatgaatgaaagtagcaaagattagataattttcacgaaaattgccatgctgaagttcaatatggatgctaaccgaaaacgaaaacaacttactttgccgaaaagtaagaggtatttcctggaagttctcgaagtgactcgaagttcgacacttgatttgtgatcacgaaatcgatttggcgacatctctgcgaggctaatttgtcactcgagaattggtcaaactggaatgattaatgactggcgataagatagtggaggcccaataggatgccttcttatcgcccgcatggataatgcgaatggaattgaaattgaactcgaaattggcgtcactcgcaaccacttgacagcccatcaagatgccagatatgatttccaataaattaataataattaaactagaatttattcacttcaaaaaaagaaaaaaaaaaaataaacaggtaatcactagtgaataacaaaaaattaaagtaatgaagtaaataaaagctagagctcgattaaatttgggtttggactgcttttattactccgcttcgtttgcagcccactcaaaggacacaccatccatccattctcgattccctctggcatcccaaaattagtttcctgcagtgcagtcgtaagacgctgagcaaacgctgttgaagggatcgaactgcatctcgccaggacacttcttcgtgtaggccttcagctcgtccccttcggcgtagctgcagacgatgaagtgcgtgcagctgcccgtcgggaatagtccggtggtggcgcacacattgtcctcgatggtggtctcttcgccgctttcagtggtctcggtgttgggctcatcggtactggtctcagcggttgacggctcgtcggtaatgggagcatcagtatctgatttatccgtggtgccgggagcatcagtagtttctgatttctcagtggttccaggtgcatccgtggctggtttttcggtggtgccgggagcatcggtggcgggcttttcagtggttccaggagcctcagtggttattttctcggtggttccaggtgcctcagtggttattttctcggtggttccaggtgcctcagtggttattttctcggtggttccaggtgcctcagtggttattttctcagtggtgccaggtgcctcagtggttactttctcagtggtgccaggtgccgcagtggttactttctcggttgtgccaggtgcctcagtggctggtttctcagtggtgctctcatccaggttgctcggcggaatggtagggttctcgatgttgctatcatcacgagcctcgaaagcggcaatggactgaacgcactgggccatcgaggagctgaagaccagaccagcggggcagcgcaggaagcgcagagagtagccaccgtaggcggttgactggcaggcatagaagtcgggtgtgttatccactagggcgaagtagccgctgctgcggcacagggacttggcctggatcgttgatggggccaggatgagggccaggcccatcagcatcgttagcttaaacatttcgtttggggtttcgtttttcggcacttggttcgacggactaactggccggacaatcggccgggctcttttatagccagtgacggtggcaatcttctagatggccaacgattagctgataaagacagaattcgtaggcatgtcgatagtgatggccgaaagtctggcccggtgactaagcttcagataggggatcattataaatgtcagtacggtcatatctccttgccctcgaagaaacgtatctcttccgtaatggaaattaccatgtttgagctcctttcaaactcgtttagtccatagataaagtgtgaaaatcccttaaaatcaaatagtaacttcctaagatcttattttataaacaactattttcttattgctactgtgtattttaaagatgtatttaaagctcttgcttataaatatgtacataccgttgactggaatatttttaccctaccacgtttattgcttagtttgcttagttgtgataaagaaagttagactaagttactaactctggaaaaaaggttatcataactaaacaaatcttaaaagatttcgcactttaaccttataagatggttaaggttttctattttaacaaaaaacgcatatttttttaatatttatttacgccacaaagcaaaaaaaaattagtatagataatttcgctagactagagcaagggaccaacataaatggaagggtttatctgtagaaaaggagcgtggagctcgcagcttggagcaagttactccgcggactcagcgctctcgatggactcgcccttggcctcggccttggccttgtccttctcggccttcgcctgctgcttggcctgctccttggcggccttcttggcggccttctcctccaacttctgctgcttcttggccagcttctcctgctccttctgcgctttgaggcgcagcttggcctcggccttgtacagcttcagctcccgcttgatggcagccaggtcgctgatttcggttgc

SEQ ID NO: 17045 - DNA, 927 bp, DROSOPHILA
atgtttaagctaacgatgctgatgggcctggccctcatcctggccccatcaacgatccaggccaagtccctgtgccgcagcagcggctacttcgccctagtggataacacacccgacttctatgcctgccagtcaaccgcctacggtggctactctctgcgcttcctgcgctgccccgctggtctggtcttcagctcctcgatggcccagtgcgttcagtccattgccgctttcgaggctcgtgatgatagcaacatcgagaaccctaccattccgccgagcaacctggatgagagcaccactgagaaaccagccactgaggcacctggcacaaccgagaaagtaaccactgcggcacctggcaccactgagaaagtaaccactgaggcacctggcaccactgagaaaataaccactgaggcacctggaaccaccgagaaaataaccactgaggcacctggaaccaccgagaaaataaccactgaggcacctggaaccaccgagaaaataaccactgaggctcctggaaccactgaaaagcccgccaccgatgctcccggcaccaccgaaaaaccagccacggatgcacctggaaccactgagaaatcagaaactactgatgctcccggcaccacggataaatcagatactgatgctcccattaccgacgagccgtcaaccgctgagaccagtaccgatgagcccaacaccgagaccactgaaagcggcgaagagaccaccatcgaggacaatgtgtgcgccaccaccggactattcccgacgggcagctgcacgcacttcatcgtctgcagctacgccgaaggggacgagctgaaggcctacacgaagaagtgtcctggcgagatgcagttcgatcccttcaacagcgtttgctcagcgtcttacgactgcactgcaggaaactaa

SEQ ID NO: 17046 - protein, 308 aa, DROSOPHILA
MFKLTMLMGLALILAPSTIQAKSLCRSSGYFALVDNTPDFYACQSTAYGGYSLRFLRCPAGLVFSSSMAQCVQSIAAFEARDDSNIENPTIPPSNLDESTTEKPATEAPGTTEKVTTAAPGTTEKVTTEAPGTTEKITTEAPGTTEKITTEAPGTTEKITTEAPGTTEKITTEAPGTTEKPATDAPGTTEKPATDAPGTTEKSETTDAPGTTDKSDTDAPITDEPSTAETSTDEPNTETTESGEETTIEDNVCATTGLFPTGSCTHFIVCSYAEGDELKAYTKKCPGEMQFDPFNSVCSASYDCTAGN

SEQ ID NO: 17047 - DNA, 4968 bp, DROSOPHILA
ggaaagctgtacccccaactcaaagacattgtagcgtagggagaactctttttttttgttagacttaaggaaaagttttgtataataaatgtgaccgataatttttgcattcagtttcgaaaagtatacttttgggatgctttgaaaatcagtcaacaaactacattagcaatccattcgtgctgcttttatacaatatattaaaagtccgatgataatttatttatattacgagtaggtacattaaaatgactttgcttggtttaattttattcgatcgtttgtttgttcatatttgctatattttggttgcacatcgattataacgttgtcaatcgcctgacaacccattcttcggatagattgaaatagatataataggtattttatacatagaactacaactagcaaaggaagagccagaacgaaaaaaacacagaggttactaaaaaaaaaaaaaagcaaaaaagagaattgtgaatacaaatcctttttcaaatatatatatatactacgcgtagctccactcctttggttctctgatcctcctcatttgttcataaagctaccaaatgcgaaaatactctaactttgattcgggatctccactcatcgtcatagcgcttccaaggactttgctctatatctaggccgtatcctcgctccacattgcgatcggggggcctggaggggcggctggggtgaaatatattacaacaggatggggggctgtgcggctccgggcgccttgaccttgcttcgacctctatctgggcgagggggacatcgtgggcctcgctgtgggtcgctgaagtgccgccgccgtcggcgctgctgtcactatcgtgttgacctgcggtgtgcgatgtatggcgggtggtgggtggtggtgcgtgtttgttgatgggttgtgcatggtgtgtggtggtgcaattttatggatggatcagtgtggatgaatcagtgttcagtgtgtggtgaagacaagagagaagctcgattacatgtctagacgaggtgagttgcgatttactttggagtttccgtcgattatctccacgggctctgcgggcacataggcggacagtcccatcagcccgaaaatgtccggcgtatagttgcgcagctgcgacgagctggtgggcgtggccgacttcacttcgcctgctttgtgcaacaatggacaatgaaagcagttagttttgagtggctaatagaagcatatgtccacgatcataaatattctatatggttatgtaaggctctctcttagctccctaatctccccatcctcacctggagttggtcgcatccgtggaaaccgcggcgctggcgtttggtaaacaggcctgggcgccgaggcggaggccacatggcgatcccgatgctccgccgggtggtgctcctgatgccgtggctgtggcgtaaccacgtacaccttctcgttggtctgcggcaggatggccacctgggcctgtttccacagctctttgggcgccggagtgctgcgcacgtagagtggtgtcaccaccgttgtcgttgtggtgggcggtgtattggtggtggttgtggtgctgggcggactgatggtggtcatggccgacgtggatcttggtcgctgttgggcatcgtagtagtcgaaatgcaggcggttgtcttcgatgggctgaaagcccttcgatccccgctcaccgagcagatgcagttgctccagattgttgatggaagtggacagatcaccggcatcagtgggtggagcgccacccagctcgaatccctcgccccgagtggttttcgactggcgctgcgataacggcgctggagttgtggtagtggtggtcagatactcggacggtatgtgcttggatcttcctcgaatcgtgggtgtgctgggtcgatgcgacagcgagttgtactcctgctccgtccagccatcgatgttcttctgcagccgggatatgtccacacccaatccctgaccaggcagccgcttcgtttccctctcccgcttgagcaactccctcagattggtggccaggattttggtcaggtatttggtggtgcgtcgcgaattaggtggcgccgtcacggtggctgtagccagcttcgattcctgctgctcgtgtggctcctcctcgaggtcgttgctttggtggttgtggtgattgtgatggtgattcggctgatggtgtagttgatgttgagggtgctgtttcaagggcgtccagctctcgaagggccgtggtcgctgcttggtggtgtagggtatgatcacctgctgcggactcggtggtgacataccagcaaactgtccactggcatcgatcgcaccgtacgtggacgtgggcgttggtggctgcgtgggcgtgtacacctggcttactcggaaattaagatcggctggatcgcgggtgaagggccgtcctccggctcccgccaagggggcgtggttgatgggcgagtcaagcagacgctttggcgtttccctgcccctaccgattccctgacggtgcgagtgatgcactgcagccagatggttattcagctcaatgaccggcgccggtggtggcggtggcggtgctgttgtggtgggcaactccgtgctggtgctatataacagtgtgctggtttcatcctgaaactgctccgcatagtagaagggttgctcctgctcctgttcctgctcctgctccaattgctgttgcgacgaggccgctggatagttatccgccggcggtggctgcgtggtggtttcagcgaaatgtccgatctccgttagcaactgcgaggctggcaaatgctgatgcacctgaccactgctcagatcctccagctggtagcgcaccgtactgatatccgcctgaagttcctgctccaaagccaactcatgacttggcctttggctggccgcagatccgctagagccgagatcgatggcatgggactgcacgaacgtggctgggtattccacggacgtcacaaagtccgtcacctggtggctctgcacgatctcgaagctggaggtgctggctggcggagcaggagttggtaggggcagggaaaccggcacgggtctcacttccgactgggccactacgttctccttgaccagcggttgtacaacaggccggaatggctgggcattgtacagcggaggcagtggcaccgccaggggcaggaagacactctgtccggagctgggacggaattgcacagcccgctggcgttgctgcgaggcctgagccaacggctgctgcagctgccatgttgcgtgttgctgcgggacgggttgctgctgctgctgctgctgcggaatatgctgcagttgttgctgctgttgtggtatgtggtgaggttgttgctgcttctgttgcgggatgtgctgcagttgttgctgctgcacttgcagctgctgcgcatgatggtgatgctgttgcagttggttgttcagttgctgaggattcggctgctgctgctgctgctgctggcccaccattggcacccaaggatacttgttgcacaggctgcacggcttgccacccgcgtcgaagccggaaactggtttcggataggcatagctcaacgaattggtggcactcagctgctgatccttggacgactggccgccagccaagccgaaccacctggccacgcgggtcatgaagccggcttcgggaacggcaacgggtgcagaggatggaggaggcgctggagaacccgcaccggcgtgcgatagtctctggggaacgggcagtggtggcggcaccaggtgatccgccggttgggcgggcagtggagatctgcccgatcttaccgagacctgcgctgtggatgccgccagcgaggaggccaatatcaaggtgagcagacccagagacgccgatcgccgttggagagcctggaaaaatgaagagcgggagaaacctgggtgagttcaattgaatgccaaatttcactttccatctcataaatcccagccagacgccaacgatccaaatttatagagagcaggcgatccggttgcggattgagatgaaagatgtgccactgcgccaagcagctgatccggttccgttttcatggacttgcagttgatacttggcaaatcaagaaatcccacggaataaataacccaatttaattgaaaaaaattgaagcattcaattcaagttttatctctctgattcagatatttgttaccaaataaaaacgaactaagttgatagatttataaaacacagtaattatgttgaaacacattacttggttacttgattttcccagttgaaagtgttttctctctgtaagacattctgtaacttttcaatcatattcctggatgtttaaaaaaggaattttacaatagtctacttttaaaattagttacttcgaaagaaggtgtcacagacctcacttcctactaaaaaattaagtgtacattttgaaagcttaagggtggttaatgctgatggtcggacatgtcttaagaatggtaatacgatgccattgttataaccatgacaagactttgacaacaataataaattataatgcgatttttggacaacgatagtggcatttgaatggaaagactgccacgaactgattaacccagtacttggacgcacaaacaagttgactaagttataaactatttagaggcgagatatagactcaattatcaattatcaggtggtgagtaaaaattcctttatcgttgtttacacacgaaagaaccttcgtttcaatatgctgaataaatagttaagtaatagttaaaagaaattcattttcttcaaggcaaaatcaccaatgtacatatattggctatgggagcttggacgcaactttctccagctgggtcgggctggtcaattggggctgggtcggtggtcagttgtccaaaattgataattagccaaggcaattggccaacagctactgaccaatcaatcccctcaacttcct

SEQ ID NO: 17048 - DNA, 2688 bp, DROSOPHILA
atgagatggaaagctctccaacggcgatcggcgtctctgggtctgctcaccttgatattggcctcctcgctggcggcatccacagcgcaggtctcggtaagatcgggcagatctccactgcccgcccaaccggcggatcacctggtgccgccaccactgcccgttccccagagactatcgcacgccggtgcgggttctccagcgcctcctccatcctctgcacccgttgccgttcccgaagccggcttcatgacccgcgtggccaggtggttcggcttggctggcggccagtcgtccaaggatcagcagctgagtgccaccaattcgttgagctatgcctatccgaaaccagtttccggcttcgacgcgggtggcaagccgtgcagcctgtgcaacaagtatccttgggtgccaatggtgggccagcagcagcagcagcagcagccgaatcctcagcaactgaacaaccaactgcaacagcatcaccatcatgcgcagcagctgcaagtgcagcagcaacaactgcagcacatcccgcaacagaagcagcaacaacctcaccacataccacaacagcagcaacaactgcagcatattccgcagcagcagcagcagcagcaacccgtcccgcagcaacacgcaacatggcagctgcagcagccgttggctcaggcctcgcagcaacgccagcgggctgtgcaattccgtcccagctccggacagagtgtcttcctgcccctggcggtgccactgcctccgctgtacaatgcccagccattccggcctgttgtacaaccgctggtcaaggagaacgtagtggcccagtcggaagtgagacccgtgccggtttccctgcccctaccaactcctgctccgccagccagcacctccagcttcgagatcgtgcagagccaccaggtgacggactttgtgacgtccgtggaatacccagccacgttcgtgcagtcccatgccatcgatctcggctctagcggatctgcggccagccaaaggccaagtcatgagttggctttggagcaggaacttcaggcggatatcagtacggtgcgctaccagctggaggatctgagcagtggtcaggtgcatcagcatttgccagcctcgcagttgctaacggagatcggacatttcgctgaaaccaccacgcagccaccgccggcggataactatccagcggcctcgtcgcaacagcaattggagcaggagcaggaacaggagcaggagcaacccttctactatgcggagcagtttcaggatgaaaccagcacactgttatatagcaccagcacggagttgcccaccacaacagcaccgccaccgccaccaccggcgccggtcattgagctgaataaccatctggctgcagtgcatcactcgcaccgtcagggaatcggtaggggcagggaaacgccaaagcgtctgcttgactcgcccatcaaccacgcccccttggcgggagccggaggacggcccttcacccgcgatccagccgatcttaatttccgagtaagccaggtgtacacgcccacgcagccaccaacgcccacgtccacgtacggtgcgatcgatgccagtggacagtttgctggtatgtcaccaccgagtccgcagcagccgaatcaccatcacaatcaccacaaccaccaaagcaacgacctcgaggaggagccacacgagcagcaggaatcgaagctggctacagccaccgtgacggcgccacctaattcgcgacgcaccaccaaatacctgaccaaaatcctggccaccaatctgagggagttgctcaagcgggagagggaaacgaagcggctgcctggtcagggattgggtgtggacatatcccggctgcagaagaacatcgatggctggacggagcaggagtacaactcgctgtcgcatcgacccagcacacccacgattcgaggaagatccaagcacataccgtccgagtatctgaccaccactaccacaactccagcgccgttatcgcagcgccagtcgaaaaccactcggggcgagggattcgagctgggtggcgctccacccactgatgccggtgatctgtccacttccatcaacaatctggagcaactgcatctgctcggtgagcggggatcgaagggctttcagcccatcgaagacaaccgcctgcatttcgactactacgatgcccaacagcgaccaagatccacgtcggccatgaccaccatcagtccgcccagcaccacaaccaccaccaatacaccgcccaccacaacgacaacggtggtgacaccactctacgtgcgcagcactccggcgcccaaagagctgtggaaacaggcccaggtggccatcctgccgcagaccaacgagaaggtgtacgtggttacgccacagccacggcatcaggagcaccacccggcggagcatcgggatcgccatgtggcctccgcctcggcgcccaggcctgtttaccaaacgccagcgccgcggtttccacggatgcgaccaactccagcaggcgaagtgaagtcggccacgcccaccagctcgtcgcagctgcgcaactatacgccggacattttcgggctgatgggactgtccgcctatgtgcccgcagagcccgtggagataatcgacggaaactccaaagtaaatcgcaactcacctcgtctagacatgtaa

SEQ ID NO: 17049 - protein, 895 aa, DROSOPHILA
MRWKALQRRSASLGLLTLILASSLAASTAQVSVRSGRSPLPAQPADHLVPPPLPVPQRLSHAGAGSPAPPPSSAPVAVPEAGFMTRVARWFGLAGGQSSKDQQLSATNSLSYAYPKPVSGFDAGGKPCSLCNKYPWVPMVGQQQQQQQPNPQQLNNQLQQHHHHAQQLQVQQQQLQHIPQQKQQQPHHIPQQQQQLQHIPQQQQQQQPVPQQHATWQLQQPLAQASQQRQRAVQFRPSSGQSVFLPLAVPLPPLYNAQPFRPVVQPLVKENVVAQSEVRPVPVSLPLPTPAPPASTSSFEIVQSHQVTDFVTSVEYPATFVQSHAIDLGSSGSAASQRPSHELALEQELQADISTVRYQLEDLSSGQVHQHLPASQLLTEIGHFAETTTQPPPADNYPAASSQQQLEQEQEQEQEQPFYYAEQFQDETSTLLYSTSTELPTTTAPPPPPPAPVIELNNHLAAVHHSHRQGIGRGRETPKRLLDSPINHAPLAGAGGRPFTRDPADLNFRVSQVYTPTQPPTPTSTYGAIDASGQFAGMSPPSPQQPNHHHNHHNHQSNDLEEEPHEQQESKLATATVTAPPNSRRTTKYLTKILATNLRELLKRERETKRLPGQGLGVDISRLQKNIDGWTEQEYNSLSHRPSTPTIRGRSKHIPSEYLTTTTTTPAPLSQRQSKTTRGEGFELGGAPPTDAGDLSTSINNLEQLHLLGERGSKGFQPIEDNRLHFDYYDAQQRPRSTSAMTTISPPSTTTTTNTPPTTTTTVVTPLYVRSTPAPKELWKQAQVAILPQTNEKVYVVTPQPRHQEHHPAEHRDRHVASASAPRPVYQTPAPRFPRMRPTPAGEVKSATPTSSSQLRNYTPDIFGLMGLSAYVPAEPVEIIDGNSKVNRNSPRLDM

SEQ ID NO: 17050 - DNA, 3085 bp, DROSOPHILA
tggtgctcccacagattcctgtatcgcgtcgcaccggacatgtcgattgccttaatggaaacacctgacatgcctactccaaggggatacatatagtcatagttgatgattccacggccacttactgtaaaactgttccaccatgaagccaactgtgggcaccacaatggatgtctgttcgctggactttttgaaatgattaattatcgaggactttccgctgttgttcagtcccagcaccagaatcgtcatcttatcctttttaatctttatcaaatcggccaaattgtgcaacattcccattttactggcggacgggcatcaattttattttgtttacggcgattttcctgacatgtttggccctgcaaaggactttcaattgccatggcaacccgcttggtgttggcatcgatttattgaaacttatggccaccttcaactttggctgccgcatccgatttgttcgcccccacgaattttcaagttcacctaaggcgtgactttgagtattgggttcgattacaacagtaggggaagaggtcacccatcatgcccaagatggaattgttttggccatatgtacacctacactgaactgaatgatttggctttaggatttcataaaataaatcatggaactcagtttagcaattaaatctacaacttgtagcaaaatcaagaatttgttccttttgttacaaaagttttttcattttggcattttgatatttacaattgatttctataatagtacaagaaattgctttaaaattgatcaattgaacagtaaactttaaaatcttgaatgcctctagctgatatccaaatgttttcgtccagacactacaatatgctgcagttgtatccattaacaagacgttggtctccatagaacctaaaaccggatatgaaatcctagcaatgatttcttgccaaataacttcaatcacgatccacttagttgaaactattgtcgataaataatgttgatcagaactacgggttttacgtgttgacacaagccaaggtttattgtagaattcttcttaaaaaacatggttactgatagagctcctctacttcttggtgttcaagatgataccatcgtatttctgctggaaccacttcatggcatcctccttggtgaggcggtgctggaagccgacagtgccggacttgcgcttcctgtggttcacattgtagcctgcaagataaaccagagtagcagataagtaatcaacgttttggcaatccatgagacgctgtcgaaattgtaccgtgtggccacgcatggaatgtagcaagtccaactaagcacatcttctttgctatgcgcacattcactgagcatcagagcctcgattggcagagatacctaattaagtgcacgattcgaaacgtaggagacagatgcttaccagggcggccgaggacgacgtagaagtccagaccatagataccgatggagggatcgtacttgatgcccagatcgatgtgttcctggatgccgaaaccgaagttgccggtggaggagaagttctcccgacgcagctcgtactcgcgcaccttcaggccacgctccagaatctcctcagccttggcgccgcgcaccgtgcagtggacagcgatcttctcgttacggcgaataccgaacgaacggaccgtgtagcgggccttggagaacactggctgctgaccagtcagctgctccagcacctgttggcattctctagttagccagtgatcatggttatgctgcatctaggtatatcttaccttggcggcacgggtcagcctgtcaccggactcgcccacgcagatgttcaggcagagtttgcggatgtgcagatccctcatcgggttcttcgcgggatcgcgcttaatcttcttggtaaccgcctgaaaaacaaccaaggaaactcgtcacttcttgtgctgccatcgtaaacacacagcgtacaaattttgcatgacaaaaatattgttgaaaatatgtcgatgcgtgcagcaattgtggttgaacctaccgccattgtggtatgtaggagtgaaagctgctcacaggtatccctcgctacaaataaacgatttaaaagtggttaaataaaaatatcggcaaaaaaaacgcggagcactcaccggaaacttgtaagaaaagaaggaaaggatagtgtggccgcgctgaggcgcacaaatggacctaaaaaacgcacgacacgtgctgttgtcgtgctgttatccaactatcgtgctgttgtgcgcacgtcgttccatcactaacggttaacagggctaacggtaaataaatggggtattccttaaaatgttaaccactgaaattggtttattcaattattttaaatgctgaacagcaaatatggccgataattgtgattatttgattgcacggatgtttaaattactttgaggtagcttgatttgatatttgtttacttggcgttattcgcatgtaacgaaaaatccttttagaataaaaatttatttgaaatacggcccgcttaattaacttcatttcgcattaaacacatcgtttaagtaatgcgccaaaattaataaaaaaaggcacttccagtgatatcaattgaaaaactcgaagtaaacgtccataatagtttatttgaattattaattttagcaataatgtgtattccattgaagaagtccgtcaactttaaagtgtgtagcatcaattcgtatgtagagcttagtcgatggacttcatcttgcagaggaagttaatcggtagcagcttgatttcctcgttaatcctgcagacgaacacatcgccatccttggacagcactctgcccacggactcgcggtcatcgccgtagatgatcttgaattcgtcgccattgcatggtagcactggcgccaagtgctcactaacgatggacacactgcgatcctcctggcgcaggaatacggagcagacgccgttcgaaacggtgcgaatgatgcccgtttgcccaacgagatcggtgtcgtcgtgcgtgtgaatccgaacttcaatgtctgtggtacaccagtcgcccatcgacgagtccagactggctccagg

SEQ ID NO: 17051 - DNA, 683 bp, DROSOPHILA
atttgtagcgagggatacctgtgagcagctttcactcctacataccacaatggcggcggttaccaagaagattaagcgcgatcccgcgaagaacccgatgagggatctgcacatccgcaaactctgcctgaacatctgcgtgggcgagtccggtgacaggctgacccgtgccgccaaggtgctggagcagctgactggtcagcagccagtgttctccaaggcccgctacacggtccgttcgttcggtattcgccgtaacgagaagatcgctgtccactgcacggtgcgcggcgccaaggctgaggagattctggagcgtggcctgaaggtgcgcgagtacgagctgcgtcgggagaacttctcctccaccggcaacttcggtttcggcatccaggaacacatcgatctgggcatcaagtacgatccctccatcggtatctatggtctggacttctacgtcgtcctcggccgccctggctacaatgtgaaccacaggaagcgcaagtccggcactgtcggcttccagcaccgcctcaccaaggaggatgccatgaagtggttccagcagaaatacgatggtatcatcttgaacaccaagaagtagaggagctctatcagtaaccatgttttttaagaagaattctacaataaaccttggcttgtgtcaacacgtaaaacccgta

SEQ ID NO: 17052 - protein, 184 aa, DROSOPHILA
MAAVTKKIKRDPAKNPMRDLHIRKLCLNICVGESGDRLTRAAKVLEQLTGQQPVFSKARYTVRSFGIRRNEKIAVHCTVRGAKAEEILERGLKVREYELRRENFSSTGNFGFGIQEHIDLGIKYDPSIGIYGLDFYVVLGRPGYNVNHRKRKSGTVGFQHRLTKEDAMKWFQQKYDGIILNTKK

SEQ ID NO: 17053 - DNA, 2560 bp, DROSOPHILA
tcatttccggactgccagtacaccattgccctgccaacgctccgtcacagcaagcatggcagctcatccagccaggacgctctgattgagatgcagttgctccaggagctacacgtggaacagctagatcaacccgaaagccaggatctagtggccctgctgcagcgctatacaaaagcaatagccgaagccccctataagaagcaacgcaacgagacattgggaggcttcaagaaatacctggccaacgacaagaagcagtgcgtccgtgtggatcagggaaacggatacggaagactctggcagcagcatctgaatcgactgccaatggtcacgctggaagtggccgagtccataatagcgcagtatccctgtcccaagaaactgatcgatcatttctccagcgatccactggctgtccaaagtctcgccgatttgaagatcaagcgatgcaatggaccacagcctcttcacaccgagcgacgtattggaaatgttctcagcaacaaactgtatacattgtatactgccaaggatcccaatactctaatttagaaaactaaactaaactttcttagctttagaatctgctcatatattagcttcctaaagtatgtacaattataattaggttttaagttaagatctaagtattttacattattttctcatcgtataaggtataattttaaaaatcacaatgttcctatacacataactatgaattcaattaattgtggtttgcacacctgaagaattgataatatgtccgcttggaagtcggaactctgtgaacattggattgggcgcgatgtggagaatggagtgttggccatggccgatgaaaaacttcagtccgtgctctatagcgtggccagaatccgggtgaatcccaggcaggcggagacgatggtctggccgaggccccagatcatggcgtatatgggcgacatgggcagactggaggcgcgatgcacaaaggcgatgactgcactgctgattatgccactggaggccggggaaaggaaacccatgacaaggatgaggatcgagaagaatcgtccgaacttgtgcttccggagcgtgaagaaggccaccacggcggcgcaggtgtgaatgaatatggaggagaacagggcccacagaaagacgtggtaccacatttcgcgaaacgtattgagacgcgcctgtgaccggagtcccatcacatcggcgatggtgtccaactcatcggtgtcgtccgagaacatggctaaaacgtagtcgatggatgttgacgtggtatccctagttactagttgctagttattgcttttccgttggtcagttgagtgtccagccgcatgtctggtggggattccctttctatagcatgtatccagccaatattcatggacctgcaaacaataactccctttagacttgaccttctggcatttaattatactcacgccaacacatgtgtgtgctaatggccacacccataccacatttgtcgtattctatagccggatttggattgcagtctttttcagttgcttgatcctatttagcatggccttaacttccggttagcactgtagtttagcaaatgtttggcttatttttaattcggtcaacaatcgattgaactttcgtcacggcactcaattagcgctcggctggcggcagtgaatgctaaatcgggcctaattaccaggctactggtgtgcggcagccctaactccacattttgagcaacaccaaacacttttagttggtttaatttaattttatattgttcttgtctgcgatttactatggcaatgggaatggaacgtttgggattgggccagttctgataagcaaacagctgtgactcagttgcgaactggttcggggcttgcagcgcagctctaaattattatactcaagatatccatatgtaaggcagatatcgtagtgaaaagtcacagggtttttaaggtatattcttttgtaagctgtgttcaaatgcactgctttcagcacaagcatgcttatcgttatcgagcagcgataatcggcgaactagttcaacataaaccttcttggcacaagtgacaactctgaaaccaatccataaacaaaaaattttgtgtaaactaaaaacaaaaagcggaagttgaaaaacaacaccttagcgtataatttggccccttatgatttgttaagtttctgttttggaaaatgggatgctgagatagccctgaacaggtgtaagtcgtcctcctacactatgacacatttcttccgagacgaacttacatacatacgcacatatgtacacatatgtatgcatgtttgtaactgcatccatatacgatatatgtatcttacgcactcgcggctatatacatatatatgcggaatatatatgtatgtaagccgtcaatatgagaatcggttgaagttaagtcttcatttaaagtggctatagtacatatgtatatacacacttttaaccagcatatgcttgtgaatcgagattaatcaaaggccctgcattgcagacttcatatacttcaagccccacaaaacc

SEQ ID NO: 17054 - DNA, 506 bp, DROSOPHILA
ggccatgctaaataggatcaagcaactgaaaaagactgcaatccaaatccggctatagaatacgacaaatgtggtatgggtgtggccattagcacacacatgtgttggcgtccatgaatattggctggatacatgctatagaaagggaatccccaccagacatgcggctggacactcaactgaccaacggaaaagcaataactagcaactagtaactagggataccacgtcaacatccatcgactacgttttagccatgttctcggacgacaccgatgagttggacaccatcgccgatgtgatgggactccggtcacaggcgcgtctcaatacgtttcgcgaaatgtggtaccacgtctttctgtgggccctgttctcctccatattcattcacacctgcgccgccgtggtggccttcttcacgctccggaagcacaagttcggacgattcttctcgatcctcatccttgtcatgggtttcctttccccggcctccagtggcataa

SEQ ID NO: 17055 - protein, 83 aa, DROSOPHILA
MFSDDTDELDTIADVMGLRSQARLNTFREMWYHVFLWALFSSIFIHTCAAVVAFFTLRKHKFGRFFSILILVMGFLSPASSGI

SEQ ID NO: 17056 - DNA, 8869 bp, DROSOPHILA
ctatacaactatacaggccgtaaacaatctgcaaaaataatgtatttatatttataacacgctctgaacaacttggcggcctcttcatgattttgcgttaaacgtcggacgtggtaaaaataaaaacagcgaaatttcgttttttctttttcctgtgggtactttcagaattttgtgacgcgttgcgtcgtgtaaaacaaaaacctctgacgcgtgtgacatttggcgctgaaaagtgagttttgagcaagaaaaaagggcaaagggggaagggccaaagtgactttgcagcagctgaaaaattggaagagttcttctgggggagaaagaactggggtaacttggtctgctcggtttattgttttgtcgtgttggcctcaggactcgagtgatttcgcttatggggtctgcgtgtccaattttcaacttgtacaaagttgtacaccatgatggggaaaactatagtactgctaattaaaagttcttcgatgtaaaaacttggaagtttcgtttttagatgcactacactttctcgcattaaagacgagaagtgcttaacaagttgtttgtttgcgcttagaggaaaatactttgatgtcagtcggaatcacttcttgatctatatttgatagtcgcaggaaatgctataatgctgaccgcgactgtgtatccccctgcaatgcaattgctgagcacaagtgtatctgtgagatacatagcagggttgtcagacatctgcgatgtctggcggcttgcattaattagacgtgcttgtgctgtgcttgtccaaaagtctggcccgtatctatatagtattatttatgaacttgctaattttagcactgcccctggcctgaaagaaataaaggcccaagagcaagatgactgatgctcgtcgtcttatcagagtatctcaacatgcccggcaacatgttaaatgattatcagagcagagcattcgcttcgccttaatttcgggctcaagttgtcagtgttttggatgcctggtggcggcgttgactttaagcctattagatacaccacattctgcggcagaaaagcattgttcaccttgagaaatggagggaacgtaggggatcttagggtgcggcccaagtattttgtaattaacagcatttacatcaccctaatgaatgttttccccttccatctcaattgcagcacaccccgtcctcgaggagttctcaacttacactgtgatacgaccgcaggtggaacatggacgcactaagcgcagcctgctaaccactctggatgccaccgtaagtagacaaggacactggtaaatcctgcaccagatgcgacattaaatcatcgaattgcgaagcaaatttcaataccaattacttagaacttgaactgacctagttgaacagaaccgtttctcttaaattttcatcatttgtatacatcttaaaactctttaaagtcagtaaagttttaaacttgtactcgttgtattcgttgtgtaaacaaatatgttttgctgtttttgcattcaaaattcatgggatatttgaacgttgtgagtttatcaacgagagttaatcagagttaacccgtaaatacagccactgagtaacgaacaacttttgagcgaaattcatttcatgcttggggttaaaaatgtttggagtttgcagggtgcgatggcaaacagccaaacccgttttaattagtttcaacgagagtgggtggactcaatggtggtaggttggaatttcagttgacccctgcggcgcgcaggacataacacattcgcacctcggcacaatgtcgtcacgcccacaatttgcatgcaaaaatgaaataaatgcggatgaccggccaaatggcttaatattgttaacgctatcaccctgctcctctgctgatttccaggacggccttcacacgccgcagattagcctgagttacacccacgagggcaagcgggtcgtcgtcgacctgcagcgcaacgatctcctcctgccgaattcccacttcctgcgctaccaaaatgccagcagaggagccactcctggccatgtggttaccacctttaccaagactgaggttgatttatgccattatcaggtatgtggaccatctaattcctgcctttaatttttcttttacttacttgactatattcccatcttatttgctttacccatcacagggacacattcgtggtaaaccagaatctgtggtagcactctccacctgtgatggtgctctggatggcatcgtaatcgatggcaggcagacgtacttcattcatccccatatcgacggcagggggcgattgcaggatgaccactatctgcttaagtgagttgttttttttttgcccacttattaaaatagctaagttatcaggcgtttttaaacaatttctagattgatcatttaatttgaccgagtaaactagtatatatttattactctacatatagagaaccctcgatgacttcgcattatgatagcgacctatttgatgtttatggtgcctctttcccagttcacgataccgatcaagccaatattctcctttctaaacggcgcttatcttatcgggagtttatgcccccgtcgacccaagcgaaatatgtttaacctggttgttataaatgttgggtcagtcgtatattttgaagtttacttgccaaatatttacctagttgtaggccacaaatatttgctttttcgggtatatttacccaattccctaaccagagcgaaattctcaaccataaccgacctactccattcattatgtttatacgccaccggcacttccgttattaatttcttttgttggccacggaaatatcaaattaccttctatttgtctccgcaggcaggcagacatgcatccgacgaacgccacctgtggctatgataaccacagggacgaccatagtcacgactacgaaaaggctgacggggataacggacttggaggagggattccttcactgccactccgccttgatggcggagaattctcgaggaccctgctccggaagaggcgtcaggcggacgatagcagtcaattgatccgggggccttacaatgccaacaaatactccagctacgtggagctggtcatcgttgtggacaataaggtttacaaaaatttccaagagaacaccaagaaggtgcaccagtattgcaaaggcattgccaatataatcaatgcggtaagtgatatttacgtttaaagctacgtttatgaaacagtaaatctaatctatttattttatttactatttactgttagctctatgtccccttgaatatatttgtggcgctggtgggtgtggtgatttggaacgagagcaacgaaatcgagttctccagcgacggcgacctgacactgcgaaattttttgaactaccgtagcaccaagctggtgctggatcatcctaacgataatgcccagctgctgaccaaggagaacttcgccggcggtgtggtgggcaaggcactgaagggtcccatctgcacgtacgagtactccggcggagtgagcatgcagcacagtcctaacccggcaatggtggccacaacaatggcccacgagatggggcacaactttggcatggagcacgatacatcggattgtcattgtcgggatgagaagtgtgtgatggctgcctcgagtacctcgtttattccagttaactggagcagctgcagcattgatcagctcacaatagccttctcgcgcggaatgaactactgcctgaggaacaagccggaaaggttgttcgaatcaccgacctgtggcaatggtttcgtggagcctggtgaacagtgcgattgcggattacccgagcactgtgaaaatgcctgttgcaatgctcagacctgcatgttgcactctaaaaatgccacctgtgctaccggagaatgctgtgatctgaccacatgtcgacccaaattggcgggcagtgcctgtcgagaggctgaaaacgagtgcgatttaccagagtactgcaccggggaatctgagtactgtccggcggatgtcttccggcgggacacggagccatgcgacggcggtcaagcatactgcttccacggcacatgtcgatctcactccaatcagtgtcgaacattgtggggacccacgggtgataactcggagcattgctacaacaagaacacggagggcactaggctaggaaattgcggctataacagactgaacaagacctttttgcgctgcgaagagcagcatgtcaattgcggaatgctccactgcatccacttaaacgaacgactcgaattcggtatggaatcggcggctgtgctatcccattcctatataagtcacgatcgcaagattgtcgcttgtcgcactgccttggtggatctgggtttgcagaccaccgatcccggccttacgcccaatggagccaaatgcggcgtggataagatgtgtgtggatcagcgttgcctgccggtggacgcggttcggcagaagggcatgggaaagccatgtccggaggattgcaatggcaatggcatctgcaacagtcgaggccactgccactgcgatgtaggattcggtggggaatcgtgctcgaaggcaggatctggaggttccccggacagtggaccagccacagatccaaatggtatgttcgaaaattgtcctgaagttcgtagattttatatgttttcccttttcatttgcaggttccgtgggcttcaagcgattcctttacgtgctgttcttctttgtgctgcccgttgtggccctcttttggttcctctatcactgctacaagaacggcatgctgacgcgcggaaaactggcggacaatatgtatgtatcgacctcctccttcagcattggctcgaaagaggacaccagtcccgacagcagtatctccaccacactagcacataaacagacccctgcacgcactgcaccacctccactaccactgcacaccaatcgccagctttctggtattgtaactaacacggctccggccaccattactaacatacacgccatcctgccgcgccacaagtccaatccagatgtagtgcatcagttaaatattccgccgccctctgtgccaaaaagccatagcactcatgaggtgcgaccaaaggcggccaccttgaaacctctaactctcctgcactccacgcactcaacctccaataacaacaacactgagtcacttaaccagaatgacaagagcaacacgaacaacagcacactgagacgcaagctggatatcacggctccgcggctgaatgccaccacaaacccactggcactcaccgagggcgcccagttcatacagagcgaccccgcgaggtgtgccaaaaactaaaccagcacaattaactacagtgaaatacgcttgcactgccacagaaatacagcatgactttgcgcttggcccatggcatttcaatatcattgcagaattttttatttttatattgacctcgaaatcaaatgggttcagtgttgcagattacgaattattaggatagggttctttttgtattatttttcttatatacattaatatagtcgttatattgagaaatacacaatcctagattgagaaaaaagagaacacaaatagaatatacgtgatttagtgaaagtatttaggatttttttttaatctgcaatggtatatctataatttgaaaaaccgaagacaactcttcattttcgttcacatttttgtgttaatgcctcattaacaatcaattaacccacaatccccactaacatagtccataatttgaatttgttcctagttttatttttcctaattttgtatgttctgcaaataaatgtgactctttaacttttggtgttggtttgatgtttgtcttgctgtttgtatgtctactttccttcaagctatgtttccgtatctctagcactggtgtttggttaatgcacgtttttgatttggtatgttacacaattgaactttaaatgctttgatcgctgtactttattttcccatattaatccctatatttgattgtccttacagcttaaaatcctctggtggaagcaaacccatcacaacgcgaaccaatcaaaatggcacaggtccaccgccaagtaatggtttgttaaaatcaacgcctagcagtacggatgatatggattcggcactattaaaatcaccaagcgactccacaccgtcagctggactttttggaaaattcgatggcttcactctgcgaccgctgaacgatgcatcttcaccagcgagcaactacaacggaccaaatgtggcctttgtgcaacccactgtgcagcaggatggaccgcagcgaatggccccaccacccccagtagtaaaaccaggaacggctcccattcatcccccatccccgaaaccagaagctacttgggtgaggccagcgcccgctttgccaccacccaatcctggctcaacggcacgtcccattatctcaccacccaaactggattctagtacattaactatggtaccactcaaggacagcacagaggatctctcgcccagtcgatctgctcctccagttcctctacacgctgatcccaagctaaatgttaaacgagatggtaccattcgtcgatttgcttcgtttctgaagaaggaagagaaaccgccactaaaagagaagacctacatcgatcgggagcggctgcgaactctggaaatttctgcccctatgcctgtgcccgctgctccccaagctgaatcatccaattccgattcggagaccactccacgcgaagaggaaacccagaatctggtaaaacgcgcacaatccatgcgttcgcccaccaaaaaggctccactccagagttttggatccatgcgttctccaccgggactgccacggccgaagagtggtcaggtgaatagcaatggcgcctcgagaccaaagtcgccacctccaaggccaccgccagtggtggtcaagaaaacaaactccatcagttcatcgggctatcagcggccggtttccactgcccagagatctgtggagaatacctatgacgattgcgaatttgtggagaatgaagtgcgagcctcgaacgacgacatttactccgtaattgatgagattccgccagcggcacagaccctcaagcggagcgatttggtggccaacagggcgagtaatggcagcgatatgggtttgctaaatgaaatagtgaatgaactagaaaagatcaacggggattccatatactcaggaaagcccgttgctgcagcagcatcagcagctcaaccaacacccgcagatcccccaaaaagtccccagcgacctgctccacccaagccagcgagcagtgtgctggaggaaaaggcagctaatgcatctgcaagcacatatcaccgcccgccgccagccaatgctcccgtggctcgggttaagcccactgtggcggacaaatcacaggcgcaggcgcaggcgcagcccagcatgtccagcttcaagccggcggcggggggaaacgtcggtcagtcgcagccagcgccagtagtccagctggccaaacggagcagcagcggcagcatgagcggcgtaaccaattacgcccgtcccaaatcctttatgaagagcacaacgaaaacactgcccaatggaacggctggagcgtccaccacagcgccatcggccaccattcaaaagcccaaaccactgtcagcaaagccatccttcagcggcggtggagcgggaggagtactgggaaagcgggcgaatggcggagcagcgcccacgccacccactgtaaaggcggcaacattggcggcggcgccaaagtccaacattgcatcgctgacacagcgattcgagcagagcaagtagactaaggaacactaggatatcgggcttgaccatgagcatagcatgaaatatgtattggaaaatgaaaggatgagagggtgtatgctgaaaatctcatccttaccaagttttaaatgtgtaattatagttcattgattgtttagacatgttatagcaaagcaaagttcttaaatattatagtaccacatagtgatcagcattttattcatggcatcagtacaatgaatttcttaaatttttccaaaacaagcctgtgtgtgaaagtaagaaaatatgttagcctgtattcttcgccgttttgtgattctatggctatgctcttggtctgtctaaatagccaccctgcgtggaattgacttaagttttagttaagttacgatttaatttcatctggcactgactatgactacgactgcgtcgtctttgatattcattcctttaccaatgccccactagttagacgtaaggcgttgcttaactcatgtgctaagtatgtatgtatctcaatggttaatgtttaagcgctgcatgtgaagttttattttagcacctaacgatagctacgtatctgtatctatactataatctacggtaatcccctgtatttatgtacatgtatgtttatatgcaatatgcttttgtaaataaaaaccaaagaagttaaattgtcacaacaaatgcgccggctcgaattaattaaaataaaaagtgttgtatagctggggatattgaaaacgtaattaaaagagccattcagtagcgaaatcagtttaaattgtctcaatgttgcaaggaatatgttacatcccatatgtaagaacaatatcaaatgtgtatagaaccgaagttatgttaaaatatatgtttaactcaattgaaatgagaaaatgtgtttataatacctctagaaggaataggggataaccgagatctacaaaattaaataattcaatttcattatgcgaagaatgttgtcagttcatgaactttaaaagaaaag

SEQ ID NO: 17057 - DNA, 4710 bp, DROSOPHILA
atgcctggtggcggcgttgactttaagcctattagatacaccacattctgcggcagaaaagcattgttcaccttgagaaatggagggaactcaattgcagcacaccccgtcctcgaggagttctcaacttacactgtgatacgaccgcaggtggaacatggacgcactaagcgcagcctgctaaccactctggatgccaccgacggccttcacacgccgcagattagcctgagttacacccacgagggcaagcgggtcgtcgtcgacctgcagcgcaacgatctcctcctgccgaattcccacttcctgcgctaccaaaatgccagcagaggagccactcctggccatgtggttaccacctttaccaagactgaggttgatttatgccattatcagggacacattcgtggtaaaccagaatctgtggtagcactctccacctgtgatggtgctctggatggcatcgtaatcgatggcaggcagacgtacttcattcatccccatatcgacggcagggggcgattgcaggatgaccactatctgcttaagcaggcagacatgcatccgacgaacgccacctgtggctatgataaccacagggacgaccatagtcacgactacgaaaaggctgacggggataacggacttggaggagggattccttcactgccactccgccttgatggcggagaattctcgaggaccctgctccggaagaggcgtcaggcggacgatagcagtcaattgatccgggggccttacaatgccaacaaatactccagctacgtggagctggtcatcgttgtggacaataaggtttacaaaaatttccaagagaacaccaagaaggtgcaccagtattgcaaaggcattgccaatataatcaatgcgctctatgtccccttgaatatatttgtggcgctggtgggtgtggtgatttggaacgagagcaacgaaatcgagttctccagcgacggcgacctgacactgcgaaattttttgaactaccgtagcaccaagctggtgctggatcatcctaacgataatgcccagctgctgaccaaggagaacttcgccggcggtgtggtgggcaaggcactgaagggtcccatctgcacgtacgagtactccggcggagtgagcatgcagcacagtcctaacccggcaatggtggccacaacaatggcccacgagatggggcacaactttggcatggagcacgatacatcggattgtcattgtcgggatgagaagtgtgtgatggctgcctcgagtacctcgtttattccagttaactggagcagctgcagcattgatcagctcacaatagccttctcgcgcggaatgaactactgcctgaggaacaagccggaaaggttgttcgaatcaccgacctgtggcaatggtttcgtggagcctggtgaacagtgcgattgcggattacccgagcactgtgaaaatgcctgttgcaatgctcagacctgcatgttgcactctaaaaatgccacctgtgctaccggagaatgctgtgatctgaccacatgtcgacccaaattggcgggcagtgcctgtcgagaggctgaaaacgagtgcgatttaccagagtactgcaccggggaatctgagtactgtccggcggatgtcttccggcgggacacggagccatgcgacggcggtcaagcatactgcttccacggcacatgtcgatctcactccaatcagtgtcgaacattgtggggacccacgggtgataactcggagcattgctacaacaagaacacggagggcactaggctaggaaattgcggctataacagactgaacaagacctttttgcgctgcgaagagcagcatgtcaattgcggaatgctccactgcatccacttaaacgaacgactcgaattcggtatggaatcggcggctgtgctatcccattcctatataagtcacgatcgcaagattgtcgcttgtcgcactgccttggtggatctgggtttgcagaccaccgatcccggccttacgcccaatggagccaaatgcggcgtggataagatgtgtgtggatcagcgttgcctgccggtggacgcggttcggcagaagggcatgggaaagccatgtccggaggattgcaatggcaatggcatctgcaacagtcgaggccactgccactgcgatgtaggattcggtggggaatcgtgctcgaaggcaggatctggaggttccccggacagtggaccagccacagatccaaatggttccgtgggcttcaagcgattcctttacgtgctgttcttctttgtgctgcccgttgtggccctcttttggttcctctatcactgctacaagaacggcatgctgacgcgcggaaaactggcggacaatatgtatgtatcgacctcctccttcagcattggctcgaaagaggacaccagtcccgacagcagtatctccaccacactagcacataaacagacccctgcacgcactgcaccacctccactaccactgcacaccaatcgccagctttctggtattgtaactaacacggctccggccaccattactaacatacacgccatcctgccgcgccacaagtccaatccagatgtagtgcatcagttaaatattccgccgccctctgtgccaaaaagccatagcactcatgaggtgcgaccaaaggcggccaccttgaaacctctaactctcctgcactccacgcactcaacctccaataacaacaacactgagtcacttaaccagaatgacaagagcaacacgaacaacagcacactgagacgcaagctggatatcacggctccgcggctgaatgccaccacaaacccactggcactcaccgagggcgcccagttcatacagagcgaccccgcgagcttaaaatcctctggtggaagcaaacccatcacaacgcgaaccaatcaaaatggcacaggtccaccgccaagtaatggtttgttaaaatcaacgcctagcagtacggatgatatggattcggcactattaaaatcaccaagcgactccacaccgtcagctggactttttggaaaattcgatggcttcactctgcgaccgctgaacgatgcatcttcaccagcgagcaactacaacggaccaaatgtggcctttgtgcaacccactgtgcagcaggatggaccgcagcgaatggccccaccacccccagtagtaaaaccaggaacggctcccattcatcccccatccccgaaaccagaagctacttgggtgaggccagcgcccgctttgccaccacccaatcctggctcaacggcacgtcccattatctcaccacccaaactggattctagtacattaactatggtaccactcaaggacagcacagaggatctctcgcccagtcgatctgctcctccagttcctctacacgctgatcccaagctaaatgttaaacgagatggtaccattcgtcgatttgcttcgtttctgaagaaggaagagaaaccgccactaaaagagaagacctacatcgatcgggagcggctgcgaactctggaaatttctgcccctatgcctgtgcccgctgctccccaagctgaatcatccaattccgattcggagaccactccacgcgaagaggaaacccagaatctggtaaaacgcgcacaatccatgcgttcgcccaccaaaaaggctccactccagagttttggatccatgcgttctccaccgggactgccacggccgaagagtggtcaggtgaatagcaatggcgcctcgagaccaaagtcgccacctccaaggccaccgccagtggtggtcaagaaaacaaactccatcagttcatcgggctatcagcggccggtttccactgcccagagatctgtggagaatacctatgacgattgcgaatttgtggagaatgaagtgcgagcctcgaacgacgacatttactccgtaattgatgagattccgccagcggcacagaccctcaagcggagcgatttggtggccaacagggcgagtaatggcagcgatatgggtttgctaaatgaaatagtgaatgaactagaaaagatcaacggggattccatatactcaggaaagcccgttgctgcagcagcatcagcagctcaaccaacacccgcagatcccccaaaaagtccccagcgacctgctccacccaagccagcgagcagtgtgctggaggaaaaggcagctaatgcatctgcaagcacatatcaccgcccgccgccagccaatgctcccgtggctcgggttaagcccactgtggcggacaaatcacaggcgcaggcgcaggcgcagcccagcatgtccagcttcaagccggcggcggggggaaacgtcggtcagtcgcagccagcgccagtagtccagctggccaaacggagcagcagcggcagcatgagcggcgtaaccaattacgcccgtcccaaatcctttatgaagagcacaacgaaaacactgcccaatggaacggctggagcgtccaccacagcgccatcggccaccattcaaaagcccaaaccactgtcagcaaagccatccttcagcggcggtggagcgggaggagtactgggaaagcgggcgaatggcggagcagcgcccacgccacccactgtaaaggcggcaacattggcggcggcgccaaagtccaacattgcatcgctgacacagcgattcgagcagagcaagtag

SEQ ID NO: 17058 - protein, 1569 aa, DROSOPHILA
MPGGGVDFKPIRYTTFCGRKALFTLRNGGNSIAAHPVLEEFSTYTVIRPQVEHGRTKRSLLTTLDATDGLHTPQISLSYTHEGKRVVVDLQRNDLLLPNSHFLRYQNASRGATPGHVVTTFTKTEVDLCHYQGHIRGKPESVVALSTCDGALDGIVIDGRQTYFIHPHIDGRGRLQDDHYLLKQADMHPTNATCGYDNHRDDHSHDYEKADGDNGLGGGIPSLPLRLDGGEFSRTLLRKRRQADDSSQLIRGPYNANKYSSYVELVIVVDNKVYKNFQENTKKVHQYCKGIANIINALYVPLNIFVALVGVVIWNESNEIEFSSDGDLTLRNFLNYRSTKLVLDHPNDNAQLLTKENFAGGVVGKALKGPICTYEYSGGVSMQHSPNPAMVATTMAHEMGHNFGMEHDTSDCHCRDEKCVMAASSTSFIPVNWSSCSIDQLTIAFSRGMNYCLRNKPERLFESPTCGNGFVEPGEQCDCGLPEHCENACCNAQTCMLHSKNATCATGECCDLTTCRPKLAGSACREAENECDLPEYCTGESEYCPADVFRRDTEPCDGGQAYCFHGTCRSHSNQCRTLWGPTGDNSEHCYNKNTEGTRLGNCGYNRLNKTFLRCEEQHVNCGMLHCIHLNERLEFGMESAAVLSHSYISHDRKIVACRTALVDLGLQTTDPGLTPNGAKCGVDKMCVDQRCLPVDAVRQKGMGKPCPEDCNGNGICNSRGHCHCDVGFGGESCSKAGSGGSPDSGPATDPNGSVGFKRFLYVLFFFVLPVVALFWFLYHCYKNGMLTRGKLADNMYVSTSSFSIGSKEDTSPDSSISTTLAHKQTPARTAPPPLPLHTNRQLSGIVTNTAPATITNIHAILPRHKSNPDVVHQLNIPPPSVPKSHSTHEVRPKAATLKPLTLLHSTHSTSNNNNTESLNQNDKSNTNNSTLRRKLDITAPRLNATTNPLALTEGAQFIQSDPASLKSSGGSKPITTRTNQNGTGPPPSNGLLKSTPSSTDDMDSALLKSPSDSTPSAGLFGKFDGFTLRPLNDASSPASNYNGPNVAFVQPTVQQDGPQRMAPPPPVVKPGTAPIHPPSPKPEATWVRPAPALPPPNPGSTARPIISPPKLDSSTLTMVPLKDSTEDLSPSRSAPPVPLHADPKLNVKRDGTIRRFASFLKKEEKPPLKEKTYIDRERLRTLEISAPMPVPAAPQAESSNSDSETTPREEETQNLVKRAQSMRSPTKKAPLQSFGSMRSPPGLPRPKSGQVNSNGASRPKSPPPRPPPVVVKKTNSISSSGYQRPVSTAQRSVENTYDDCEFVENEVRASNDDIYSVIDEIPPAAQTLKRSDLVANRASNGSDMGLLNEIVNELEKINGDSIYSGKPVAAAASAAQPTPADPPKSPQRPAPPKPASSVLEEKAANASASTYHRPPPANAPVARVKPTVADKSQAQAQAQPSMSSFKPAAGGNVGQSQPAPVVQLAKRSSSGSMSGVTNYARPKSFMKSTTKTLPNGTAGASTTAPSATIQKPKPLSAKPSFSGGGAGGVLGKRANGGAAPTPPTVKAATLAAAPKSNIASLTQRFEQSK

SEQ ID NO: 17059 - DNA, 12878 bp, DROSOPHILA
ttccactgtgtcaacttctccatcttcttcgcaatgtcctcttcacgggcatttatccttgccagctcctctgccttctgcgcgcggttcttctccagcattttcaggagtgtttctagttgcataacctgcctgctgtctttctctccgtgggaatcgaagcaaatcttgggattcacattgctctgggccccataccggccgaatgcctgtctctggtacttctcggtcaaatgaatccaggagtgaggttcctggtatggcaatttgttaaggagcacatttttgtgttgtggttgcaggccggatctgtccaccgtctggggatatgttggttccacatccacgtcgccgaccaaggaagccggcagttccgctttcgcagcgctcgagtactgggcgcacgagcggagggcaggaagtctggtgacaacgcttatcttgcctacattcattttgaattgtattgtctaagcaaaatagtttattaatttccaatagagatgagagaaaatcgatagcgatgacaccaatgctggcaactaaacccttttggagctaaattcagatattttttaggccccgtcagaaagataagtaatagatattaattgttgtgacagtctggctgcatcccagctcaagctctatatatttcttttttccttgctatttatttctatcaatttgtaattatcgtttccacgatttgttactgacattttacttgtcagtttttattccgaaaatagatttctgaggcttaaaattatcatttttatgttgtcagctcaaaatataaaagaaacataaattgattatacatacgggcggcgcacaagtgtacccttaatataccaatcgttatcgacaacaatggtacgtgcacatatgccctaatgcaaaactaaattcttgaaagcgcggaattgcatttaaaacaactcgttttacttaagttgaaataagcatttgctcggataaaagcctacgccacgacatggcgggggatcgtgccttaagttccaagcaattggcggggcgcatacattccgtgtactgcaaagatttcgtgtaggtttatttccatcaaaggcgcaaattgacaatttcgcggctcatttgattatttccaacaacagatcctacagcgagatcacattccatccgaagcactacctgaacgttctgaccggtcccaatggcagtggcaagtccaccatcgtgtcggccataattttgggcctcggaggggaaccgattctccttgatcgctccgccagcgttgccgactacatacagagcaacaaaacctcggccaccataattgtccgggtgtatggacgcacgcccaacaccacggaaacctttcggcgcataataaactctaatggcttgtctaccttctctgtgaacgacaaagacacctccaagaagaactttttggctgctgtatcctcctttaacatacaagtcagcaatttgtgtcagttcctcccgcaggatcgggttcaggtatgtcgttatgttggcaattcataaattacacacctatttattgtaaacatactgtttcaggacttctccaagatgaatcctcaagagcttttgctcaacacaatgtcctccgtgtgtgacgaagacctgatcaacagcttcaacagtctaaagcaaatgcgcacagaacaggcgaatgtccatgctaatcgggaaaaagagaaaagtgatctggttaagaagcaaaaacgattggaacagtaagatatagttacccgagcttatttttattcactaagtaaaatgtaaccaaatgtgtggatgaagtacaaaattttaattcttactaaaaacctaattgtcttaatatcattttattagcttacaaatgactgtgtcccaatataaagaacgcgaagaggtcaagcaaaagctgcaggtgtacagtgcgaagaaattgtgggttgagactcaggctggagaagccaaggccgcagaaatgaaaactcaagtgaaaaacgcaaaaactcagagcgacaaattgaagaaccaacatgacaaacttcttcaatcccaagaacaaattgagaaggaaaaagaatcactcagaaaggccttattggaaaaggtaatgggtggcagtgttttttaatatattttttaaaaataagtttttttagacacgcttattagaaaacgctgtagcggagaaggcggctattgatggtaaaatggactctttgaagcaaggaatttaccaaaaaaaatatgaactggaggttggtgttcttgttgcatatatcgatcatgtgaataactcttaatcttacattctgtcacatagcaaaacattaaaaaatcacgaagaacggccacagagtgtgataacctaaatcagttggtggagaataaaatttacgagcttgaaaccctaaataagagcaggcctctgatcgtttcggaacttgaaagggctaaggaatcgtgcgcagctgcccgcgggaaagcaatggagcagtacagcagacggagacaactggaacaaaaactgaatgatgaaatgattcctgaaattactgcgtataaacttaaaatagagcggttgagaaacgtcaaaatgcaaaagattgatgtaagttcttactgaaataatgaaaactcaacttaacgctacctttcattttaggaaattagagcaaaaaatccgaatttggttgtggccatgaactggttggcgcaaaataagcaaaggtacaaattgaacgtttatgacccaatgatacttgaggtgagcttttcaaaatgaagccattaccaatggcctaatgttaaaaccgctatcatagcttacagtacaaaatcatgaggacgcaaagtttttggaaaacgttgtggcgcagcgcgatttatttgcatttgcgtgtgaggacaagggggatatgtcggacctgatcaacgagttgtgtgtgaagcaaaaattgggagttaacgttatttactgcgcaccatccgatagactcgtgtacagtcccaaaactcccatcgatgatctgcggtatgcacttgtcaattgtccaatactagtccaatacctagttttaaatacttttacagctctttcggatttcggtcatacctcgtggatcttgtcacgggaccaataccactaataaacaagctgtgcgcttcctattccattcataatataccaattggcacagaagctgtgggcaattacacttcatccattccaaaagctatccgagtttatttcggcggtgtgtatatttttcttattcggtttcgcttcgcaaatgtataaattctgattttgaattccgtactgtgcattttaggcagcaagaagttcgttgtgaccgcatcccgctatcggtcggatactattctaactgaaagtagcattcgagcgaagaaccaacttattacagtggactcacaacaactggccctggtgatgaaacagtgctccgaagcagtgaaggaaagcgacagcattaaaaacgcaataacccagaccgacaatgaatttgaacgattgcaagctgttgcaaaggatgagcaagagaagagacgaaagcttgaccaaaaaatagcccattttaatagcctgaaaaccgaaattgaaacgctccaaaagaagctggaagccctgcgcaatagcgattgtaagtatttcttagtgcactaaatattcagccattatgaaccgtgttttttcagcgctagactgtcttgaaaccaatttttgtaacagtttgcataaagacttaaaaaaaatattcgatgctgatgcggaattgtgctcgtgcttgaaagctattgaccgacttataattgaaaagaatatggcccagacaaaggtatccatttatatgctgcaacatgagactcaaattgaagccctcaaggaaagcgaggaacagagtaaagcagcaaccgtaaggaaatcgaaatgcacttaaggaatttatttataggaatgttttgcttgcagagagacttccaacagttgctgcagtgcttagaaaatcaaattagcgacgttaacaaacgaaagagcgctattcagggcctttgccacggagaaattccaaccagtagcaaatttccttttaagaaggaatttagggagctggaaaatatagatttgcccgaactacgagaggcaatacatgactttcaggcacgattggagtgcatgaaaagtgtaaactccgaggtaaaacactcttttaaattagtgaactgaagctgatatatctaataactttccatattaaaatatgcaggccatcagcagctatcaaggactgcaaaatgaagtcaagcaactggaggaaggaattcaagagtctgttaaccaagcaaagagcatcgagtctggcatgtccaatttatacgacaaatgggagcccaaacttaatagcttggtagaaacaatcagtaccaagttcagcgaatttatggagtccattgaatacgtgggagaagttgtgttatccaaaaccgacaaagtgagaacttaaactgtcctacataaaaactttacttcaaatgtatttcactttattaattctagtatgactttgactcatatggtattcagataatggtccagttcaggagaggtctccagctgcagccgctggacaagtttattcaatctggtggcgaacgcgcagtgtccatcgccatatactcattgtccttgcaacatgtcacccacgtgccattcaggtgattgcggaacccagctgcaaactgacgcccgatttatagttctccatttctaggtgtgtcgatgaaataaatcaaggcatggacgctacaaatgaacgtcacatattcgacttgctcctcaaagaagccaccaagcacggctcggctcagtatttatttgtaacacctaaggtaaatataaatgcttattcatttaaatatttagttaactgttttaaatcttctttgtagttgcttcgagacctgaactacaacgaacatctctgtgtttccattgttcacaactcaaaaactgtttgccatggcatgcaattcccgatggcttagacactttgggtcatccagatttactatatgtatttttttatattaaacactacaaaacatatctattgcattttgtcgaatgaccagccttgtggggactccttttcgaactgttggcctactcggaataaaatctgtaagccggtaaacaagtccaaaggcaatgatgcctgacgatttgttttatcagatttcaatttgtcctcgatttaaaaccctacaacagcacctatatcttatttcatatgtgaaatgattttaacactacaatgcgaatacttttaagtaaagagatgcctttgtacatatgttttttaagtaattggataaactattttgggatgttaaaaaatatatttatatttatatatatatttatatatatttagatatgcaatttaatgcaaatcatttctttacagggttaatattaagcaaagtatgtcaaaagtatgatccctcgacgcaaactataaaagttcaggttaacttcagatagatggttagttttttatcagctccaaagaagtcgggttttgatcgcaatccgtgtgtgcccttattatggttgggattttttagatcagcagttattgctatatagccatatttataaatcttctactggcctactaagtcccaacataatgagagtaaaaaccacaggttcgacgttcatgtgaagattagaaaaatacagacaaatatatttcatagttcaaaaaaagtttttaatgtctattttaacaacttttgagtactccagatagagaagcgcacagatatttaatatgattgcaacgaacagaatggtgagtttcataaaaggggtgtgtacaagttttgaatactgcctttgaaatcgcagaattgcaaaattgcattttggtcccaagaaagaaaagttcaattggaaaatatgtttttggctagtatttttgctactcatataaattgtagtggtaatccctaaagttcgattccggacagagggtatcagttcagccgcttgttgagagaaaacggaataccccaacttactcgcagtatattttggtatttttctaggagcttaggttgtttttgcaatgagcggtcactctattggcaaccctcagacgattgaaaaattaaaattaaaattgagcgtttggcagggaaatatgtattcaaaggcgggatttgttctaattttcgtgctgggtctagtgtccagcagctgggtaagtgttaatcccctacgtactgcacataacgtgtctaaaccaacgttctctcagggattcctggagcatgacagctggattacagtggagctccagcactcgctggctgcaaactcggaaagtttctccttccgcgggaatgtgacgattcccagtctcaactctggtctggccaatgtggagcaaccagatctgagcactgccgatctggacttgctgaaggtaacagtggttcgggcacatgggcacgccggtaggaaaatgttcaccatttttcaccatccaagagtggtgtacttagtgcatcttatggagtggttacaggcgaatgaggtggctagatattcgctgagtattgaatatactgcagcattaaccattgtattctataagtgtagaaatgcattcaattatatagcctgtttgtttccatttagtttttaaaaagatgccttgtcagttaagtttaagccttcctgttgaacgtaatcttaaaataagtatgcacttagtaataacccctttaaccttttttagaaactggcccttggaaacgagttctaccgtttgaaggccacggtggtgtattcaaatggagctaaggcgcagttcatcacttccaacaaggcctgtcgcctgctgcaagcccaattgaatgacgtgctttgggtgtcgctcgaaccctccggatacgtaaccggcatcactgtgtcccaggacacggccccggccactatagagtgcacccaggaagacgtgaataagctactggaaacgcaattcagcaccgatgtcctcatccgccacgctgaactggcccccgtgcccgatactgctggctttattcagaaggtggagcgggagcgcgaggccagggagcgcggggaggttcgggataaccgcggcttctttgccaaatacgtaagtacaaatactttggcctgaaatcctttattacaaattcacttttttatttttagtggatgtacatcgttccggtagttctgttggtcttcatttcgggagccaccaaccaggacggtgcaaaataggttaactgagtgatgtggtgtaatcttttgtttgttagctttttctaatcacaattcctagacaactttggttttagcgattaaagattgagtaaaataaaaatgattgagacattttaaattaaatatacacagaaataatgcttttgagctcccagaggatttcttaagagttggcatagggttttgagacctcatataaatatttgtaataggatttgcacctgattttcggttcacattgttttcggaaatggtgtgcagtttattttatttattttattatattttattaattgaatgcctgcaaacagccgagttttatttggtatgcttatattgtactttcaatttgataattgaacgtttggaattttgccgatatatttttcctggttttcggatatttctgttccgtccacaccgtgtaatcaaaatttgaaatcacttcaaatctcttcttatattaaggtgtcaattattttgagtttgtgtatttctcaatttaagactgtttcatggcaagcaagccatattttagatggtttggatgtatatcagccatgtgatttgaacgtcctgatcattaaaccctgcaaataagtttcggttaaatttgtgatcaaggtaagcaaatgtatacaaaccgtatttctggatttatatagttttgtttctggcagacaattcccagcttattcgacgcacttcgttgctcttacatatcaagaaatgttgctcatatattcaaaatcgaatgagcttcacatttcaaaaatcaacacctggcagagaaagattttcgaactgcaagaaatgcatttgtaaaatgaatttcaaggggctcgaacaaattattccgcgtctgctgctcttcttaatgtgaaactccttcgagtttgggtatatgaacaacattataggaaagtaaagctgatcacgtttggggcatccttgtttgaatttctgaagattttagggatcctggtccagattaaggtcaattttgtggttttaaatatctaaaaagtaatgtactttctgcattatttcctttggataaagctattcgataatagaaactgtcggaccgtacaatatatgggaaaagtgtatcttcgttgctataatcataaatagttctagtccaatattttatttatttattagagatgatagtatagtagttcaatatacactagatgttttaaccacattttgggtttaaatttaataactaccatactaccataaccaccgactaccatatagcgcacacttataaacggtcggaaaattaattgattctttatttacaaatagtatccagataatccagatccagattttaactaacgtataatacaagtggaatatttttgaaaatggggaaaatgtacttacttgaagccatctgaacttaaatatatttaatttttaaaattggtttcctcgatgtacatttttgtggtgccttgtcgctgaattgtatcaaactaaatatttctgtgatgcaaggctgaatttaaaacatctgcctgctttgttttccttttggtgtttcagaaagaacaaaagtaaactatgatatctctatgttcggtattatataggttattcgaagaggagttttcaagttatttggccatagttttaacaatcgtttgaggattatatgcatatctattactactttaaacataacaaatgcgctacgatgctagacttagtttagacgaattaatccaactgaaagtgcaaaccgtaattaagtgcctttttaccacaagtgacgggctatccgtcgagaatcgtgaattacacgctcgcttaaccacggaccaccccgaaattgactggagtgcgatgcgtgccgagtggttgcagttcgaatttgtaattacaattcgtggcgccttgccggggaagttctgctgggggagcccccagcactggctgaaaacaattttctccaggttttctccgtggtaagggcggcgagggctacgtgacaatttgccaatacccaaatttctccgtggaccaggaacgccttctccgatggcgtaaaaaacgaatagcccgtgggcttgttttttacccacgaggcgagccaacatgtggtaacccataatttacgcctagggatgttatgattttgattatatcgaggacttgaacaatagtttctggcatttactcaatgagacacagttcgcactttctgcggtcaaatcatacagttttggccatttgttaattaccatttaaggatcattagttttagtaaagcaaatttaatccttgatttcaaatacttctttctcatttttattcagttgccatttttatttactacacgatatacttatacttcccatatattatatttcaaaatcattgcttattgaagaagtttctaactgaatatgatgactggggagctaaactttaaactatattaaacctaagctaaacctaataatttgcatatcaaataactgttttttttttagttagcactttttttgagaagcgggcataatgttctttccctgtagttgaaaaagccatttcctaccttatattcttcccaaaagtacaatatcaatttgatgggataaagttaaaatggtttcagtttttacggccctcagaccgaagagtgcgtcatctgaataatcccaaatattttgacagtaatattgacatcgactgcattgtgatgggtactctttttaagcatcttaatccgtcaccccttttcgtttaaatttaaattacctatttggcaaacaaggcgcactgaaggataacaaaacactttcaaattcgagcccacaaattgtcagatcaaaaagcggagtcgggaagggccatctgtcaaaattctcgtaatgccatgcaatctgtcactcttcgcatttcctggccgggcaacagttaacaagtttgtagtgaaaaacgtccacatggcctatacccctaattatatacaatgtatgtaatacgtcctaataagtgctatgtgcatatcccggtgcacttgtcaagtgttggcacaccgactcaaccggcccggtcattaaaatatacatttttcgatttgtttaaattagccacccccacggcatcgagagggttgcgggtcggtctgccgcattcaattacccaagtggttcgcttaacgtgttacctttggcccacattcgaatttaaaacgaacgaatgaggggtgttgtcactcggagcggttaatagcgctattacacccccaattagttcgaacagatagacgtatacgtatttgtctagtttagggtgatgggcttaaacggaacgaacaaagtttaggcctacacctaatcaagcaccttatccactttaaagtttattgcctaatccccactaccgcacttccaatacaatccattacaatcaagtactatccacaacatccccaattcctttcaagttcattaaatgcctaccctgatatatgtttaacctattatttggtctcaattatttagatgcggtgcatttcgtgagctgattcacccgtcatacctgtcacaagttcgaaaaaggttttactgaatataaaataaacatagtcggataggaaacgcatcttacataagaacagacgggcaatattaccccgtaatcggggaagaatcgggccaagaggacctcctttcttccagtgagtaacaaagtaccaaagaatgcgttctgttttgataaagtaaataaatgctaatacggctgcttgaatgccaaaagcatttggacaaacactgaacccacgcagatgcactcatgggcattaaatttgtaacaagttagcagctggcgccaattcacaagcgtcgtgtcgagtgattaaacaatcgcattgatacccagcccagtccatccgagctgattccaattccaattcacacaatcccgatcccaattgaatttcggattgacaggttcataaacggcattgttcgcgtgtttgtatttgaatttcatgcccgaatacaattgctcttttcctgcccacacatcctcatcgaggatctcacaaaaggcgggaaagaggcttacgcgtcgggcaaatacgctctggtttgcattggtcatgggaaagccaattgcggactcattccgggtgctctgttgggtgtgcggttcattatcatcgagataatcccattagaaaacgctgcggcaagtgctggtttgatattcgggcgaatccttcggggccggataataaatacatgtgcatttgcacatgacgaaatatcctggcaggctttaattagcacttctctatatgctctatacatcacttctttaggttttatgcaaaatcgaaatatatcttcatacatgcgtaagaattacaaaaatctaagaaatctccgattttgcgggttttcagattctgcaaatcctttgaaggataaacgcagtttcaatgagattgccgagctgggcagtgaaaatattgattgaatacgcaacgaagtcaaagttcaaaggatgtgccttgcagctaaacgtctatatttatgattattttcttaaagcattttaaataaataaagtccatcaggagattaaacgctgcttgagtgaatgcgattaaaataaattaacttaaagtgccctcaatgggcagatgtttcgttcttttccagccttttgccgctgtaacatgagtacggaccacaagttggccgtggctcaaatatgaaattgccaaaaatcaaaattcccaaatgcgcgcacataaatctgtaaaatttccaatgcccatacaaaattccaaatcactttaactgctggtaatcggcgcataatcttcgaaaatttgcatgcactccccacgaaagaaggcatttgagatccttatcgtgcgcattattcacgtcacgtctgaagtattcaaagcatagtaaaactgcccatcaatttccttccccgtccccttccgttccacccggcgcggccccgccccctttttccacccgcccttcgccccttcgcctcatcaaccgaagaaatattagaatactcggcgtcctgctactaaattacctcgccttttgtgatggcgatgacggcttgttgtgggtgctgtgtcccgattgtcctgttcctggacctggtgccttgtccaggtccctcggatcgttggggcaattatggccggttgggagccccgatatgtcgcactgcggacatgcccgttcggtgcttgttcccccgccccgctgtcttttgtctttgccatttgagccatcgaggcggccgcaactccagtctctccaggtcgtacatgatcgccctgggccatcaccctggccctctcctctcacgaggagtaacagaagatggggttggagatgggcaggaggtgggccgcggcacaggcgttgcgtctggcacgggctagtggccataattctcggtacacgactgcaggaaagggctgctgcagcggcaccaccgc

SEQ ID NO: 17060 - DNA, 4038 bp, DROSOPHILA
atggcgggggatcgtgccttaagttccaagcaattggcggggcgcatacattccgtgtactgcaaagatttcgtatcctacagcgagatcacattccatccgaagcactacctgaacgttctgaccggtcccaatggcagtggcaagtccaccatcgtgtcggccataattttgggcctcggaggggaaccgattctccttgatcgctccgccagcgttgccgactacatacagagcaacaaaacctcggccaccataattgtccgggtgtatggacgcacgcccaacaccacggaaacctttcggcgcataataaactctaatggcttgtctaccttctctgtgaacgacaaagacacctccaagaagaactttttggctgctgtatcctcctttaacatacaagtcagcaatttgtgtcagttcctcccgcaggatcgggttcaggacttctccaagatgaatcctcaagagcttttgctcaacacaatgtcctccgtgtgtgacgaagacctgatcaacagcttcaacagtctaaagcaaatgcgcacagaacaggcgaatgtccatgctaatcgggaaaaagagaaaagtgatctggttaagaagcaaaaacgattggaacacttacaaatgactgtgtcccaatataaagaacgcgaagaggtcaagcaaaagctgcaggtgtacagtgcgaagaaattgtgggttgagactcaggctggagaagccaaggccgcagaaatgaaaactcaagtgaaaaacgcaaaaactcagagcgacaaattgaagaaccaacatgacaaacttcttcaatcccaagaacaaattgagaaggaaaaagaatcactcagaaaggccttattggaaaagcaaaacattaaaaaatcacgaagaacggccacagagtgtgataacctaaatcagttggtggagaataaaatttacgagcttgaaaccctaaataagagcaggcctctgatcgtttcggaacttgaaagggctaaggaatcgtgcgcagctgcccgcgggaaagcaatggagcagtacagcagacggagacaactggaacaaaaactgaatgatgaaatgattcctgaaattactgcgtataaacttaaaatagagcggttgagaaacgtcaaaatgcaaaagattgatgaaattagagcaaaaaatccgaatttggttgtggccatgaactggttggcgcaaaataagcaaaggtacaaattgaacgtttatgacccaatgatacttgagcttacagtacaaaatcatgaggacgcaaagtttttggaaaacgttgtggcgcagcgcgatttatttgcatttgcgtgtgaggacaagggggatatgtcggacctgatcaacgagttgtgtgtgaagcaaaaattgggagttaacgttatttactgcgcaccatccgatagactcgtgtacagtcccaaaactcccatcgatgatctgcgctctttcggatttcggtcatacctcgtggatcttgtcacgggaccaataccactaataaacaagctgtgcgcttcctattccattcataatataccaattggcacagaagctgtgggcaattacacttcatccattccaaaagctatccgagtttatttcggcggcagcaagaagttcgttgtgaccgcatcccgctatcggtcggatactattctaactgaaagtagcattcgagcgaagaaccaacttattacagtggactcacaacaactggccctggtgatgaaacagtgctccgaagcagtgaaggaaagcgacagcattaaaaacgcaataacccagaccgacaatgaatttgaacgattgcaagctgttgcaaaggatgagcaagagaagagacgaaagcttgaccaaaaaatagcccattttaatagcctgaaaaccgaaattgaaacgctccaaaagaagctggaagccctgcgcaatagcgattcgctagactgtcttgaaaccaatttttgtaacagtttgcataaagacttaaaaaaaatattcgatgctgatgcggaattgtgctcgtgcttgaaagctattgaccgacttataattgaaaagaatatggcccagacaaaggtatccatttatatgctgcaacatgagactcaaattgaagccctcaaggaaagcgaggaacagagtaaagcagcaaccagagacttccaacagttgctgcagtgcttagaaaatcaaattagcgacgttaacaaacgaaagagcgctattcagggcctttgccacggagaaattccaaccagtagcaaatttccttttaagaaggaatttagggagctggaaaatatagatttgcccgaactacgagaggcaatacatgactttcaggcacgattggagtgcatgaaaagtgtaaactccgaggccatcagcagctatcaaggactgcaaaatgaagtcaagcaactggaggaaggaattcaagagtctgttaaccaagcaaagagcatcgagtctggcatgtccaatttatacgacaaatgggagcccaaacttaatagcttggtagaaacaatcagtaccaagttcagcgaatttatggagtccattgaatacgtgggagaagttgtgttatccaaaaccgacaaaataatggtccagttcaggagaggtctccagctgcagccgctggacaagtttattcaatctggtggcgaacgcgcagtgtccatcgccatatactcattgtccttgcaacatgtcacccacgtgccattcaggtgtgtcgatgaaataaatcaaggcatggacgctacaaatgaacgtcacatattcgacttgctcctcaaagaagccaccaagcacggctcggctcagtatttatttgtaacacctaagggattcctggagcatgacagctggattacagtggagctccagcactcgctggctgcaaactcggaaagtttctccttccgcgggaatgtgacgattcccagtctcaactctggtctggccaatgtggagcaaccagatctgagcactgccgatctggacttgctgaagaaactggcccttggaaacgagttctaccgtttgaaggccacggtggtgtattcaaatggagctaaggcgcagttcatcacttccaacaaggcctgtcgcctgctgcaagcccaattgaatgacgtgctttgggtgtcgctcgaaccctccggatacgtaaccggcatcactgtgtcccaggacacggccccggccactatagagtgcacccaggaagacgtgaataagctactggaaacgcaattcagcaccgatgtcctcatccgccacgctgaactggcccccgtgcccgatactgctggctttattcagaaggtggagcgggagcgcgaggccagggagcgcggggaggttcgggataaccgcggcttctttgccaaataccccagtccatccgagctgattccaattccaattcacacaatcccgatcccaattgaatttcggattgacaggttcataaacggcattgttcgcgtgtttgtatttgaatttcatgcccgaatacaattgctcttttcctgcccacacatcctcatcgaggatctcacaaaaggcgggaaagaggcttacgcgtcgggcaaatacgctctggtttgcattggtcatgggaaagccaattgcggactcattccgggtgctctgttgggtgtgcggttcattatcatcgagataatcccattagaaaacgctgcggcaagtgctggtttgatattcgggcgaatccttcggggccggataataaatacatgtgcatttgcacatgacgaaatatcctggcaggctttaattagcacttctctatatgctctatacatcacttctttaggttttatgcaaaatcgaaatatatcttcatacatgcgtaagaattacaaaaatctaagaaatctccgattttgcgggttttcagattctgcaaatcctttgaaggataaacgcagtttcaatgagattgccgagctgggcagtgaaaatattgattga

SEQ ID NO: 17061 - protein, 1345 aa, DROSOPHILA
MAGDRALSSKQLAGRIHSVYCKDFVSYSEITFHPKHYLNVLTGPNGSGKSTIVSAIILGLGGEPILLDRSASVADYIQSNKTSATIIVRVYGRTPNTTETFRRIINSNGLSTFSVNDKDTSKKNFLAAVSSFNIQVSNLCQFLPQDRVQDFSKMNPQELLLNTMSSVCDEDLINSFNSLKQMRTEQANVHANREKEKSDLVKKQKRLEHLQMTVSQYKEREEVKQKLQVYSAKKLWVETQAGEAKAAEMKTQVKNAKTQSDKLKNQHDKLLQSQEQIEKEKESLRKALLEKQNIKKSRRTATECDNLNQLVENKIYELETLNKSRPLIVSELERAKESCAAARGKAMEQYSRRRQLEQKLNDEMIPEITAYKLKIERLRNVKMQKIDEIRAKNPNLVVAMNWLAQNKQRYKLNVYDPMILELTVQNHEDAKFLENVVAQRDLFAFACEDKGDMSDLINELCVKQKLGVNVIYCAPSDRLVYSPKTPIDDLRSFGFRSYLVDLVTGPIPLINKLCASYSIHNIPIGTEAVGNYTSSIPKAIRVYFGGSKKFVVTASRYRSDTILTESSIRAKNQLITVDSQQLALVMKQCSEAVKESDSIKNAITQTDNEFERLQAVAKDEQEKRRKLDQKIAHFNSLKTEIETLQKKLEALRNSDSLDCLETNFCNSLHKDLKKIFDADAELCSCLKAIDRLIIEKNMAQTKVSIYMLQHETQIEALKESEEQSKAATRDFQQLLQCLENQISDVNKRKSAIQGLCHGEIPTSSKFPFKKEFRELENIDLPELREAIHDFQARLECMKSVNSEAISSYQGLQNEVKQLEEGIQESVNQAKSIESGMSNLYDKWEPKLNSLVETISTKFSEFMESIEYVGEVVLSKTDKIMVQFRRGLQLQPLDKFIQSGGERAVSIAIYSLSLQHVTHVPFRCVDEINQGMDATNERHIFDLLLKEATKHGSAQYLFVTPKGFLEHDSWITVELQHSLAANSESFSFRGNVTIPSLNSGLANVEQPDLSTADLDLLKKLALGNEFYRLKATVVYSNGAKAQFITSNKACRLLQAQLNDVLWVSLEPSGYVTGITVSQDTAPATIECTQEDVNKLLETQFSTDVLIRHAELAPVPDTAGFIQKVEREREARERGEVRDNRGFFAKYPSPSELIPIPIHTIPIPIEFRIDRFINGIVRVFVFEFHARIQLLFSCPHILIEDLTKGGKEAYASGKYALVCIGHGKANCGLIPGALLGVRFIIIEIIPLENAAASAGLIFGRILRGRIINTCAFAHDEISWQALISTSLYALYITSLGFMQNRNISSYMRKNYKNLRNLRFCGFSDSANPLKDKRSFNEIAELGSENID

SEQ ID NO: 17062 - DNA, 3196 bp, DROSOPHILA
cccgtcgacgataaagtttcaccagaaacaacatccaaaatgccgcgaaagttctcaaaatcagcgacaagattcgatgtacccatggacctttccatgctaaaaagtgtgtacgctttaaatattttaaggaaattaacttaactaattaacttacccatttagatatgaccccgtgggattatttgagcaagtacgtctgggtgtcgcaacagagaaaacagctgtataaacgagtattcttaaagtatctgagtagaatcgaggagccggaaagcgagttggccgccatgggaaatgatgagctgccggaatacaaataccgtgagagaaccctcgtctggcagagtctgccgcaagctctcgaggatgttctggagttccatggcaccgaggaaaatgtacaaggcacactgagaatgttgggctacgacgcccaagcatcgggtgacttggacttccgcgcctggtgcggaattgtctccttcgccgaaagattggccctagctgatgaatccggatcggatgattcgtgcgacgagttggaaaaggccgatttcaatagcatggagcaaataatgccaaacttcactgtgcccgaaaagcttaaggaaattttcgatgtaattcgaaagacacataaaaaaagatattgatttaagatttgtttttaataattgtcactaaattgcatttacaaaataaaaactatgtgaaacaaaacaaaatatcatcagttatgaatctaattgttgtagaaaaagaacatacatatgtatacataaaattcatttgtaaacaaagtgaaaaaacgattttattatttttaaataaaaatgagaaaaacttgaaaacaattttgaatatcgcggtctttgaaattgtatactaacaattattagatattaacgtaaaaatactgacaaaatacagccatactaaaacagtcgatatggaaactgaagcatcggtattgtgacaatcgacctatcgatactaccattagtgaataatccaaacccgactaattaaattgtaaattaaaagtaaaaactcgttaattaccaatcatggccactttggaagacaaactattgggcgagaaacttgagtactactgcagcagcagcgagggcgaggacaatggtgacgagggaggcgataataagggggcatccgggaaatcccgatgctccggtctgaccatcgacacaaatccggatgcgactccggctggtggattccggcagcaaagctcaacgaacacgggtcccaagggcgttgtaaaggactggcagagattcaagcagctcgaggcggagcgacgggatgaaaccgaacgtcaacgtctggcgctggccaagaagctcaccattacggcgacaacgtcggcggaggacgaggaacgcaagcggcaggaggaactggacgccgagctggacgaactgatgagcgaggacttcctgcagcagtaccagaaacagcggatggccgagatgctgcgccagacggggcaccaccagcagtttggccaggtgcagcagttgaccagccacgaggagttcctcgcctgcgtcgagcaggagaacaagcacaccaccatcatcatccacatatacgaacgacaattggccgcctgtgccacgctgaacaaatgccttgacagtctggccagcgattatccgtccattaagttcgccaagatctgcagttccgtggccggaatgagcagggacttccgcaccaaaggattgcccgccctactggtatacaaggcccaagcggtcatcggaaactttgtgcggcttaccgatgacctcagcgatgacttcttcgcctccgacgtcgagagttttctgattgagcacggcattatagtggacagagctctgtacaattgagctgctagcaaggcttatgaactgacaagtaacttattcgaggcttatcccatggctggacctttcaatgtatagctaagaccattaacctattaaatccactctatcttggttaattcttagttaatcaaatcccaaaaagtttttacagtttaatataatccgtataatttgtatcaacaaaagaaactaacacgacttcttggaatctccgagttacttgtcagtttaagccagggctttagaattatacgcaaattttgaccaaatatgtgttcgtaagattagcatttaagagaacttaagcccgccctccgttttaattttgcaatttaaatatttattttttccattcagtaattagttacattatatgtatgattcttttctcctttttttttttttttttttgtatacagaagttcttaaagtgcaactttcacaaaatggaaaatgtctctaaaatggggtaaatcaaaagaactataaaactaaattaaaaatatttgaaaaatgtattcgaaatgcattttgcacgcgaaaatatatggaacagatcctgctcactaaatatagcgtatatctataacgattctgtcatcatttacaacacgatttatatttatgtaatagtatttagtggctaatgaatgtacttcactcgaactcgtactccgtaagatttatacaattatatattttatagcttatagcctacacatatacagcaataaaaatgatgtcgataaaattaaccttctttttgtttgctttgctaatcaacaaattggtgtttcttgcatttctcattcctaaattctgggcaacattcagagctttaaattctaatttttacacttaaacagatgcgcttcatactacgtacgaaatggcaaaataagatgcattcattttcatttgttttatttccttagctaacatttagattaattatgtaaattcaatttcaaaaacacaccaaatgtggtcggtcaaacacagcgaggaggaaattgtttctttctctaacttcgcaaagaatttttcaattaaagctgaaaaatctccaagtctaggatgaaggggaaacagaactctagtggcggggcagtggaaatcaatctggagagggtcctttgggaccatctggagaccatacttggattggtactattagtaactagtcgtcgaggattcgctaaatcagattctatagaaagtggaattatttcattcgttttagctgtagtttggcggttctgctcccccgcaggaagggctgttttagcatatcg

SEQ ID NO: 17063 - DNA, 889 bp, DROSOPHILA
cattagtgaataatccaaacccgactaattaaattgtaaattaaaagtaaaaactcgttaattaccaatcatggccactttggaagacaaactattgggcgagaaacttgagtactactgcagcagcagcgagggcgaggacaatggtgacgagggaggcgataataagggggcatccgggaaatcccgatgctccggtctgaccatcgacacaaatccggatgcgactccggctggtggattccggcagcaaagctcaacgaacacgggtcccaagggcgttgtaaaggactggcagagattcaagcagctcgaggcggagcgacgggatgaaaccgaacgtcaacgtctggcgctggccaagaagctcaccattacggcgacaacgtcggcggaggacgaggaacgcaagcggcaggaggaactggacgccgagctggacgaactgatgagcgaggacttcctgcagcagtaccagaaacagcggatggccgagatgctgcgccagacggggcaccaccagcagtttggccaggtgcagcagttgaccagccacgaggagttcctcgcctgcgtcgagcaggagaacaagcacaccaccatcatcatccacatatacgaacgacaattggccgcctgtgccacgctgaacaaatgccttgacagtctggccagcgattatccgtccattaagttcgccaagatctgcagttccgtggccggaatgagcagggacttccgcaccaaaggattgcccgccctactggtatacaaggcccaagcggtcatcggaaactttgtgcggcttaccgatgacctcagcgatgacttcttcgcctccgacgtcgagagttttctgattgagcacggcattataattagcatttaa

SEQ ID NO: 17064 - protein, 272 aa, DROSOPHILA
MATLEDKLLGEKLEYYCSSSEGEDNGDEGGDNKGASGKSRCSGLTIDTNPDATPAGGFRQQSSTNTGPKGVVKDWQRFKQLEAERRDETERQRLALAKKLTITATTSAEDEERKRQEELDAELDELMSEDFLQQYQKQRMAEMLRQTGHHQQFGQVQQLTSHEEFLACVEQENKHTTIIIHIYERQLAACATLNKCLDSLASDYPSIKFAKICSSVAGMSRDFRTKGLPALLVYKAQAVIGNFVRLTDDLSDDFFASDVESFLIEHGIIISI

SEQ ID NO: 17065 - DNA, 4462 bp, DROSOPHILA
agccttctggcggcagcattgtactcctgacattctggaaaggattatctttaggatgtaaactattccgatccttcgaagtctacctactggtggcacttatgcgctgagccagcacatgcttgtccgccaatggacaacagatgacagggacattgttgcgatgggtgcagatgtcgatgcgggtgccatgcacccgatactctcgaatgacgtggaggcactgataggccaggatgcagtatccactccggccatcgaagctccgccggcagaaggcaccttcgtgaagtccttccgaaaccgaagtcctaacctccgcatcgtcgccgaacttcagatagctttcctcatcttcggtgtcctgatcatccacgtcctcgccaatggtcgccactggctgctctttccaaacttcggggattgtgtacttggtggtctggtagttgattatttcaagggcatcgagagctgtgggtttaattaatataatattagaggcaccattaatatatacgattgatttactacttaccctcaagatttggagtctgcaggattaaatgcaagcatgtcaattgaagatgcacgattagagaccaaagtattatcattctatttgtgagttctgtgatttcattatttactttctttcaaacatttcatataagaagctggcataaataatgaaaatagatactttagggctttgtatatattttccagattaaactataaattaaccaatataccccagaggaattcagtttttcagaagacaatggccaaagaatttcgattagcttcaatatttgagccaccactgtgcccaaaacaaacccttgcctggcttggttgattttttgtttaatgtatttttattaattaatgcgggcgctcaattataaattcggatgaatttcaataaaaccgtttgccagcgacgctgcgtttcaattccgcgtagtgtggattggaagatcccagtcggattaaatcggtcaatcgagcaagacctctacagatggcggattggaagagacctttggagacctgcatcgcactctgtgtgctcctgtgcgtatttcacgtgaacggacagtgggagtttcccgcccagtatccggaaccgtatcgaaatccgaatccgaatccagtgccggatccaaccaggtgggacttcaacaactacaatagctacggttacaacggtcaatgggcgccgggctactttaataactacggctattatagaccgccgccgccaccaccttctccgccatgtggaagaccaccgcctggatctccgccaccgggcccgcctccacctggtcctccacctggttgccccggaggtccaggaggtccgctgcagcatcggcaatgggacaatggccccaggcagtggcaaccacgtcgtccgccaccaaatcaccatcgcaacttccacaacatcttcctgaacaccgaaagcaaagtggacggggagaactacaacaagaccgcggagacggaggacttgcacgacgacttcaatggccgatccattgtggcacctggacagtacccgcacatggtaagtaatgaataaataaaggtgcagtccaaaaaaaaaacaaaaatcgtagatcaacgaaggccaataaataaataaataaaatcgcacgaaaccggaatgggggaaacgccaaagtaccgccgttcgcaacacaaacacgactaaatctccgattgccgaaatccaaatcgaagtccaccatatcatatcagttaacagttaattgggtacgactaatccgctctttaaccgatcttaggccgctctgggattccggaacgagaaccacgagatcgactacaaatgtggtggaagcctcatcagcgaagagttcgtgctcacagctgctcattgcctgactactcatgggtgagctttttatggataacaacttatagagaattaggcagagtatagctttcttatctacataaactatcttatgatactcaagagtaaatacgaagtctccttaacttacatataccccttaaaatatctaaataaccctttgataggtattaactttaatttttcattttaacaagcaagtatattagatatgataatataacagattattaagaacagcttttggacaatatctggattattttccttatagcacctcgcccgacatcgtaaaaatcggagacattaagctcaaggaatgggagctcaacgtggcgccccaaagacgacgtgttgcccagatctatctgcatccactgtacaatgcgagtcttaactaccatgacatcgggctcatccagctgaatcgaccggtggaatacacctggttcgtgaggccagttcgcctgtggcccatgaacgacataccatacggcaagctgcacaccatgggctatggctcgacgggattcgcccagccgcagacgaacatactcacggaactggatctctcggtggtgcccattgagcagtgtaactccagtctgccagccgacgaaggttctccccacggattactcacaagtcagatatgcgcccatgactatgagaaaaatcgcgatacttgccaggtgaggaacataagttttgggtaaattttagatataatattattattttaaagggcgattctggaggaccgcttcaactgaacttggaacgtcggcgtcgaaggcacacaagtcgtaaacactatcgctactacctggtgggcatcacatcgtatggagcatattgtcgcagtgaacttccaggtaaatatataaaaatatattaaaatatataaaatgtataatacttttacaaattcattcattttacaggtgtttatacgcgtgtttcatcctatatcgattggatagcatccatagtgtggcctaattattatagcgaatttactaatcaataaaaagcagtctataaaatgtcacaaacaaaaagttgtaaaaaaaagaaaattttaattttaattaaagcatagcaaaaagtactttatctaggtctttttttgtattgttagattgattgcatttgttgctaggcaccgcggtgtgctgaaatggtttatttaatcaataattgcgttttgatatgcaaaaaagttaataatggtagggaagagcaaaaagaagcgtaatagcaaggattctacatccagtaatgcaggaagtggcgaaggcgaggagaagaagaagaaagagggcggcaagaagaaaggaggcgtgggaaagtccattggttgcgacattttcaatgacgccgccatggaaaacgcctactatgtctgccataatgttcaggtaagtcattacttaaagtacataatctattaaaaataaaaaaaaatatgtaaattattttaggacgttctgaagtcaagaggatttgcttggccggatggccaaaagaagaaaaagaagggaaagcgctaagcggctaaataaaccatttaaataagtgaaataattttagttattttttataaaaatattcttgcaattaagcttatggtataaatgatagtgtacttcccccttggcctggaaaatcgagagctacgcgctcatttttatttttataaatccaaaacaagacatcatcgatcatatccaaacaattccaaaaacgcaggctgccccaagtaaagtgtcagtggcaaacgcttctagaacaaacacacacacacacttttcgatttttcggcgtgcgaaaaatataggaaaccaaaattttattcgttgctgcaccatataaataagtgcaacaatcgcgcttttttcagttcaaaatcaacactagtagctgcagcatcacacattttggatattcagcataaggcgattagtaaccagaaaaaatgggtaaaattccggccatcggcatcgacttgggcaccacctactcctgtgtgggagtttggcagaacagcaaggtggagatcatcgccaacgatcagggaaaccgcaccacgccctcgtatgtggcattcaacgagacggagcgcttgattggcgatccggccaagaaccaggtgagtcatggtctcccatctcaattgtccaaatacgcggattgtctagctccaatatggcctaatgagaattgcgagtgttttaattggaatcatataaggtacacaaataattgtgggaactgaggaaagtgggttgtgagtggtctccttggatacatacttaaatatttgaaataatatgcactgggttaagtcatttaatatgaataaaaacaagaggaaagagcaatctctgagatgcattcacttgaaaaagtatcttagattctcaggactttcacgaatgagaagcatagtgcaattaacttctgtttatccagtaaagtttttaaagcgaaaatgatgcatgatatttcatcaaaatatattattattaaaaggaagtactaataaaattc

SEQ ID NO: 17066 - DNA, 1407 bp, DROSOPHILA
gtcaatcgagcaagacctctacagatggcggattggaagagacctttggagacctgcatcgcactctgtgtgctcctgtgcgtatttcacgtgaacggacagtgggagtttcccgcccagtatccggaaccgtatcgaaatccgaatccgaatccagtgccggatccaaccagaccgccgccgccaccaccttctccgccatgtggaagaccaccgcctggatctccgccaccgggcccgcctccacctggtcctccacctggttgccccggaggtccaggaggtccgctgcagcatcggcaatgggacaatggccccaggcagtggcaaccacgtcgtccgccaccaaatcaccatcgcaacttccacaacatcttcctgaacaccgaaagcaaagtggacggggagaactacaacaagaccgcggagacggaggacttgcacgacgacttcaatggccgatccattgtggcacctggacagtacccgcacatggccgctctgggattccggaacgagaaccacgagatcgactacaaatgtggtggaagcctcatcagcgaagagttcgtgctcacagctgctcattgcctgactactcatggcacctcgcccgacatcgtaaaaatcggagacattaagctcaaggaatgggagctcaacgtggcgccccaaagacgacgtgttgcccagatctatctgcatccactgtacaatgcgagtcttaactaccatgacatcgggctcatccagctgaatcgaccggtggaatacacctggttcgtgaggccagttcgcctgtggcccatgaacgacataccatacggcaagctgcacaccatgggctatggctcgacgggattcgcccagccgcagacgaacatactcacggaactggatctctcggtggtgcccattgagcagtgtaactccagtctgccagccgacgaaggttctccccacggattactcacaagtcagatatgcgcccatgactatgagaaaaatcgcgatacttgccagggcgattctggaggaccgcttcaactgaacttggaacgtcggcgtcgaaggcacacaagtcgtaaacactatcgctactacctggtgggcatcacatcgtatggagcatattgtcgcagtgaacttccagggaagagcaaaaagaagcgtaatagcaaggattctacatccagtaatgcaggaagtggcgaaggcgaggagaagaagaagaaagagggcggcaagaagaaaggaggcgtgggaaagtccattggttgcgacattttcaatgacgccgccatggaaaacgcctactatgtctgccataatgttcaggacgttctgaagtcaagaggatttgcttggccggatggccaaaagaagaaaaagaagggaaagcgctaa

SEQ ID NO: 17067 - protein, 460 aa, DROSOPHILA
MADWKRPLETCIALCVLLCVFHVNGQWEFPAQYPEPYRNPNPNPVPDPTRPPPPPPSPPCGRPPPGSPPPGPPPPGPPPGCPGGPGGPLQHRQWDNGPRQWQPRRPPPNHHRNFHNIFLNTESKVDGENYNKTAETEDLHDDFNGRSIVAPGQYPHMAALGFRNENHEIDYKCGGSLISEEFVLTAAHCLTTHGTSPDIVKIGDIKLKEWELNVAPQRRRVAQIYLHPLYNASLNYHDIGLIQLNRPVEYTWFVRPVRLWPMNDIPYGKLHTMGYGSTGFAQPQTNILTELDLSVVPIEQCNSSLPADEGSPHGLLTSQICAHDYEKNRDTCQGDSGGPLQLNLERRRRRHTSRKHYRYYLVGITSYGAYCRSELPGKSKKKRNSKDSTSSNAGSGEGEEKKKKEGGKKKGGVGKSIGCDIFNDAAMENAYYVCHNVQDVLKSRGFAWPDGQKKKKKGKR

SEQ ID NO: 17068 - DNA, 5458 bp, DROSOPHILA
taagtatgtacggagctgggccacttaaatcaattgtcgaattgggttcagttaatttcctggtgtgacaaagtgatttctttgaaatatttcaacttcgaattgatatcgcggtattattataacaatcttataagcattgtgtaattaatggtcggacttaaagtgtacctaagcgtaacattaaacgtactagttaattctctttctttcttagacttggctaaacttattttaaaatgagaaacatcgcattcaaggatgtaggcatcttcaaggcagtctttcagcaagaaagacagaatccaatcaattgacagacttcagagatttttcgaaaggtcccggatcgtcaaattcccagttcctctctctgcttgtttttcttcattccttccaattgaggcgttgccgtagacaaacttttaagtttttaattaatttgtttttgttgcggtcccggccgccgcaacgatgcttttttaaactcaacctccgtttgctcatttttccttcggtcgctggtggaaaaaaaggttaagtggtttcatttggcaaacatttacccagacccgaaacgagaagttccccagccgctcatcaatgcccaagtgtgtaagacttttaataggcttttgtgtggaaaataaattgatgcggtgcacctgtaaaacgctccaacaatggtgctccgcctgagccagacgaatgtctgtccgtgtgatgcggccgaccgcatcccagccagaaagtttggaagggaaggcagtagggattcagttaattttgagtaaattgttagagaattgtttgctgctcatgcttctgggcaagtcccttatgtgggtgacttgtggccttgcctcgaaattatggcatttaattatcaagtgttttgagatactcctgggtcgggaaagtgatgtgaaaatgattgaaattctcgaattaatgttgttgtcgtgcaaactctgtaactttattcgaaagaatttgtacactatccatagctggtaaagtaccttaaaatatacgccattgccgccgggttctcctgctgtaccagatgtcccgcccgaaagacccagaacatactgagttttccgccgtgcttttcgtacccctccagcatcccttcaatccgaatggcggtacggggtgccttggcatactccaaactgcggcgccacttaagtcggcggatccagttaacggtgccgggtgttgcgcacagtaggtccagaatgccagaataaatacccacctgtatcggcgtctcttccagcaatttggtaactaaatttcatacgtttacgatataaaatgttcttagacttgccaacaaaacaaaaagcatgacaaatcataatcacctatttgattcgctggcttaaaaatatcctgactgagtcgttcgaagactgtcgagttttgttccatccacacgggcatattgcctagccccagtgctttagtcacattggatcgcataaagtcgctcatttgcggatcttcgccgtaccggtagacctcgtccacgtgaacccgccgctgggtgttgtagatgaagactccgcccgcactggcggagatctcatcctgaacttcggtcgccttcatcaaggcgcgtaaccactttccgccatagacaagtgcagctaactcgccggccagtcgcgatattcgacgataaccgtcatcatccacaatgcccgattggagcagaaagggggcataggacagaatactgtccagtggagaggtccatggattgcctactaccacggatttcagatcgcactctaattcgcctactttcttcgccaaatgcaattccagcgcgaattcgggagccatttttccgccatagctctcggagaatatatgcaggggcacctttcggaaatcgggatacttcgtaagaaactgcttcatcaactggacaagatcgagggctatctgcctgttgtttctggcatagaggctgtgatgctcaacgtaagcgaatcccgtgcccaccggactgtccacaaaaagaacattcacgtgcttcaaccaactgctttcccgcgttttgccctcgatgtcgatgggtccaagctgctcaaatatcccgctgccggtggatgcaacaccgggtcccccttgcagccagattaccagcggcctctctatgaaatgagatacattggcagtggtgtatagaagccagtaaaagaggtgagcgcccttccgaacttccacatagtcccattcctgtactccaggtcccagaccaacacgtcctgcaacgaaataactaagacttttggagtatttctctcaaacatcgaaacttataaatgaccccatttagtagattttaattaacctcaatatggcaaccacaactacgccatttttttcactttggtaaccataccacatttatgtctcagaaaacgtacacaccttgcacgcagatcagtgataaaaaaaaacacagggcacacgcccatatacgatttttattctcattgaggtacataatcgcgatgatcacaatgcaatggaaaggaaagtagaactaaactgcccgcttcggcgggaaatgcgcactgatctgacgctgcttttagctgtttgcttactttactaggaaatacgttcatttttccagtaaacactaaaaatggaaatggaatgcatacacgaaatggaaatcccctttcttttataatattacgattgttaaacaaatatttgtttggttcatcttttacacttactgatattagaagtcctgccatattaagtgggtaggccgtattcagagattttaataccctggaaaatgtactgaccgactgtgctaagggtttccacttaataaacctgatggaagtgcctcggtgtctgcggccgcgttaccgaagtgtagacctctaaacaaaatcgaacttgtatatacgctgctttaaataaacattgacccccagtctatagacccacccacaatatacatatattagctctgcatttgattaagacgtcagcagaaaataccgaaagtgggcatctggcatacgacgtctatatggtagaaatgctttattcgatgtgtcttatgttacatattaagttattcaatattatagctgtcatattgcgtaacggattgaaggacatactgcatggcgactggattatctgacggggccatgtggcccgaccgatttatccagtacatcccgaagttgcctccgacctttttgtaaccctgaagtatgcctttgataactatggttgtgcgattggcctccagatattccgatttgtcattccatgcccagtccttgatcagagccaatgtggctgtggtcggcactaaagtgtccaactggccagaataaatatttaccttaacagaggtctcattcagcaggcgcgggactaaaataaatgtaataaagtacgtagaacacgttaacacctcactaacttacttgtattaatttccgatttcaggcgatctccgtgaaggctggacaacacttccataacctgtgacgcatagacagtaccattgatctgcagggcctcactgacatttcgctctatgaagcggataaattcttctccatagccgtaggttctatcctctgaaggatccacgtgggtctgtgtattgtaaaggtagatctcaccagtcagttgctgcatgagttcataccacctcaagtactcatcagtggccttatcaaactcgtgtttcttgagagcacttaagattcgttcctcctgggcatcgagtagggctaccccatcctcgtcgatcaaaccattgacgaacaaatacttggagtgctcgcggctgatgtgccgagttgatatccaaggattgccgatagtcactgacttaagagttcccggatgcgccaactcaccggcgctcatggctttagccagtcgaatggccagggcgggggccattttaccaccataactctccgagaatatgtggagtgggacgttcttgaactctttgtgcaatttatagaagtgcagcatgaagctaatcagatcgtcgatgagctcctcattgttggtaaccagcagactggtgttatccgcatagctaaaccccgatcccacgggattgtcaatgaacagcacgttgacgtactgtacccagtttccgtctcgcggctgaccattcgtgtccacaggtcccagctcctggaaatttcccagggctgtggaggagccaccaggtccgccctggagccacagaaccagcggtcgatcagtataactgctcacattcgcagtggtgtaatatagccagtagaacatgtgagccccatcgcggacgtccacataaccccagtcctgttcgccaggaccaaatcctttgcgggcctcggatattccgaaaaggaatatcagacacacaatcgacaaggcaccgcaccacattctcaaatgtaagatagaaaatcactgggctctttgcgatcggaatcgcggctatttatcggagtggagagcattttggaccggatgaaacgtgaccatgaaaaatgttaaggttctctttatatcagataaacgtatgtatatatatagatttctgttcacactcggactaaagcactctaaaaaacgaaagttttttggtagttcgacaataatgattatcagaatcataattattacttaaattggaaaacattccgtaaaagacactaagtaatatacttatattatataaaaaaagcaaatgattttttttagttttatttttatttttttgcaagtacactttctatttcgctttgtcactatgtaaatcatacattgcttacgttcgcattttcaccagctgagtaagaggtatctgatagtcgaggaactcgacttcaacgatcatcttgtttatttattaattgactagcatcatcccatttgtttaccataccgaggcacgagcatcatttttttttcgagtgcacatataaacccctcatccttttatttcctcaactatttcctgtttaaaccatttattttctcttcatagttttcttttgctctattttattgaaattaggtgaaattgattttgtatttcttttttgataaacttcaaattatatttgctgaacaacaaggcgtttattttttaaatactatgcaaataaccaacggctagtgttgaactcttataaaaaaaacctttttattttagttgttcaaatttaaatacaatccaaatgttaattttataaaactaagcaagaaaataggttcaaaacttaaaactaattcaaaatttattctaacatattttagggccttttgttgtttattcaatagtgtaacatatttttgggatctacatccgatatcttttgtggcataagtttaaaacttttgtctgcaacgtacaaataaaaacataaatacttcagtgtaa

SEQ ID NO: 17069 - DNA, 2457 bp, DROSOPHILA
atgtggtgcggtgccttgtcgattgtgtgtctgatattccttttcggaatatccgaggcccgcaaaggatttggtcctggcgaacaggactggggttatgtggacgtccgcgatggggctcacatgttctactggctatattacaccactgcgaatgtgagcagttatactgatcgaccgctggttctgtggctccagggcggacctggtggctcctccacagccctgggaaatttccaggagctgggacctgtggacacgaatggtcagccgcgagacggaaactgggtacagtacgtcaacgtgctgttcattgacaatcccgtgggatcggggtttagctatgcggataacaccagtctgctggttaccaacaatgaggagctcatcgacgatctgattagcttcatgctgcacttctataaattgcacaaagagttcaagaacgtcccactccacatattctcggagagttatggtggtaaaatggcccccgccctggccattcgactggctaaagccatgagcgccggtgagttggcgcatccgggaactcttaagtcagtgactatcggcaatccttggatatcaactcggcacatcagccgcgagcactccaagtatttgttcgtcaatggtttgatcgacgaggatggggtagccctactcgatgcccaggaggaacgaatcttaagtgctctcaagaaacacgagtttgataaggccactgatgagtacttgaggtggtatgaactcatgcagcaactgactggtgagatctacctttacaatacacagacccacgtggatccttcagaggatagaacctacggctatggagaagaatttatccgcttcatagagcgaaatgtcagtgaggccctgcagatcaatggtactgtctatgcgtcacaggttatggaagtgttgtccagccttcacggagatcgcctgaaatcggaaattaatacaatcccgcgcctgctgaatgagacctctgttaaggtaaatatttattctggccagttggacactttagtgccgaccacagccacattggctctgatcaaggactgggcatggaatgacaaatcggaatatctggaggccaatcgcacaaccatagttatcaaaggcatacttcagggttacaaaaaggtcggaggcaacttcgggatgtactggataaatcggtcgggccacatggccccgtcagataatccagtcgccatgcattatttcgttgcaggacgtgttggtctgggacctggagtacaggaatgggactatgtggaagttcggaagggcgctcacctcttttactggcttctatacaccactgccaatgtatctcatttcatagagaggccgctggtaatctggctgcaagggggacccggtgttgcatccaccggcagcgggatatttgagcagcttggacccatcgacatcgagggcaaaacgcgggaaagcagttggttgaagcacgtgaatgttctttttgtggacagtccggtgggcacgggattcgcttacgttgagcatcacagcctctatgccagaaacaacaggcagatagccctcgatcttgtccagttgatgaagcagtttcttacgaagtatcccgatttccgaaaggtgcccctgcatatattctccgagagctatggcggaaaaatggctcccgaattcgcgctggaattgcatttggcgaagaaagtaggcgaattagagtgcgatctgaaatccgtggtagtaggcaatccatggacctctccactggacagtattctgtcctatgccccctttctgctccaatcgggcattgtggatgatgacggttatcgtcgaatatcgcgactggccggcgagttagctgcacttgtctatggcggaaagtggttacgcgccttgatgaaggcgaccgaagttcaggatgagatctccgccagtgcgggcggagtcttcatctacaacacccagcggcgggttcacgtggacgaggtctaccggtacggcgaagatccgcaaatgagcgactttatgcgatccaatgtgactaaagcactggggctaggcaatatgcccgtgtggatggaacaaaactcgacagtcttcgaacgactcagtcaggatatttttaagccagcgaatcaaatagttaccaaattgctggaagagacgccgatacaggtgggtatttattctggcattctggacctactgtgcgcaacacccggcaccgttaactggatccgccgacttaagtggcgccgcagtttggagtatgccaaggcaccccgtaccgccattcggattgaagggatgctggaggggtacgaaaagcacggcggaaaactcagtatgttctgggtctttcgggcgggacatctggtacagcaggagaacccggcggcaatggcgtatattttaaggtactttaccagctatggatag

SEQ ID NO: 17070 - protein, 818 aa, DROSOPHILA
MWCGALSIVCLIFLFGISEARKGFGPGEQDWGYVDVRDGAHMFYWLYYTTANVSSYTDRPLVLWLQGGPGGSSTALGNFQELGPVDTNGQPRDGNWVQYVNVLFIDNPVGSGFSYADNTSLLVTNNEELIDDLISFMLHFYKLHKEFKNVPLHIFSESYGGKMAPALAIRLAKAMSAGELAHPGTLKSVTIGNPWISTRHISREHSKYLFVNGLIDEDGVALLDAQEERILSALKKHEFDKATDEYLRWYELMQQLTGEIYLYNTQTHVDPSEDRTYGYGEEFIRFIERNVSEALQINGTVYASQVMEVLSSLHGDRLKSEINTIPRLLNETSVKVNIYSGQLDTLVPTTATLALIKDWAWNDKSEYLEANRTTIVIKGILQGYKKVGGNFGMYWINRSGHMAPSDNPVAMHYFVAGRVGLGPGVQEWDYVEVRKGAHLFYWLLYTTANVSHFIERPLVIWLQGGPGVASTGSGIFEQLGPIDIEGKTRESSWLKHVNVLFVDSPVGTGFAYVEHHSLYARNNRQIALDLVQLMKQFLTKYPDFRKVPLHIFSESYGGKMAPEFALELHLAKKVGELECDLKSVVVGNPWTSPLDSILSYAPFLLQSGIVDDDGYRRISRLAGELAALVYGGKWLRALMKATEVQDEISASAGGVFIYNTQRRVHVDEVYRYGEDPQMSDFMRSNVTKALGLGNMPVWMEQNSTVFERLSQDIFKPANQIVTKLLEETPIQVGIYSGILDLLCATPGTVNWIRRLKWRRSLEYAKAPRTAIRIEGMLEGYEKHGGKLSMFWVFRAGHLVQQENPAAMAYILRYFTSYG

SEQ ID NO: 17071 - DNA, 5652 bp, DROSOPHILA
ttaagttacgcagagcaaaaagccgggttactcatgtcacatcaatttccaagccaacaacgccccctaaatagaaagcaacaactattattaatagacttaaattaggcgatatacatatacatacttacatagaacaaacctacattgagacatacttatacatacatgcgaagtgactaaattattggctattgtaatttgtatttgtaatatgactattcagaattaagatattattaagtggccgataaatttaagtagcaggcgccgttcagcagcagtgtcatttatagaattttaaattaactacgaagacatcgagaaatcatcattaggcacttgctaaaattgtactaacaataccgcagacatattggtgaacgatatcaaaatgttgcccaatttacttgtttacttttgtcagcggtggggatttggtttttttgaattcccaccaaacatcggagctcgattattgagatgatttcctggttgatttcgtttacacaattatacagagttcataagccgcatgtctatcaaaacaccaaaatgatctgttatcaataaatatatgtacttgacattctgatatttacacatgcataaatactattattaaacatttttaaagaaaaatatattttgatcgaaaacattcggttgcgtttgatttacaagcgagcaggttggaacgtttttaatattttgggtatttttggggtcaaaagtggaataaccaaataattaagtacacgatattctcataaattacgcagaatatgaaaacactcagacccaaaactcctcaacaaaaaacaacaaaattattgtacatatatctttgtattatatttatatattttagaccctccagattagatgcatcagttgaaaataagttaacttttctttgtagtttaaaacttgattacaattaagataaatatgtagggattagctatgtacaatgggaacagctgtgggattaccgaactcaaactagactcgagacattgttgtagaggccaacggcagacagctcgtccagatcgatttcattggatggaagattgggatgaggccagttccttggcctttgattaacatggggcggcacaatggcctgaaaggtgggggactgcagaggcctataggctaccgcatccacgtagtccacttgtcttggtggagcatttggatgtggaatccttcccacgtaaagatcttcactgcgatagagactcgcatttggtacgtagccggagtgcagccttctctgcggagtttgcggaatcggtggacggtggggcagttcatggaagtaagcatctttgggtatgtgtctctcgggcagcccaaactgggcgctactccggtggggaatactatacgtgggcgaagggttcgaagaggtgccctccaagtgatggaagttattgttcaagcgggagtgtgatcttgcggcgatcacatgtgccgtctgggagtcctgtcgattggagtcaatggtgttttgcagttgggccaccatatccctcacctgaccagcgttcggcttctttaggcacttgatttcactgttccgaatctccaccttactcatactttcattgccattttgacgcacttctgtttcctcggcgtactccatgatgggattggagtaaaataaattcgacatgacgggatagttgtcttccaagcaaagaggctgccgtttcatcagattggagatacctgccgcctcgctcgcttgctccttgtagagcagcttgtcgcctcccattccctcggcagtttcattgacagccgtctcctctttgcccagatccgcgaaggaggcatcttttcgaagcgccttgatcaccgagttcagcatgttctctcctctcccaatgcgctggtagtacttattgtaatccgggtggggattgctgcccgtgggtgatgcctcccagtcccagctgttggagttctgggagggatttgaggtctcactggagttcggatagcgtcgtatcacgttggcgtactcgtcgaaattgggactattaacactctctttatcttctcgaagttgggcagactccgcccttggatggggattataaggtggcgataaggaagaaagctggcgcttgctctcctgttcgctgtccctttccatgatcagggtggttttctctaaaagcactcccagtctttcggagacttttaggaaatctagcttaagttcatctagcttcgagtgctcctctggttccgcctcttcttgcacctggtccttgtcacccacttctgcctcttcttcatcccgagcttcattggaatcgtcatcgctgtcgctatccacctggacctccgctgatcggtgtactatagcctccactgcctgatcttccaggacatctacactccgtgagttggtgagcctaccaccttcgtggttgttttccaagagctctagactgcggcacctggacattgttctttcgatccttgagctcttgttctgctgatcgaaggtggaccgcataggttcacctcgtcgcaggaactcactgaggtgctgcctcttgctctcgcatcgcaatctgtcctcgatcatcgttcttgtgagctgttcaatctgatcgttcgtcttgattgccaatgcctgaactttgtgacctagacgttccttggttttgtgaacgtatttcttcaaactctttcgattgcaatttagtttgttttcaatgtgacggaagaagggaccgcaatagcatgtgttgcccacgctgaccggacccttgtgaatatgaccagccaaatccaggaagtattgctcccccgacttaagtggctccttgggcagtgtctccagttttggtgaaggaaaggcacgcggatcgggaaagtagtgacagccatagggtgaccagttgatacccttgtccaccacatccctttcacgatctctgtccttgtccgatctgctgccgccctccttgggtttctccttgcgattccgtatcttcttcggcgtgttcaggatctcgatgatttcacggtagttcttcctgatcgctatgtgcatggggcagtcgccttgtgcgtttttaatgcccagccgagcatctgcctctaggagaatccttgtcagcttcctgcgacccatggcacaggtgatgtgcaaagcggtgtcgccgttcagatttgttttattcggatcgcaaagggcggagagcaggatccgggagactcctgcatgtccatatctgcaggcggtgtgcagcggagtatctccatactgaaattgttaaacatgttaaacatggttatcactgatatgatccaacacttacattattccggacatcgggatcggcgccggccagcagtagctccctagagctctgattgtgaccattttgagcggccaagtgcagggcggacaacccttcgttgttggcaatacccagggcgctattgtgtagggcttcgatggtctggtgggccaccttcactctgcccttgttcttatccttgtctttgtccttctgtccctttgctgcttttcccacccccgaggaagcgggtggcgtggggggcgtgcagatcaatttcacgcagcgactgaacccccgactggcggcctcatggagcggggtattcccctgcacggattccctggccagtcgatcagcattgctgaacaggagaccctccacccggcgatcatctccggcggctaccgcctcgtgcagcgaagtccaattgctggagtcgggcttaaatcagaaaaagaagttacatcggtgtaagatttgttggttcaggcaagtgcccttacttaccccggatatcgcattcgggagagcttcctgtttcggaatgcgggaggatccatgctgcattgtctgcgaaaatattcattatttatcaaatttgttaaattataatttcattcatttatcatgatgtgttgcaattataactttttaagtaacactttatcaaaaccagataaaattaaaaaaattatttatattagaactacattttgtctttaataaatgaaaaatcttacttaaagtaccgtaattaccgttagaatcgtttatatgtcgaaaatcatatgaaagatggtattctttgatataaccttgttgacgacgaaagagcttaacttgacctgggatcaaatgaatctgatcttcgatcgcacattttctagccgtgtatgcgcatgtatgtgtgcctcacgtaatggcgtaccacgtagtaattgtcattacaaatagaagtgggagttaccaaaagcgatcaaataaaggactcgtaatttgaaatacaacctttttgagggtagattaaatgtctttcattataacacattgataaaacatgtatggtttcttaaatgttcaacactattacagtaaatttctagacctgaaaaccaggtttaaagtgcgcctaggttttctcgattcccgacttacttttcactaattttaaatcccgtctttggaccgcaatttacgcattgcaattcgccactctcacgtatttacacatgtttactttcgactattgttcagtacccgactttgcagtatttggccattgatggattgatggaacgcccagagttaatttggcttcaagccaggcctaaaaagagactaaaagaaagccaatcacaggcaaaattggcaacaggtttcgagctgggttgccgtacctgcgacagctaacggtgaagccgatagtctgcattattgctccaacagaagtacggtcactctacaagtaggcaacgaattttgtttgtcatcggcatttcgcattcaacgtttccaattgttttttaaggagctttaagaatggctttagctgaaatctgcaagatatcgaatgctccgtacatgcggcccaatgcctggtcatcggcggatgtggaggaagagcaaaaagggcttatgtgcaatctggccaatccctacacactggctgctccgccattcgagaacgtatgtagttaattagctgatcttcttgggaaatttactaaaaaatttgacaatttcctcagcccctgcacaaccttaatcagatccaggccaatggcgacaagaccggcgtcaaaatcaacttcgatcacggcaccacaacgttgggcttcaagttcaagggcggcgttctcctggcagtcgattcccgtgccacgggtggatcgtacattggctcccagtcgatgaagaagatcgtggagatcaatcagttcatgctgggcaccttggccggtggcgcagccgattgcgtttactgggacagggtcctttcgaaggaatgccgccttcacgagcttcgaaacaaggaacgcatctcggtggccgccgccagcaagataatggccaacattgcccacgaatacaagggaatgggtctgagcatgggcatgatgctggccggttacgataagcgtggtccaggcctctactatgtggactccgagggatctcgcacgcctggcaatttgttctctgttggtagtggatcgctgtacgcctacggtgtcctggactctggctatcattgggacctggaggacaaggaggcccaggagctgggacgtcgcgccatctaccatgccacctt

SEQ ID NO: 17072 - DNA, 2935 bp, DROSOPHILA
ccaaattaactctgggcgttccatcaatccatcaatggccaaatactgcaaagtcgggtactgaacaatagtcgaaagtaaacatgtgtaaatacgtgagagtggcgaattgcaatgcgtaaattgcggtccaaagacgggatttaaaattagtgaaaaacaatgcagcatggatcctcccgcattccgaaacaggaagctctcccgaatgcgatatccgggcaattggacttcgctgcacgaggcggtagccgccggagatgatcgccgggtggagggtctcctgttcagcaatgctgatcgactggccagggaatccgtgcaggggaataccccgctccatgaggccgccagtcgggggttcagtcgctgcgtgaaattgatctgcacgccccccacgccacccgcttcctcgggggtgggaaaagcagcaaagggacagaaggacaaagacaaggataagaacaagggcagagtgaaggtggcccaccagaccatcgaagccctacacaatagcgccctgggtattgccaacaacgaagggttgtccgccctgcacttggccgctcaaaatggtcacaatcagagctctagggagctactgctggccggcgccgatcccgatgtccggaataattatggagatactccgctgcacaccgcctgcagatatggacatgcaggagtctcccggatcctgctctccgccctttgcgatccgaataaaacaaatctgaacggcgacaccgctttgcacatcacctgtgccatgggtcgcaggaagctgacaaggattctcctagaggcagatgctcggctgggcattaaaaacgcacaaggcgactgccccatgcacatagcgatcaggaagaactaccgtgaaatcatcgagatcctgaacacgccgaagaagatacggaatcgcaaggagaaacccaaggagggcggcagcagatcggacaaggacagagatcgtgaaagggatgtggtggacaagggtatcaactggtcaccctatggctgtcactactttcccgatccgcgtgcctttccttcaccaaaactggagacactgcccaaggagccacttaagtcgggggagcaatacttcctggatttggctggtcatattcacaagggtccggtcagcgtgggcaacacatgctattgcggtcccttcttccgtcacattgaaaacaaactaaattgcaatcgaaagagtttgaagaaatacgttcacaaaaccaaggaacgtctaggtcacaaagttcaggcattggcaatcaagacgaacgatcagattgaacagctcacaagaacgatgatcgaggacagattgcgatgcgagagcaagaggcagcacctcagtgagttcctgcgacgaggtgaacctatgcggtccaccttcgatcagcagaacaagagctcaaggatcgaaagaacaatgtccaggtgccgcagtctagagctcttggaaaacaaccacgaaggtggtaggctcaccaactcacggagtgtagatgtcctggaagatcaggcagtggaggctatagtacaccgatcagcggaggtccaggtggatagcgacagcgatgacgattccaatgaagctcgggatgaagaagaggcagaagtgggtgacaaggaccaggtgcaagaagaggcggaaccagaggagcactcgaagctagatgaacttaagctagatttcctaaaagtctccgaaagactgggagtgcttttagagaaaaccaccctgatcatggaaagggacagcgaacaggagagcaagcgccagctttcttccttatcgccaccttataatccccatccaagggcggagtctgcccaacttcgagaagataaagagagtgttaatagtcccaatttcgacgagtacgccaacgtgatacgacgctatccgaactccagtgagacctcaaatccctcccagaactccaacagctgggactgggaggcatcacccacgggcagcaatccccacccggattacaataagtactaccagcgcattgggagaggagagaacatgctgaactcggtgatcaaggcgcttcgaaaagatgcctccttcgcggatctgggcaaagaggagacggctgtcaatgaaactgccgagggaatgggaggcgacaagctgctctacaaggagcaagcgagcgaggcggcaggtatctccaatctgatgaaacggcagcctctttgcttggaagacaactatcccgtcatgtcgaatttattttactccaatcccatcatggagtacgccgaggaaacagaagtgcgtcaaaatggcaatgaaagtatgagtaaggtggagattcggaacagtgaaatcaagtgcctaaagaagccgaacgctggtcaggtgagggatatggtggcccaactgcaaaacaccattgactccaatcgacaggactcccagacggcacatgtgatcgccgcaagatcacactcccgcttgaacaataacttccatcacttggagggcacctcttcgaacccttcgcccacgtatagtattccccaccggagtagcgcccagtttgggctgcccgagagacacatacccaaagatgcttacttccatgaactgccccaccgtccaccgattccgcaaactccgcagagaaggctgcactccggctacgtaccaaatgcgagtctctatcgcagtgaagatctttacgtgggaaggattccacatccaaatgctccaccaagacaagtggactacgtggatgcggtagcctataggcctctgcagtcccccacctttcaggccattgtgccgccccatgttaatcaaaggccaaggaactggcctcatcccaatcttccatccaatgaaatcgatctggacgagctgtctgccgttggcctctacaacaatgtctcgagtctagtttga

SEQ ID NO: 17073 - protein, 921 aa, DROSOPHILA
MDPPAFRNRKLSRMRYPGNWTSLHEAVAAGDDRRVEGLLFSNADRLARESVQGNTPLHEAASRGFSRCVKLICTPPTPPASSGVGKAAKGQKDKDKDKNKGRVKVAHQTIEALHNSALGIANNEGLSALHLAAQNGHNQSSRELLLAGADPDVRNNYGDTPLHTACRYGHAGVSRILLSALCDPNKTNLNGDTALHITCAMGRRKLTRILLEADARLGIKNAQGDCPMHIAIRKNYREIIEILNTPKKIRNRKEKPKEGGSRSDKDRDRERDVVDKGINWSPYGCHYFPDPRAFPSPKLETLPKEPLKSGEQYFLDLAGHIHKGPVSVGNTCYCGPFFRHIENKLNCNRKSLKKYVHKTKERLGHKVQALAIKTNDQIEQLTRTMIEDRLRCESKRQHLSEFLRRGEPMRSTFDQQNKSSRIERTMSRCRSLELLENNHEGGRLTNSRSVDVLEDQAVEAIVHRSAEVQVDSDSDDDSNEARDEEEAEVGDKDQVQEEAEPEEHSKLDELKLDFLKVSERLGVLLEKTTLIMERDSEQESKRQLSSLSPPYNPHPRAESAQLREDKESVNSPNFDEYANVIRRYPNSSETSNPSQNSNSWDWEASPTGSNPHPDYNKYYQRIGRGENMLNSVIKALRKDASFADLGKEETAVNETAEGMGGDKLLYKEQASEAAGISNLMKRQPLCLEDNYPVMSNLFYSNPIMEYAEETEVRQNGNESMSKVEIRNSEIKCLKKPNAGQVRDMVAQLQNTIDSNRQDSQTAHVIAARSHSRLNNNFHHLEGTSSNPSPTYSIPHRSSAQFGLPERHIPKDAYFHELPHRPPIPQTPQRRLHSGYVPNASLYRSEDLYVGRIPHPNAPPRQVDYVDAVAYRPLQSPTFQAIVPPHVNQRPRNWPHPNLPSNEIDLDELSAVGLYNNVSSLV

SEQ ID NO: 17074 - DNA, 2868 bp, DROSOPHILA
attggtaggacttcaatcatttgaaacataaaatccgcttaatgagttaaatatcttatagttaaatatcttaaatgctcgcaatctgctgccaatggattcaaatggttcggtggactcatttgttaaggccagtttcatgcccacaagtcgattcaacgacgtacccactgtgaagaccaacgtgcacaacaaaagttgttttccgctttacgatcaggagtttcgtatgtaagtagttactttttaatttatgcatccatatataaatataccttcattcggcagaaacttgagtgaccaccagcgaagtgaaaagaatagtcttattgtatttagcatcaaagataaagatttattcggcatgtcgagccagtatatagcagagagctatatatctttcgcagatctggaagcgacaccaccgggcgagcaaataatgatgaatctatccagaccagagtatacaggtacctaatcatacttttggcagattaaaactggaaacttatacatgttatgtgctttcagattccgaatcactgcgtgccttggaatacagactaggtgataagcaggccaaggatttccttaaaaagctgaagaaccgatccttctcctaaattgtgaaaagttatacgttgtaaagaaaagcaataaaactgtatttttatattttctacggcaatcgtactaaaatttacaaagttgcgttttgaaatgggccccatttatggactgaaacttatgaagaaaagatttgcattgtctgacagttttaattacatttattggaacaaaaaccaacgcggtaattagttacaaatacataacactcactttttacgattaaagagtaattttccagagtttctttgtaataaataatatataaatggtatttgtgttaaattatattattcgtaaagggcttgatacgtgcatatcagcatggtctaatggcaaaaactactatggcacaagtttttgccgatgtgccttattggcgacgacgtgtgttgcgttgcttatcaaatcgcatttccatttcctcgagaacctttggtgtgtagcgtaccaccagctttacagatccgacagcttgctttaatagctctacggccttctcgtggttttctccttcgacagactgaaatattgatattttgcaagttcttaaggagttaaggtacataactgaattaatgacttaccacaccattcacagacaaaagttgatctccccttttcagaccaccatgcctgtcagccacgcctccaggtattattcgggatatatagatgggcgagttttgctccttgccccccattacattgaaacccaagcctgaaaaacaaaaattaaagattgataaagctttccatataagatgtataatagaaacatatattctcggtctatagacctttacaatcaaggtattggttttatgatataggggaatcccctcgattcttagctcataggggcgtgtcttaccctcctccgttttcgggagctcgacgactctgggatgagcgtgcccctcgctggctgcgaaggctgccacagtggccttggcagtggcggatgccctcacgtcgtgggagccctggatgtccaccgtctcgtagacgtgctcgtacacctcccgcacggaggtcatgaagtccgagttgagcaccttctgcagggcggccagttttgtcgtggggaagtcgccactcgcttgcagcttttccaagagctctatcgatcttttgacatctgaaagttagagcattgggtgtgagtttcctccaactgggaatggttagcatgcacccttacctctggacaaagtcagtggttctgcgttatcggccatattgctgttcaatttaataataatcagtcaaattgagctgacctgaaatattattcgagcagctgaaaataatatgaccatacgtctcaggggcacaaaataccattccgtgaaattatattctctatttgaaataatttggtttaataaaatagtaacaaaagttatattttttatatttaacaatatatcatatacttataatctaatctcagtacttttcgtttaaaaaattatcttttgaaacaaacaagtttcttgaaagtgtggtattttatgcacgtacatccatggtcatattattttatattgatattatttccgcaccgtatttatttaaactaacaatagaataatagcaaaatgagcctgccagctgcactattgcagcgcctgaagaagcgcggacttgtgaccaaacagtcgggtaaatacaaagaccagtatagaatccaaaaagaggataaccaacttcagctttccacaggagcagcaccgatttcagaagctatagaagagattatagccgagaactacgatgacgatgacaagagcggcccttacccgtacaaggaggacacatcgccggagcccaagcgcaggagcgtcgaggagaagttctggtcgcaccgcatcaaggagcggatcggcgtgaacgagtcctaccatggctacaagctgtgtcccaacaaatacaacatataccacaagtgctcgctgtactgcgtaaacaagttcaacagctcgccgctttcgcagcccagccataggtatctcaagcgctacaagagattgctgcggaagtatccactggaggcgggctggaaggatgtctacgataagggctgcaaggcgttttacttctataactcgaccacacagactgtttcgtggctacctccttcgcatcccaaagcacggatcaccaacagcgccgcagtgtttcgcagacaactggccaactccaacgatgagttcaacttcgataccaacatggttc

SEQ ID NO: 17075 - DNA, 588 bp, DROSOPHILA
atggccgataacgcagaaccactgactttgtccagagatgtcaaaagatcgatagagctcttggaaaagctgcaagcgagtggcgacttccccacgacaaaactggccgccctgcagaaggtgctcaactcggacttcatgacctccgtgcgggaggtgtacgagcacgtctacgagacggtggacatccagggctcccacgacgtgagggcatccgccactgccaaggccactgtggcagccttcgcagccagcgaggggcacgctcatcccagagtcgtcgagctcccgaaaacggaggagggcttgggtttcaatgtaatggggggcaaggagcaaaactcgcccatctatatatcccgaataatacctggaggcgtggctgacaggcatggtggtctgaaaaggggagatcaacttttgtctgtgaatggtgtgtctgtcgaaggagaaaaccacgagaaggccgtagagctattaaagcaagctgtcggatctgtaaagctggtggtacgctacacaccaaaggttctcgaggaaatggaaatgcgatttgataagcaacgcaacacacgtcgtcgccaataa

SEQ ID NO: 17076 - protein, 195 aa, DROSOPHILA
MADNAEPLTLSRDVKRSIELLEKLQASGDFPTTKLAALQKVLNSDFMTSVREVYEHVYETVDIQGSHDVRASATAKATVAAFAASEGHAHPRVVELPKTEEGLGFNVMGGKEQNSPIYISRIIPGGVADRHGGLKRGDQLLSVNGVSVEGENHEKAVELLKQAVGSVKLVVRYTPKVLEEMEMRFDKQRNTRRRQ

SEQ ID NO: 17077 - DNA, 2681 bp, DROSOPHILA
acttctcccgcgcactaaactgctgcattatatcgatatgtttaaaaataagtgtttgctcttggacacggagctgccaactcgcttcataagtaatttgacattttcattaattagttttgaactacatctaagagaagtacttacggaagttttcaagtaaaggttttttccctttttcacgtttgcgtgacggtcgtgtaaaacagttttggcaaacaaatccagctatggtgcgtatgaacgtattggccgatgccctgaagtgcataaacaacgccgagaagcgtggcaagcggcaggtgctgctgcgtccctgctccaaggtgatcatcaagttcctgaccgtgatgatgaagcatggctatatcggcgaattcgagatcgtcgaggatcaccgtgccggcaagatcgttgtcaacctgaccggtcggctaaacaagtgcggcgtcatctcgccccgcttcgatgcgcccatcaacgacatcgagaagtggaccaacaatctgttgccctcgcgtcagtttggttacgttgtgctcaccacctctggcggcatcatggaccacgaggaggctaggagaaaacatttgggaggcaaaattctcggcttcttcttctagagacaccaagttcacatcgtagagggatggagtttgatatgtagattgacgttttatttcaccgaccatgcatccaactatgtactttgtgcacaggaaacaaagggcgaaaacgctactacgttcattcagaaaacaaacgacgatgaatgttcacaaagttacgcgaaataaaatgaaaaatttggacatctaatatcgaaataatgagtttactttttaatcttccagcttcaacatttcctacgtttaaacttttatgtgtaaacaattggacgattgtgtggtattataggcgaatttcatgtaaactgcacttgcaaaaattatacgtgcacaaattgaactctaatcttaagggtaataaaatactaaacttaaatagctgttccccgctccaaattttgtttgatctcggctgtatgctcgctgtagaagcggtccagctttttgttgaacttggaattcctctcgttgatgaagtccacatccgcatcgtcgttgtagatcctcctgcgagagtacttcttgcggcgctctatctgctgctccaggtctgttaccattttgttaatagcacctggagtgtccttcgtcctcgaatgcaaagtggtgtgtgctccaccgtagaaggcgtcaccgagttcctccttctggcgctcgtacttttccaaatcgcgagcaggcatactcttgaccaatcggttgtactgtctagctgtttgagcttcgtatgtggagaaaccaagatctggattgtctttacgcttcttctttttctcaatgcgatccgcatccacagcggatacctccaaaagcttcaaacgctcgtaatccttgccagctgcctgcgcctcggctcgcgccttgtcgtccgctagtatccattccgcctgtcgcttgcgagcctcccagttcttggggagcttcttgcgagcgtcctctgccaccacttcctggtggttgtccgtacgcgcctcctggcgcttcttgtgtaggtccagcaaacgcgccttgcgctccgccaatttttcggcagccgttttcgtcttttccataggtaatttttattaaaaacttgttttgtttttagaaattgtgaaaatgcgttgttttcctttctttgatattttggtcggttttgggccgcgttggcagcaccagtaaaaacatctgtttcggagcgtagtacagtaaacaactggtatgacagttaccgtaaatgtgaagtgattattttataacatgaattcaaaaaattaaagtttaagcaatgaagtattttaaaaattaagtattatgttatatattcttataaagacgtggcttattatttgctttattcgatgtttgtcaccgttgtggtatatactgtgctgcgggatttaagaatgcgttagtgcaattccatcctcatgtgctgtttacctcaacacgtgcgggagtttttgtttatattttagctcgtggttttagttaaaagcccgccgcaatatgaagttttcctacaaagtaatttgtctcataagttaatactacaaattgctaatgtctggtttttatagttttccaacctgttgggcacaatatatcgtaatggaaacttggtgttcacaccggatggcaattccgttatcagtccggttggcaataggataacggtctacgatttaaaaaagtgagttaccgttttaaatccaaagacttcatgaatatattttattcctttgcagcaacaaatcgcgcaccttgtccctggaatcgcggtataactacacgaacatagctctttccccggatggaagtctgctcatcgcagtcaatgaaaagggtgaggcgcagctcatcagcatgatgtcctgtacggtgatacatcgtcacaagttccagacgggcgtacagtgcatctgcttcagtccaaatggagcattctttgccgtcgctgtgcagaacgtagtgttgatattctgtgcacctggtgagatcacaggggagtacaatcctttcgtcctgcgccgaagattcctaggtggattcgacgatgtcacttggctggac

SEQ ID NO: 17078 - DNA, 681 bp, DROSOPHILA
atggaaaagacgaaaacggctgccgaaaaattggcggagcgcaaggcgcgtttgctggacctacacaagaagcgccaggaggcgcgtacggacaaccaccaggaagtggtggcagaggacgctcgcaagaagctccccaagaactgggaggctcgcaagcgacaggcggaatggatactagcggacgacaaggcgcgagccgaggcgcaggcagctggcaaggattacgagcgtttgaagcttttggaggtatccgctgtggatgcggatcgcattgagaaaaagaagaagcgtaaagacaatccagatcttggtttctccacatacgaagctcaaacagctagacagtacaaccgattggtcaagagtatgcctgctcgcgatttggaaaagtacgagcgccagaaggaggaactcggtgacgccttctacggtggagcacacaccactttgcattcgaggacgaaggacactccaggtgctattaacaaaatggtaacagacctggagcagcagatagagcgccgcaagaagtactctcgcaggaggatctacaacgacgatgcggatgtggacttcatcaacgagaggaattccaagttcaacaaaaagctggaccgcttctacagcgagcatacagccgagatcaaacaaaatttggagcggggaacagctatttaa

SEQ ID NO: 17079 - protein, 226 aa, DROSOPHILA
MEKTKTAAEKLAERKARLLDLHKKRQEARTDNHQEVVAEDARKKLPKNWEARKRQAEWILADDKARAEAQAAGKDYERLKLLEVSAVDADRIEKKKKRKDNPDLGFSTYEAQTARQYNRLVKSMPARDLEKYERQKEELGDAFYGGAHTTLHSRTKDTPGAINKMVTDLEQQIERRKKYSRRRIYNDDADVDFINERNSKFNKKLDRFYSEHTAEIKQNLERGTAI

SEQ ID NO: 17080 - DNA, 3988 bp, DROSOPHILA
tttccttctccttctgtttctttgccttcattttctccacagcctttgaggagttcttctgcttatcggtgagtttaaaggatcgcttaaccatcaccacttcgccgttggcttcggccaattttaaagctcgatggaggaggcgggcggttttcttcggatccttccactcctgaccattgtcctttaggtatgtcattatggcctgaaccgatgagcccgatcggctcgccaacttcccgatggccataagagctagggatatgagcgtaccctttggttttgggaccatcgacttggggttgtcagaatcggggggcaccagtttcgacccatcatcaggcggcggagtgggatagggattgcgatcagctccgagattatctgtctcgacctcgtcaccgtcctgccgatcctcctcctcatcctcctccatctcctcctcatcttcctccgggagctcctcttcttcgcccatattggagtcttcggattcgggatgatcatttggcatttcctcctcgctctcatcatccgagccatcattgcgttcaaccggctttagtttcatgttattagttggaaattaaattgaacaaaaattagaaatacaactcaacaacttttaagacacgaaaaaaggttaacaaaacggtaatcgaaaactcgcagtaacaatgatactttgcaatgactgttaatgcacagaaaacgggatcaaaagttatatcgcaaagctttttaagtcgattttgtaagtaccgtttattattcagataattataagtatacattattgaaatgtttgaagcgtttttaaccagaaatttgataaataaaacaataaatatgtatcatatttattaaataaataatatattaagtaatacaatagcaaatagttcagtttaaataacgcgattttttgtgaaacttatcgattatttattgaattagcagtgttattccatatggtaacactgctaaagaagaagaggagttaattctaaaaatgagcgtacggaaggtaaacaatttgaaatttatgtttttaaactgaatactaaagaactaatgcttagaaaacttgggtaagatgtgccttcagcgagatgaacttgaccaccagtcctgctccttcggaatccacgcctgcgaagcgcacaagaagtgcaagcaatgtgagcagctccagagtatcgaggtcgagaactccaagcataaatacaaagccaatacagattccggacgtggactcagtcgatcttactgccatggatgatgaccaggatgcggacatcactgtgccaccgccagaagtcaaagaaaactggatggaaagctttgagccagccaccagcgacgatttggcggtgcatccaaagaaggtcggagaactacgcgattggctgcgtcactgcgaagcggtgcgcaagaagttcccggctcaaatgtgtctacttaccgggcccactggtgctggcaaaaccaccacgttgcgagtcctggccaaggagttcggctaccagctgcaggagtggatcaatcctatcgattgtgaggtggtcaacaccttgggtgatcaaacgactggcgcctcctatgtgggctcccatctggaggcctttaaaagctttctgctccgtgcctcgcgatacaaatccttgctggactcgcaaaataagagactgcttcttgtcgaggactttcccaacgtcctgctcagcgataaggaggtcaactttgaagagttactagagtaggtaaaaccggtggactatggaattgaacaccaactataagattcaacataatttaataaaccctcatttccttccatttcagagagtacacggcgtatggcaaatctcccctggtgttcatcgttgccgatgccaaatctcgaggattgaatatcagctaccgcctctttccagaccaactgaaggccaaacatcgcatcgagcacatcagtttcaatgctattgcatctacaatcatgcaaaagtcaatgaaaaccttctgctccgtaatgcagcagaataaagctacttacaaggtgccctcgaccgctgttgttgactcaatagttgtcggtgcccagggcgacataagaaatgcgttaattaatttacatttgagctctttaaagggagtttccagcatgccgaccaaacagctaaatgtcagtgtgtccgcaaaaggtcgtaagaagaaaatgcaaagtactttaaagtcaattggtagagatgaatcaattactctgatgcacgcacttggaagagtattaaatcctaagtgtaagtcccacgaaacattctctgtaaaaatactcattcaaatcttggatctcatcagttaatgaggacaaaactatgttacacagcccggaggaaataaccgaagcctttaatacagagcccaggaattttgtgaattttgtatatgccaactatctgccgcattttaaggaaatcgatgatgtcgtgaccgccataaatgacttgggcctatcagattgcatgctcaacgagtacagagatgataatttgtctgtgatgggcttaaacgttgccatacgaggagttatgatgtccaatacgtgccctgtcagcggatggatgcctgttcgaggacccaagcgaatcaatatacagccacaggcaactttggccgaacaaagactggtgggtgtgggctacgcgggcattgccaggacgctctacgccacggagtacagctcattagttaagttaatagcaggcaagcctgtggatactacttcaagccaaagcacagactcaaaacaagacttttagtaaatcaaaactatttatctgatgttaaaactaaagtagcaaggaagtttttaaaaaatgtccctaggaccaaatatgatatctaacaatcgcaaaacccagtttattatataaattaaatgtactgcgcatcccaccgtaagaaaatgaatagcggtagttattcgaattcatgttttaactctttatttatctacaaatcgatttttcattatacaaagttccattaaaatcaacacttcgaggcaacaccgctaaactatacaccatacagaccaacaaaaatacaattgggaggcgtcgtttgcagataataaagtaatgctaattctttctgatgaatgctttttgatgagctatttgatgattgaaaggaactcctcacaatttaggcgtccacagatgacttaaaaactaaacaaggattatgtccatttatcgccacattctaccacaattgagtcttttatttacacacggcggagtgacatactcttctattttattctatttgacaactgcatcggctggcctggatacatcgctggagttgtcgtcctcctccatttgatttccatctagcaggcgctgacgctcctcctcgttggcatgaccattcaggtggatcggtgatctagacctggagcgggtgcggctcctctcgtgccgctcggcatgcccattggctatgttcaggccggccacgcccatttcgtgaccatcgctgctggtcgaggaagtggtggacgtggtgctcgacgtggtgctgctgctgtcgctttcgctgtcctcgctggtggagtccatgggtgtgggttgtggctgctggggaggctgttgtctagcctgcagctcgcaagctgaactgggagtgggcgccaccgctgagggcggggaagctgcggccgctgctgctgccgctggtccagctgtcgcggaacacgtgcgcaagaggtgggtgcgcagaactggaataaaaggcacaagttataaattttcctggtttttcaaattattaaagacatcgcatacattgattctcacgtgatagttggcgaatcttatcatcctgcgctcgtaatttggctccaaactccttggatatgttctgggccttcgaatatcgatcttcgatttgcatgcactcctggatgagctcctgcttgctc

SEQ ID NO: 17081 - DNA, 1789 bp, DROSOPHILA
ttaattctaaaaatgagcgtacggaagaaaacttgggtaagatgtgccttcagcgagatgaacttgaccaccagtcctgctccttcggaatccacgcctgcgaagcgcacaagaagtgcaagcaatgtgagcagctccagagtatcgaggtcgagaactccaagcataaatacaaagccaatacagattccggacgtggactcagtcgatcttactgccatggatgatgaccaggatgcggacatcactgtgccaccgccagaagtcaaagaaaactggatggaaagctttgagccagccaccagcgacgatttggcggtgcatccaaagaaggtcggagaactacgcgattggctgcgtcactgcgaagcggtgcgcaagaagttcccggctcaaatgtgtctacttaccgggcccactggtgctggcaaaaccaccacgttgcgagtcctggccaaggagttcggctaccagctgcaggagtggatcaatcctatcgattgtgaggtggtcaacaccttgggtgatcaaacgactggcgcctcctatgtgggctcccatctggaggcctttaaaagctttctgctccgtgcctcgcgatacaaatccttgctggactcgcaaaataagagactgcttcttgtcgaggactttcccaacgtcctgctcagcgataaggaggtcaactttgaagagttactagaagagtacacggcgtatggcaaatctcccctggtgttcatcgttgccgatgccaaatctcgaggattgaatatcagctaccgcctctttccagaccaactgaaggccaaacatcgcatcgagcacatcagtttcaatgctattgcatctacaatcatgcaaaagtcaatgaaaaccttctgctccgtaatgcagcagaataaagctacttacaaggtgccctcgaccgctgttgttgactcaatagttgtcggtgcccagggcgacataagaaatgcgttaattaatttacatttgagctctttaaagggagtttccagcatgccgaccaaacagctaaatgtcagtgtgtccgcaaaaggtcgtaagaagaaaatgcaaagtactttaaagtcaattggtagagatgaatcaattactctgatgcacgcacttggaagagtattaaatcctaagtttaatgaggacaaaactatgttacacagcccggaggaaataaccgaagcctttaatacagagcccaggaattttgtgaattttgtatatgccaactatctgccgcattttaaggaaatcgatgatgtcgtgaccgccataaatgacttgggcctatcagattgcatgctcaacgagtacagagatgataatttgtctgtgatgggcttaaacgttgccatacgaggagttatgatgtccaatacgtgccctgtcagcggatggatgcctgttcgaggacccaagcgaatcaatatacagccacaggcaactttggccgaacaaagactggtgggtgtgggctacgcgggcattgccaggacgctctacgccacggagtacagctcattagttaagttaatagcaggcaagcctgtggatactacttcaagccaaagcacagactcaaaacaagacttttagtaaatcaaaactatttatctgatgttaaaactaaagtagcaaggaagtttttaaaaaatgtccctaggaccaaatatgatatctaacaatcgcaaaacccagtttattatataaattaaatgtactgcgcatcccaccgtaagaaaatgaatagcggtagttattcgaa

SEQ ID NO: 17082 - protein, 520 aa, DROSOPHILA
MNLTTSPAPSESTPAKRTRSASNVSSSRVSRSRTPSINTKPIQIPDVDSVDLTAMDDDQDADITVPPPEVKENWMESFEPATSDDLAVHPKKVGELRDWLRHCEAVRKKFPAQMCLLTGPTGAGKTTTLRVLAKEFGYQLQEWINPIDCEVVNTLGDQTTGASYVGSHLEAFKSFLLRASRYKSLLDSQNKRLLLVEDFPNVLLSDKEVNFEELLEEYTAYGKSPLVFIVADAKSRGLNISYRLFPDQLKAKHRIEHISFNAIASTIMQKSMKTFCSVMQQNKATYKVPSTAVVDSIVVGAQGDIRNALINLHLSSLKGVSSMPTKQLNVSVSAKGRKKKMQSTLKSIGRDESITLMHALGRVLNPKFNEDKTMLHSPEEITEAFNTEPRNFVNFVYANYLPHFKEIDDVVTAINDLGLSDCMLNEYRDDNLSVMGLNVAIRGVMMSNTCPVSGWMPVRGPKRINIQPQATLAEQRLVGVGYAGIARTLYATEYSSLVKLIAGKPVDTTSSQSTDSKQDF

SEQ ID NO: 17083 - DNA, 4055 bp, DROSOPHILA
aaacaagcatcatcatactgacaaaaaaatgtttcatacgaatcacatacaattaccatcaaaaagagtaatcaggaaataaacctcaaacgataactagtaaaaaagataatcgttttataataagtgcaaatataataacatttacggttatgcaagtgattggttgttaattcttctgctttgggaacaataataataatcgctcctattaatgcatagcgctaaatttgatttataaatatttgtactgccgacgaccataaaccagccagagagccgaaaatgggggtcagaaaaataacaaaaccaaaacgaaaaatggtaatatattttccatttaatttaatttgcctggttttaggcggaatacacatccgcctgagctttggctaccaccgcactgcctaaatttcattaggcgtaaagcaaacttttttgttcacacaatttgtatatttccaaccgactcttatacttaactaatatttctttccaccaacttcaccctaaaactcttagtatcgaccttaaagactggactcgttgaagtgatttggtaagtacaaggagcccactgcattgccatggaaattgctgcaatactacgagatctgccattgtctttaccgctgcggaaaggagcatcgatactgtcctttattcctgcccagtccttttcgcggcccgcctttattgttatttcgcctgcatcattatttcagttggcgccttggctgtaagtggagccgcagttcccagtggctgctccttcctgggtcctttggcattgtgcggagctgcctttgctgttgttgcagataaagataaatagtctcagataacgctcagttatttgcaaacaaatacaattgcggttcattgatggcggtttcatttcgccagctcccaaggaaggagacttgccactgggcaagtgggagtgcatctggcctggcccattagtttgtggtgctcgaatggcccccgttgtttccggttagtcagggtagtcgaggctattcagattctggttaggatcctgaaccacgaatttgtcgaacgtgtaactgatgaactctgcataccattttgcagcaattcccagccatttctgtggggaaaccgaatccattagagaaaaggcaatattactatcaaatcgctgaacttcgaactattttccattaaaatttatataaattttgttgattttcagtgcttaaatatttgttgctaaaattttaagttaaatgtacttaaaatataacaataatgaaagtcttaggagaatgtaacaacccttaaatattaatctcaccgcaatgttaaaagaactctccgtagagataccccagaaaccattggtccagcccacaacgaaagccatcaggggttcgtactcgtcttcgtcgatgatgtacttcaatacattaagggcggtcgaccaggcaagtaagtcctgattccataggaatagaacatcgctgacgatctgggcacggtttaggacatttatgctacggaaatcattgaacagcgtggtagccaaaagctgccaggtgagctcgtcatagtttactctgtagtagccaactgcctgtaggttaagaagtatccactggttgcggggaactatatcatttagtttaatgccatgactatttggactaagccacgccttcggtttgaggtttttagaaagggatccgccctctataaggtaggtgagaggaatccaccaaagatgggagctgctgcggttgagggcgtggccctgtttcagaaatacttcactcccattgcggatgaccgtgaccaacggatagccactttgcatagtccacgtgtccataatgctcttcacatcccaggttttgtcgaaagtggcctccctttcactggctagttgtagggatctccagaaaagatcgggagtgctgctgccaaaggagttttgccacatatgccgctgaagtccatcgtaaaaagtctcattgcccaaaaagccaatcaacatagatgtaagagaggtggccttctgatacagttgcgtctctgcatttaaactggcgttcgatgaaagaggcaccaaggatatgccacccacctgtgattcatacatcatggacgattcacgatacctcaacagtatccggcgacccattttcgattgcaaatgatccacggcgaggcttttaaagtacccagctaggccctccgttaaccataaatctgaatacgagtccattcccagaagattgtcaaaccacatatgggccatttcgtgagcgattagctcgagtgtctgcagtttttctttgctcattggcccatcttcacgcagcaaaaggtgtttgctcctgtagacgacgagcccgaagttctccatggcttctgtaggaaaatcatctaccaccaattggtcgatcttctccagcggtagggccacttgaagcaccctgtccagaaactcaagaatctgaggagccatttgagcggcaaaagaggtcgcacgcacatcagccgactgggcgcaggtacgaaatctaacaggactcaaactggctgcttggctataccggcagttaaagttgtttacggaaaaggccagcaaatgtgtgggtattgtgggcgtaacctcgtgcacggaccacacatagtcctgtatttcacggctagaaatatatagatgcggactatagattatggacaaaccaaacggatcaaactcacttgggcagcactgcttggaccttcatattgccgtagctctgaaagcgcttatgatgacccatggttacattaaaagtggccttcagggagggctcatcaaaactaggcatggtgttccttatccagtttcgattaaaatgggacacggaataccaactgaaaagcgttaatattaccttatttgaacttaagggacaaaggcactttacattttctccgaggtcttccaatttatatagtggcgtataaaataaccatctctttgatccatggtcattggcctaccgaattcgacactgaggacataggacttgcccatcaacaaggactggttgaaagtaactaccatatatttccgatcattattgaacctaacagatctcaggcgatagttggacgtctccccaaatagcgtgattttctttgattcgattgatactctgcccacatgaagcaccacttgattggtggttttttgtgcatgaatagaaattttaacgataccagtgtagctgtgattagctgaactctccagatgagttagtaatctaatatcatagtgaaaaggcttgaccttcgctggtaatcggggctcatcgtatagttgagttttagcagaacatgcaacttgacacagacataacaggagtaacaatccgtacagtgcaacatttttatagcagttttctctttcactcaataaacatttaaacatgctgaaataaaatgctcgattgttgatcttctaaactggtcgccaaatattattttaaatttaaaatttcttttcaagggaaaatttacgagtatctgacatacggagtgtagtttacttactattggtgttttttggaaattgttttataattgataaaaaggaaaactttaatagaaatatattatttaaagacacgtatgtttaattaacattaaggatattactttttactgtgcgctaaggttgtttaatagtctttttaacttgggagatggaagttaagatccttcgaatggggaaggggagccctgagtaaaagtaacattcccagttcgacttagcggcgtcttgacttactttcctccagctttcacttgcgggctggcagaagtttccaactttttgcgctacgtgcgttcctcgatttgcacatgtatctgtttgcaaacgtgtgagtgttagtgcctgtgtgggcccagcgccaaaaaggatgttaagcgctttggtctcagtttgcaggcacactttcgggcccagcaggaccagaaccaggaccctcgaacgcatagcgcatacgcatacatattcggatctggtttgc

SEQ ID NO: 17084 - DNA, 1737 bp, DROSOPHILA
atgggcaagtcctatgtcctcagtgtcgaattcggtaggccaatgaccatggatcaaagagatggttattttatacgccactatataaattggaagacctcggagaaaatttggtattccgtgtcccattttaatcgaaactggataaggaacaccatgcctagttttgatgagccctccctgaaggccacttttaatgtaaccatgggtcatcataagcgctttcagagctacggcaatatgaaggtccaagcagtgctgcccaaccgtgaaatacaggactatgtgtggtccgtgcacgaggttacgcccacaatacccacacatttgctggccttttccgtaaacaactttaactgccggtatagccaagcagccagtttgagtcctgttagatttcgtacctgcgcccagtcggctgatgtgcgtgcgacctcttttgccgctcaaatggctcctcagattcttgagtttctggacagggtgcttcaagtggccctaccgctggagaagatcgaccaattggtggtagatgattttcctacagaagccatggagaacttcgggctcgtcgtctacaggagcaaacaccttttgctgcgtgaagatgggccaatgagcaaagaaaaactgcagacactcgagctaatcgctcacgaaatggcccatatgtggtttgacaatcttctgggaatggactcgtattcagatttatggttaacggagggcctagctgggtactttaaaagcctcgccgtggatcatttgcaatcgaaaatgggtcgccggatactgttgaggtatcgtgaatcgtccatgatgtatgaatcacaggtgggtggcatatccttggtgcctctttcatcgaacgccagtttaaatgcagagacgcaactgtatcagaaggccacctctcttacatctatgttgattggctttttgggcaatgagactttttacgatggacttcagcggcatatgtggcaaaactcctttggcagcagcactcccgatcttttctggagatccctacaactagccagtgaaagggaggccactttcgacaaaacctgggatgtgaagagcattatggacacgtggactatgcaaagtggctatccgttggtcacggtcatccgcaatgggagtgaagtatttctgaaacagggccacgccctcaaccgcagcagctcccatctttggtggattcctctcacctaccttatagagggcggatccctttctaaaaacctcaaaccgaaggcgtggcttagtccaaatagtcatggcattaaactaaatgatatagttccccgcaaccagtggatacttcttaacctacaggcagttggctactacagagtaaactatgacgagctcacctggcagcttttggctaccacgctgttcaatgatttccgtagcataaatgtcctaaaccgtgcccagatcgtcagcgatgttctattcctatggaatcaggacttacttgcctggtcgaccgcccttaatgtattgaagtacatcatcgacgaagacgagtacgaacccctgatggctttcgttgtgggctggaccaatggtttctggggtatctctacggagagttcttttaacattgcgaaatggctgggaattgctgcaaaatggtatgcagagttcatcagttacacgttcgacaaattcgtggttcaggatcctaaccagaatctgaatagcctcgactaccctgactaa

SEQ ID NO: 17085 - protein, 578 aa, DROSOPHILA
MGKSYVLSVEFGRPMTMDQRDGYFIRHYINWKTSEKIWYSVSHFNRNWIRNTMPSFDEPSLKATFNVTMGHHKRFQSYGNMKVQAVLPNREIQDYVWSVHEVTPTIPTHLLAFSVNNFNCRYSQAASLSPVRFRTCAQSADVRATSFAAQMAPQILEFLDRVLQVALPLEKIDQLVVDDFPTEAMENFGLVVYRSKHLLLREDGPMSKEKLQTLELIAHEMAHMWFDNLLGMDSYSDLWLTEGLAGYFKSLAVDHLQSKMGRRILLRYRESSMMYESQVGGISLVPLSSNASLNAETQLYQKATSLTSMLIGFLGNETFYDGLQRHMWQNSFGSSTPDLFWRSLQLASEREATFDKTWDVKSIMDTWTMQSGYPLVTVIRNGSEVFLKQGHALNRSSSHLWWIPLTYLIEGGSLSKNLKPKAWLSPNSHGIKLNDIVPRNQWILLNLQAVGYYRVNYDELTWQLLATTLFNDFRSINVLNRAQIVSDVLFLWNQDLLAWSTALNVLKYIIDEDEYEPLMAFVVGWTNGFWGISTESSFNIAKWLGIAAKWYAEFISYTFDKFVVQDPNQNLNSLDYPD

SEQ ID NO: 17086 - DNA, 4870 bp, DROSOPHILA
gtttgtatttccatatcaaatataaactcgatttagcttaacatatatatatgtatatatatatgtttatagtttcaaaaattctgcctgatgtgcgctgtttgaactacaggtcgattttagtattagatgtaaaagccacagctctaatgtttgcattaaaatgcgctataatggataaataattctaaatatgtaaaaatctctaaaagcattcactgttcgtttcgttatttacaatccaaatatcctttgaggccattgtattattattatcttcgtaaagcaccaattccatatcttggctgatttgcttaagcctaatacaaaagttcaattaaaatcgtttgcccgaaaatgatttatgcgtgtagctcgcaattgtagagagtgtatactttgaaagtagggacaaccctttcgactctgggtattgtcactagcacagtgatatacgtttgtttgttatccggtgtacaatacatatatgtatatgcataaggcagaactaaactcaaatttgggtaatccttgtgggatcatggctaatatagttgagtagcgaagcattccatcctgtgggtgtgcgcggtgtcctgccgaaagagttacatacgtgttttgttttgcgattgaggcatagatttgaaataatttggggtattgtaataatatcggtattgtttggatctgtacaaagcatatactcaaatgaacaatatgagcaagtagtccataacactcagtactggcatttcaatgtacccgatggatgtatttaggtaactgtagactttccttgtggtttcttgtactctgatgacgtgcagcatagagctctcggtttccagatattcccatccaaagacctagcgtcactggcattgcacttgaagtttgcatatccaaatccagtccaattgcagtttcatcaacatattcgcgtttgttcgactttttaacggagtccagacatatgcagtctggagctccccaaatcctaggacgacttcatcagcagtatcggccagtacaggagcacaaacacaaagaacaggatggggaatacggcgcgggacaccttgtcgatctctcgccacatgatcttctccacgccggtatccgtatccgtccacgccacggaaagtagactttgacgtcttgctggcttcggcggtccgccgttaccctggagcgatgtctagggagttatttgaaattatatatatgtatatacaggatgtgtgtgacatgtgcactgtttcccccacatatccatatcagtggctaatagctcacctggcccggtgtcgtgggcgtctgagtggccttccgcgaccgcaccgctccgccctcccaactggccaccgtcgcacactgacccttctccatattgctgatgcgctacgcgaatcgaatcgaaatcggaacgacaagaaggtggcattacttattaaagcgatatccccacagctgccttaccatgggcagtaccttgggtatgcggttcacctggtactggtactgcacgtccagcactttcaccaccacgaactcggccagcgcggcgaacacggacagcatgcacccggccatccagagatccagtgcctgaaaaagggagaccctcttgtttagaactattatatatagagttttttatatatgtaggccaatgatatttttaagatttgtgtttcagttttgagtcttacaatgaacccaccttaacgtaggccactggcggaatgtcggcgcccgtaaacatggtcaccagggtcagcatgcaggtcaccagtagcgttacgcgccccggaatggcgtccagtcccagccagaagctgaaccaggacagcatcaccaccagcgatgagggggcgaaggtctggatgaggtggtggccaatctggcgctcgaagcggaagtatacggtgaggcgggagaagttccccaccttctccggcatgtagccgtcgctctcctccagttccagcggctggcccagattgtactgcagcagcttcagttccggattgagggtcaccccggagtcggaccagcgcagcttaaccttttgattgttcgacgagacttcgggattggatacagtaagataaggctggaattgggagtgtgtaggctcacttacagctctcgatgtagatgggacacacctggatgtccatggggtacagctggaactccatctggcaggcgatgatcgcatgcatccgggccgcatagcgcaccgttttgttcttgtagagcgtcaccgacgtgaacttgtgggtcagtgtcgctatttctacaacgaaaagacatcgagaagacgttgcagagatgcggaacaaatgggttttgattagaactatggcattggcatcgatagactcatttcttgcgcatttcggtggtggttcagtggttcagtggatcagtggttgggtggtgccgtgatggtgatcttgctggtgatcaccttacgtctaggttcaagcgcgattttctactaacgacgaatgagttgatgtttcttttttatttgtaaacgctaaaacttaaagacagttactataatgatttccaattaaagaataaataattttcgaaaataatattatttgaaaatccaagactgacttgtgcttaacaatcgtgactgggaatataaacaaggctgaccgatttggaatcgatttttgttttgtaaatgttgacaatggcagcccaaaatggaaaaaaaaaaccaaattgccaacgggggtgcacatgtgattccaaggtgagatcttatcaggaccgcgggtgcaactgcaaattttcgttttcgttttaggattcggatacggagcgtgggcgatggtcctgaccatggcggtgggggacaacgggtggctctactgtggtttggagtgtcctgtttcgaccatggcattggaaccggaatggatttcgtgcgtataatgagggccgcaagtgggcgggtccggtattgggtgggtaaattataaaagaacttaaatgtacactgggtctttcgctatgtgtgcgatgcatgggatatatgtttatatacacacagggaactgtatacacttaaatcggccagtacgtagtcggtattaagataaatatcgaagaatgttgaatatacaggatacattggatggaagttatgcgctgatattgaaactgatattgatactgatactgatactgatactgatactgatatcgatttcgatggattttggcaaaaaacacaaaagtggcaaacacagatctagagtcattttgatatacttatatctttgtctagatgaaagtttttcgaatctctttcacccttattgcgtagcagggaagtggacgcaacatatggacttccgtatcctatgcagaagtatcggtattgttagttcgggaattcaatgttagtcggtggattagtaaccggtggattaggaaaaaaaaaacaaataaacaaaggaaaacaaagtaattcgttactatatacaaacggtccacacttatagagtttaattagacagatagggtgatgagctcagctggacaaaagtgcaggaatcccgatccaagattgtacatatgtatgtacgtagaacacatatcgaacattaagcatacactacgcacacacatacatactactacacacatacatatagtctatggggttcattaagtgggtttggacgtaccggcaattttggaattaagaaagtacggatccggctgccaaaaattctcaaagacctctggaagcagcgtcacgtagtcgtcgccctcctcgaatatgtcatctgggatctccagacgcgactccagccagcgctgatgtataaacatgtctactctgaaaatgtacacagtatcgctatatgctccattacgaactcccgatctcagaggtgtcaacacgagcgacggcacttacctaaagtccatatcctctacgttaattgagttaatatctacaacgaatatgctaaagtctactatcactggtgagcccttcttcgagggcggtcgtatttctgcaataaatcaaggcgatcaccggttagccaacattcattcggtgtgaacacattattcgcttattcgcacaatcacgaatcaagaatcacaatcaccccatcccaacccactgagaatcccgaccaaactttcgtgcgcaaattcattttaaaggggcctccgtctggaatccaccaaaaaaaaaaaaccgaaccaaggaaacccccgacttatactccgatttcccaccaagttcagggacagcctacggttttcatgcgtattacacaacccgtgaaaatcgatagaaataaaggtgttgattagctttctcagcaattgccgcaaatgaagaaaacacgcctcgcggtaatttttggtgaactattcatacttctggtaaaatgtttctggccaaataatgcagctattgcataagaattcacctaccaattcaaatataataaactaagatacattcatctaaaaggatattttccagaatctgtgctggcttaaacaaaaataatgcatttgataatagcaaaattcaaaggtgtttcaaacttgtttgcacaaattggcatataacaatgatttttcagtggataatcatctgcttgttttcaatatctgtatctgcttaaagatttattacccaacagttgccagtcgtttacattttcgcacaaaatgcacttaattgcgttgagtaatttatagtgtagcttaagtttagtgaactttagtcgttttatgtgtaagcctaatgaaaaaggaactcatttaattggtataccttaacttatacaattatgcaggtgagttt

SEQ ID NO: 17087 - DNA, 1156 bp, DROSOPHILA
atgtttatacatcagcgctggctggagtcgcgtctggagatcccagatgacatattcgaggagggcgacgactacgtgacgctgcttccagaggtctttgagaatttttggcagccggatccgtactttcttaattccaaaattgccggatacggaagtccatatgttgcgtccacttccctgctacgcaataaggaaatagcgacactgacccacaagttcacgtcggtgacgctctacaagaacaaaacggtgcgctatgcggcccggatgcatgcgatcatcgcctgccagatggagttccagctgtaccccatggacatccaggtgtgtcccatctacatcgagagcttctcgtcgaacaatcaaaaggttaagctgcgctggtccgactccggggtgaccctcaatccggaactgaagctgctgcagtacaatctgggccagccgctggaactggaggagagcgacggctacatgccggagaaggtggggaacttctcccgcctcaccgtatacttccgcttcgagcgccagattggccaccacctcatccagaccttcgccccctcatcgctggtggtgatgctgtcctggttcagcttctggctgggactggacgccattccggggcgcgtaacgctactggtgacctgcatgctgaccctggtgaccatgtttacgggcgccgacattccgccagtggcctacgttaaggtgggcactggatctctggatggccgggtgcatgctgtccgtgttcgccgcgctggccgagttcgtggtggtgaaagtgctggacgtgcagtaccagtaccaggtgaaccgcatacccaaggtactgcccatgcgcatcagcaatatggagaagggtcagtgtgcgacggtggccagttgggagggcggagcggtgcggtcgcggaaggccactcagacgcccacgacaccgggccagacatcgctccagggtaacggcggaccgccgaagccagcaagacgtcaaagtctactttccgtggcgtggacggatacggataccggcgtggagaagatcatgtggcgagagatcgacaaggtgtcccgcgccgtattccccatcctgttctttgtgtttgtgctcctgtactggccgatactgctgatgaagtcgtcctag

SEQ ID NO: 17088 - protein, 323 aa, DROSOPHILA
MFIHQRWLESRLEIPDDIFEEGDDYVTLLPEVFENFWQPDPYFLNSKIAGYGSPYVASTSLLRNKEIATLTHKFTSVTLYKNKTVRYAARMHAIIACQMEFQLYPMDIQVCPIYIESFSSNNQKVKLRWSDSGVTLNPELKLLQYNLGQPLELEESDGYMPEKVGNFSRLTVYFRFERQIGHHLIQTFAPSSLVVMLSWFSFWLGLDAIPGRVTLLVTCMLTLVTMFTGADIPPVAYVKVGTGSLDGRVHAVRVRRAGRVRGGESAGRAVPVPGEPHTQGTAHAHQQYGEGSVCDGGQLGGRSGAVAEGHSDAHDTGPDIAPG

SEQ ID NO: 17089 - DNA, 2886 bp, DROSOPHILA
gcagctgctctgctccgctctctcttttgagctctgctccgctctcgctcctttgataagcccgcatatgcttatgtgtgtgtgtgtggtgaggtcagcgcatcaattatgctcatttcttgtctttttctttgataaaatcagcgaacaacaaatgggaaagggcgggggcagggccccggccagacggcggcgcccgagatttttggcaaatcaaagcagtcagctgtcccctttgctcataattaagcaatggggagcagtgaaagtgtgtcgactactaattggcaccttgaataattgcacaccgataaataaagtagtggcttcctttttcctctcaagacaaaagggcgtcgcactgcacttacacacatacatgtacaccgctctccccttcttatctccagtctctatacttctaacgctgattttcagccgattttaagccacttgcaacgtcaacaattttcacaacatttcacatttacaatgcagtctttcttttccttcttcttttctttttgttggaaacgcatccgccatttgcaagccacttgtgtatgtgtgccggagcgctgcgcctgtttgagtgtgtgtgtgtgttgggttgtcgcgtcgacagttttttcatcactttgcttggatttagatacgctttatcaaaccagttcttacttgcaactgttaaactttttctcaactttcttatgcctttcggctgcggacttacactttttcgttagtgggaaaattgaaacatttgcaaacagagtgaccgtggcgacatactccaaaaatcgcgccagtcacataatagtcctaaatttggacaactagcgatgactcaagccgccggataaatgcgctatgtttttgtagccgagacacgctacgtggggagagcgatgtttttatcgtggacacaaaccaaattgaaattcttcaccgaagattttatcgcgactgtgccatggtcgcactgattagctcaccgaaacgttcattgaatttgttttgattatctcgaaataacaagctattttctcaattttcctgacaaaaatgacatcgattgccaagtccatagtactattggcatccctggccacgttcgcttactccctgtacgtggttggcagcctgatgatgttcctttcgacgcctcgttcgatttccaaggcgcacacctggattttcaatttactggacaacaagtcgcgcctgcagaccgcctatggacccgtggtgttcgataccctctacctgatcggattcatcttccagcacagcttcctcaagtcagccgtggtcaagaagctgttggccaagttgggattgtcgggtgcggagcgcactatttatagcctgacgtcatcgctttgtttacatgtttgtatacccacaaattggacagaaatagctcccaactgcaactttggacatttcagtatttgatcgtcaactggctgcccgctcagtcgattgttctgtggcaaatcgatgtggagcagagtgctccgctttggtggaccttcgtgatcacccatggcatctgctgggttgtcatctttggcggcagtttggtgatggatctgccagagctgctgggcgtcaagcaagcctactacgatctgaaggcctacggaccgcccatcagctacaaatccggggaattgcgcaatctgtacgcccatgtcagacatccctcgtttgtgggcctgtcggtcatcctgttcgccacgaatgtgatgagcgtggatcggctagtcatggccttgctgctgaccacctacatgtacctggcctggtccacagatcagaaggatgtggcctatcagaagattcaactgcagcgcaagaaactcgaactgaaggccaagtaaacttaatctcaaaagtgttcttactaagatctagttgtaagttgacatgagtttgtattgaataatacttttctaacaatttcagtttccgaatcagaacgaaacaaataatgaaaaaactaaaagatatataaaaatatatatggttcagtttttactattttactactattgctagcttaattaattattttaaaatttaactcattcttacgatagaaggatcaaagggctgtcctttaaacggcgaaccttcggcatcccaggcagctttcaggcgatccaggtttatagcttggtcgggacttgaggtctgaatttcattttgttgcttgtctgctgccaactgctggaccctaagcttttctatggtggcctgggtttcctccggcaaatcatctatatagcgttcgcattcaatcttcttggaatcgatttctggatcaccttcgaagagccgatcccaccagagctcctttgctttatctacagttatatacagtttatgaaaatggtttataaagatgttttaggtgaatgcccaccgtaacttatgatcaatcggttctgatcaattgtccacaccgcctccttgtgtttaatccgctggctcaggtttccctcgaggatgatcgtctctgggctatgcttgctgctcactttgatgtgctgggcctgaattgaaatgtgcagcttcttcgccgtttgatgatccttgggaagcagagcctgcacctccacatccttgagggtttgtgaccagcagtgcgtttcgaacacatctccgtttttgtagtcgctgggggagaactttgactgctccttccctttttgtggcggctggctctctatgggtttcatttcctcgtcctgaggaccatcttcgctttccaggaccacttcttcgacggcaggcggagccgtttctccatcatctgcaccgccttccgcggtcagggattgtagcaagcaatccggatcgtagcgctgcatggcgcca

SEQ ID NO: 17090 - DNA, 827 bp, DROSOPHILA
cgttcattgaatttgttttgattatctcgaaataacaagctattttctcaattttcctgacaaaaatgacatcgattgccaagtccatagtactattggcatccctggccacgttcgcttactccctgtacgtggttggcagcctgatgatgttcctttcgacgcctcgttcgatttccaaggcgcacacctggattttcaatttactggacaacaagtcgcgcctgcagaccgcctatggacccgtggtgttcgataccctctacctgatcggattcatcttccagcacagcttcctcaagtcagccgtggtcaagaagctgttggccaagttgggattgtcgggtgcggagcgcactatttatagcctgacgtcatcgctttgtttacattatttgatcgtcaactggctgcccgctcagtcgattgttctgtggcaaatcgatgtggagcagagtgctccgctttggtggaccttcgtgatcacccatggcatctgctgggttgtcatctttggcggcagtttggtgatggatctgccagagctgctgggcgtcaagcaagcctactacgatctgaaggcctacggaccgcccatcagctacaaatccggggaattgcgcaatctgtacgcccatgtcagacatccctcgtttgtgggcctgtcggtcatcctgttcgccacgaatgtgatgagcgtggatcggctagtcatggccttgctgctgaccacctacatgtacctggcctggtccacagatcagaaggatgtggcctatcagaagattcaactgcagcgcaagaaactcgaactgaaggccaagtaa

SEQ ID NO: 17091 - protein, 253 aa, DROSOPHILA
MTSIAKSIVLLASLATFAYSLYVVGSLMMFLSTPRSISKAHTWIFNLLDNKSRLQTAYGPVVFDTLYLIGFIFQHSFLKSAVVKKLLAKLGLSGAERTIYSLTSSLCLHYLIVNWLPAQSIVLWQIDVEQSAPLWWTFVITHGICWVVIFGGSLVMDLPELLGVKQAYYDLKAYGPPISYKSGELRNLYAHVRHPSFVGLSVILFATNVMSVDRLVMALLLTTYMYLAWSTDQKDVAYQKIQLQRKKLELKAK

SEQ ID NO: 17092 - DNA, 3464 bp, DROSOPHILA
cagggaacttggcttaacaaagtttatacaaatgcacaatgaaattaaatctacttaactgctaactgttattattagttatttcatacgatatgcaggaggcagaaagttgcttattaaacatatattttcataaatatttcacgaaagtatgagaaaatttcaaaatcgtttgataatatactaatacgctatttagccacatatataagtctctaatgtatttcttaaataaatcatttgtaaagctataaactaaattcttttataaaatctactcccaaaaaaaacagcagcatcaaaccttagcgtcttaatattaattcaaatgaacactcatcgcttgccgattcaaaatcgtaaggttttcttttaaattcaaaactcgctggaatgccgagacttgtgacgtcacacgccatcttcatgctgcgcggcgagaaacatgcgcaaacgtcaccttctcagcggcagactcaggttgtccatccctggttcaagtaatgtcaccctggtttttgttttgtaaagtgaaattgttgcaagtcaaacaacaataataaaaatcattaaaagcgcgtacaagaagtcaaaaagaattgcccacacaagtacgtattgacgggctgtcagctttgctatatggaaatcaattttccactcaacttttacttggaaatcggtatttaattttgtgttgtctgctgtgaaagtaacaacaacaaaatcaagagtaacgtcaagagcaaaaatagttttccccattttcaaaattgacaaatatagatgtacatttcccgcaatttcgccgcacaactagactagagtttagaccaaattttcgcagttttcccagcccagtattttcgaacagccgcacagtcatcgcttttgtgacgtgctcaccttgaattcatcagcaggcagcaagatattgaccctgcacatagacactcccggtcatgaaattagtagccgttgctagtagccatttgacacactccatttaaacatacctaaatcaaaatattgacatgtctcggcatttggaaaacttctttaccaacagagtacggcgacaactgcaagtggctgaacaaatgaccaccgccgcctccacatcgcagcatgcgacatcgtcctccacaatgatggcgggctctggatccttggcgacctcgtcgtccgccgctgcccccacaaccacgcccagcagctcggccgttcgcgccctggccatggagtacaagtcgctgcaggaagagccggtggagggattccgcgtcaagctgatcaacgacgacaatctgttcgaatgggaggtggcaatcttcgggccaccggacaccctctaccagggcggctacttcaaggcgcacatgaagttcccgcacgactatccatactcaccgccatccatacgcttcctgacgaaggtctggcatccgaatgtttacgagaacggtgatctgtgcatatccatactacatccgccggtggatgatccgcagagtggcgagctgccctgcgaacgctggaatcccacgcagaatgtgcgcaccatcctgctgtcggtcatatcgctgctcaatgagccgaacacattctcgccggccaacgtggacgcctcggtcatgtaccgccgatggcgggactcacaggttagactggctcatctagtcatagtaaatgtctagtatgcggacttctcaataatgaaagcagtgcaaaacttatctttggaatatggactagtcattttactcgaagatcaatctaagtcagttcgaaagcccagatctagtttactagttttattaactttgatttcaatcaatgtcagtttcaatgcttcttttttgaacttgtaattcaacattgtaattcacttttaattacatgccttgattttggttcttcgaacgtgcatatttccttcattacattgtaagtacgttctcttttcacacgaacagtcaatgtaacttattcaaagcttgaagtccgcatactaggcatttacaaacgccacttggctttttaataaggacttgcttgatttcagggtaaggacaatgagtatccaaacatcatacgaaaacaggcactggccgccaatgccgaggccaagcgggagggcattgtggttccgatgaccctggaggactactgcctgaagcccacgcgcaagcccacaacggagtctggcctggatgccaacttctacgatgatgatttcgatctggagacggaggatgatctgccatctgatgatgacttcgatgaggacgacgacgatgatgaggacgaggatgaagatgaggacagtgccacggcgccgattagcaaaaataatggaggcagcagcaagtgcaagaacaacgggctggtcagagaggcggccgccgccggagcggacgatgccgaatccgctgatgacagcggcaagggcgagaccacataatgcagccaggccagggtcgcgtcatctcttcctcccactcctgcccagggcggcgagccaccgccttttaatttctccaacattattactattattaattctaattatacacgtttcgaaactaaaccgaacaactgagaaaacaattatttaacaagtttatatgtaccgagggtagttgaaacaatggtcctacgctgattttatctactcaattttactttgataactaagatgatgatcgtataagctacaggttatatgcatgcgggctaactcaattcccagcctgtgggcaagcaattaagagttcagggacttctccaaatccaaacatttatacgcagaagaaacacacaacacagaaacaagaataaaaccaataacacaagaaactcaaacagaaactgattatcaatatacacagcatatgtactaggtatttaatatttaaaaatatacatacacacatttttatgagcggaaacgaaatacaaatgtcccaattcgcgcgacgcggcatcctatcgtacataatggacacagcatcaaggtaaagaacagaaaaaaaaaccatattaaacaatcaatggatttcaagaataaaagcaaatatggaaacatagcgattaagcaatttttaagtgcaaaattgacaaagtaagtttaaaaccagctattgcaatatggaaacgatgaagcgcattgttcaaacagtaacagaattgcaacaaagataaataagccaaataaaattactgaaaaaaaaataagatggtccttcaatttggatggattaattgttatggtttttcgttaggaaaggaaagggtacagaaaaccattcagtgcatcacattgaattctataatttatttgttcgcctttgtcgattgaattatttaaatttgaaccacgagcttggccctttttctccaagccactagcgcaggcgtcagatccttctcggtaacagctggcatgcgtatcagtgagctgt

SEQ ID NO: 17093 - DNA, 1060 bp, DROSOPHILA
ctccatttaaacatacctaaatcaaaatattgacatgtctcggcatttggaaaacttctttaccaacagagtacggcgacaactgcaagtggctgaacaaatgaccaccgccgcctccacatcgcagcatgcgacatcgtcctccacaatgatggcgggctctggatccttggcgacctcgtcgtccgccgctgcccccacaaccacgcccagcagctcggccgttcgcgccctggccatggagtacaagtcgctgcaggaagagccggtggagggattccgcgtcaagctgatcaacgacgacaatctgttcgaatgggaggtggcaatcttcgggccaccggacaccctctaccagggcggctacttcaaggcgcacatgaagttcccgcacgactatccatactcaccgccatccatacgcttcctgacgaaggtctggcatccgaatgtttacgagaacggtgatctgtgcatatccatactacatccgccggtggatgatccgcagagtggcgagctgccctgcgaacgctggaatcccacgcagaatgtgcgcaccatcctgctgtcggtcatatcgctgctcaatgagccgaacacattctcgccggccaacgtggacgcctcggtcatgtaccgccgatggcgggactcacagggtaaggacaatgagtatccaaacatcatacgaaaacaggcactggccgccaatgccgaggccaagcgggagggcattgtggttccgatgaccctggaggactactgcctgaagcccacgcgcaagcccacaacggagtctggcctggatgccaacttctacgatgatgatttcgatctggagacggaggatgatctgccatctgatgatgacttcgatgaggacgacgacgatgatgaggacgaggatgaagatgaggacagtgccacggcgccgattagcaaaaataatggaggcagcagcaagtgcaagaacaacgggctggtcagagaggcggccgccgccggagcggacgatgccgaatccgctgatgacagcggcaagggcgagaccacataa

SEQ ID NO: 17094 - protein, 341 aa, DROSOPHILA
MSRHLENFFTNRVRRQLQVAEQMTTAASTSQHATSSSTMMAGSGSLATSSSAAAPTTTPSSSAVRALAMEYKSLQEEPVEGFRVKLINDDNLFEWEVAIFGPPDTLYQGGYFKAHMKFPHDYPYSPPSIRFLTKVWHPNVYENGDLCISILHPPVDDPQSGELPCERWNPTQNVRTILLSVISLLNEPNTFSPANVDASVMYRRWRDSQGKDNEYPNIIRKQALAANAEAKREGIVVPMTLEDYCLKPTRKPTTESGLDANFYDDDFDLETEDDLPSDDDFDEDDDDDEDEDEDEDSATAPISKNNGGSSKCKNNGLVREAAAAGADDAESADDSGKGETT

SEQ ID NO: 17095 - DNA, 5264 bp, DROSOPHILA
tggtaatcaatagctggcgaattagcgatatttgagtgtgacgcaaaaatgagttggcatcgatatcgatttctcgctactctgggacgccatctttattgcggtattttaaacggaaacttaactcaaattaaacggcgtgctaaaattttccatttttttcgaataaaagcacgtaaaagtttgtgaagatgtaaaagttataaaaactagaaagccttattcgtggccagcgctttcgttttagaaatacgtcaatttaaagtttttaaggtaaattgcaaaattgcaataattgcaataatataataataataaaattttggtaagttataagagagtaaatacaattttgaaagtttatacccccgttaacaaaccacttgaatttagagtggcagaactatgcaactacagcgagtttaaacatcgatatattcgtgatttttggtttgcttattatcgattccatacaaaactaccggcataagcaattttaaaatagacgtaaacaacatcaacgtaattaatccacaaaaacaaattcttttattaattttaattgatgcaatacattttaatttttgtgaaactctaaatatcaatagtcgccctatgcattgatcattgtcacaaacattgttaaaatttattaaatttattttggtagaacactaggttttcgatttactggcttccggatttttactcataggttttaaaaatattttttgccaaggatatcaactaaaaaaatatttgtttatttttttataatattaatgaaattctatattgaacatttttattttttgaactgcttgcacaatttgctaataagagaagttgcgcttaacagtaaaatgttactgacattaacagcacacgtacgagaattacagtacactgctttcgacttgctgtgatatcgagcattcctggtatcgagtgcaaaatggcggcattttaagttcaatttaacacgattaggttgagcttgtcgattcttttttaagtataagccaacaaatgtttcattaaacgcataatgagtcgcattttatttattttgttgctacttattgtgacgcaactgagcgagttgcaggcggcagcattttctgtgcgccaaaatcgttttgatgaagttcctgatttgcagactcctgcacctctggccacttccactgaatcttctaagaaacccgaaaaaggttggttacatatgtacgtttagtgatataaattgaatatctcggcaatttcaaaatggcgtaaagggtgaaagtgttcttgtccgctctctgtgaatataagttacggttaatcgctctacactgaaaacaactgcataaaaaactttcatatttacataattaacaaaatcaaatttttgtaaaattaaatacaatataatataaaagtataattgtttcttcaattttaaaattatatttttatggttatttttatttcgtaaattgtacaaatttggtctttctgtgtagctaccagtggtctgctgaaaaaatgccttccctgcagcgatggtataagatgcgtgccccaaatccagtgtcccgcccacgttcgcatggaaagccatgaaaagccccaaatttgcgatctcccggctggaaaattcggctactgctgcgagactggacagaatcacactgctcccaagccggagacctctcccaaggagcgtcgatccggatttcccaccattctgtcacccgcagttttggatgaggcgcgtcgcaatttcgagcacttgatgcatggagttgcgcagattccggtgcgccgtggctttcccgattttgcccatggcctggttttccactcgacggccaaggatgaccttcacaacttcgccatatcgaacagtgccattgaacaagtgatgaccacccagttgtttgggaagaaggagcaggtgcccgtagaagatttcatcaccaacaatgtgcccatcaagttcactgagactccgctggcacaccattgccaaccgcccccagtttgcggcaatattcggtctgtttatcgcagcatggacggcacttgcaataatccagaaccacagagatctctgtggggtgctgctggtcaaccgatggagcgcatgctgccccccgcctatgaagatggtatctggacaccgcgtgctcactcttctgacggcactccgctgttgggcgcccgtaaaatctcacgaactctgctctcggacgttgatcgtcctcatcctaagtacaatcttatggtgatgcagtttggacaagtcttggtaagtaatcaagtaaaagccacctattagtgaaagcttaataaagaaatcacatggatctatacatatgggtggggggccaataaactagttctttggttaataaataaagttaatatattcattttccaggctcatgacatttcacaaacttcttcaatccggctcgaggatggcagcctggtgcaatgctgttcccccgaaggaaaagtagctctcagtcctcagcaaagccattttgcctgcatgccgatccacgttgagccggatgatgagttcttttcagcttttggagtgcgttgtttgaactttgttagattgtctttggtgcctagtcccgactgccaactcagttacggcaaacagctgaccaaggtgacacactttgtggacgcctcgccggtctatggatcgagtgatgaagcatctcgtagtttaagagccttccgcgggggccgattgcgaatgatgaatgattttggtcgtgatctgctgcccttgacaaacgacaagaaggcatgtcccagtgaggaagccggaaagtcctgtttccattcgggtaaatcactattaagcaatgtgtttcttattattaattctttaataacatatttaacacgattaggtgttattcactgctcttacttccattattgctgatgcggttctttttccttctacatttaggagatggccgaacaaaccagatcatatccctgatcacccttcaaattctgcttgcccgagagcacaaccgtgtagccggtgcactacacgaactaaatccgtcagccagcgatgaaacgcttttccaggaagctcgacgcatcgtcattgccgagatgcagcatatcacctacaacgagttcttgcccattataataggaccacaacagatgaagcgcttccgtttggtgccgcttcaccagggctattcccatgactacaatgttaatgtgaatccagctatcacaaacgaattctcgggcgctgcctatcgcatgggccattccaggtaagaaatatttgattactgcaaacgaaaatataattttaatttatatgtccgatttaagtgttgatggtaagttccaaatccgccaggaacatggtcgcatcgatgaagtggtcaatataccagatgtgatgttcaatccttcacggatgcgcaagcgcgagttttacgacgacatgctgcgcactctatacagccaacccatgcagcaggtggacagctcaatcagccagggagtagggattaaccttaattaactaaattcacgtggtttgctaatcgcttcaaccttgagcagctcagtcgctttctgtttcgcggggacaatccgtttggcctggatctagctgccattaacattcagcgaggacgcgaccagggtctgcgtagctacaacgattacttggaattgatgggtgcacccaaactgcatagctttgagcagttcccaattgaagtgagtacttgggcaatagctctcgactgtagtcaactaattcttatgtaatagattgcccagaagctgtcgcgcgtttaccgtacacccgatgacattgacctctgggtgggtggccttctggagaaggcagtcgagggtggtgtagtgggagtgacctttgctgagatcatagccgatcagtttgcacgcttcaagcagggcgatcgctactactatgagtacgacaatggtatcaatcctggcgcattcaaccctctgcagctgcaggaaattcgcaaggtaacgttggcccgactcctgtgtgacaactccgatcgccttacgctccaagctgtgccattggctgcattcgtacgtgctgatcatcccgggtaagtggagtgtgcaacttaagctgtgcagttcctttaacttatttctttatagcaaccaaatgattggctgtgatgatcccaacctgccttctgttaacttggaggcatggcgtgcttgaggcactttttttgcatccacttttaatttatttatggatattttaaactgtatttatatatgcgaatgtgctgccgaattgtatatccccgttttatgtaactgcggcttaacacagaaaccaaaataaaactgcgatcaattaagctgattttcattgctaattaagcgtaaatttctttgttccaatgaatgttttgagctgcaactctctctccgctcctcttgaggcccttttgtccttttgtggtgttacattgttgattgggtgacaaatacaaataccaaataacccagaagatgtcatttattttcggcatctcattaaattttatcatttaaacgttttatcattttatggaaatgtgttttcgaaatatccgctagcaaatgaaaaagaagacatttttcttggccattgatttgaatagaaaaaaatattttggtattttaaaataacggttttcaatttgaaaatttcgggcgttttttgatgtttattgtgggtgttattttttattttttcctttcatgtgtattatcacaaatttgcaagcttcttctgtgtcatataaaaagtcttggtaagcaataccattagtatttgagtttcttttcagcccatagcactcgttatgatcgtacaataacaggagatatatagtatatagtggttcgtcactacgtggactgtcgtccacagtgatatgtttgtttctggcatggaatcgctttggattatctagtcaattagtagctgttcgcattcgtaaataacatgatatgcaaatttcaagctaaattaaaatgtataacagaatattattaaacgtctatatcaattccgctccatttcacagtgaattgtgtgtcgacatgtatctgtgaagtcttgtttaaccttagatattcattatttgagcttctatttttacaatcttcacgtaagtcatgtgaactaatctaatatacgcagtttgtaatctctgtcaaatgaacaa

SEQ ID NO: 17096 - DNA, 2478 bp, DROSOPHILA
tcgattcttttttaagtataagccaacaaatgtttcattaaacgcataatgagtcgcattttatttattttgttgctacttattgtgacgcaactgagcgagttgcaggcggcagcattttctgtgcgccaaaatcgttttgatgaagttcctgatttgcagactcctgcacctctggccacttccactgaatcttctaagaaacccgaaaaagctaccagtggtctgctgaaaaaatgccttccctgcagcgatggtataagatgcgtgccccaaatccagtgtcccgcccacgttcgcatggaaagccatgaaaagccccaaatttgcgatctcccggctggaaaattcggctactgctgcgagactggacagaatcacactgctcccaagccggagacctctcccaaggagcgtcgatccggatttcccaccattctgtcacccgcagttttggatgaggcgcgtcgcaatttcgagcacttgatgcatggagttgcgcagattccggtgcgccgtggctttcccgattttgcccatggcctggttttccactcgacggccaaggatgaccttcacaacttcgccatatcgaacagtgccattgaacaagtgatgaccacccagttgtttgggaagaaggagcaggtgcccgtagaagatttcatcaccaacaatgtgcccatcaagttcactgagactccgctggcacaccattgccaaccgcccccagtttgcggcaatattcggtctgtttatcgcagcatggacggcacttgcaataatccagaaccacagagatctctgtggggtgctgctggtcaaccgatggagcgcatgctgccccccgcctatgaagatggtatctggacaccgcgtgctcactcttctgacggcactccgctgttgggcgcccgtaaaatctcacgaactctgctctcggacgttgatcgtcctcatcctaagtacaatcttatggtgatgcagtttggacaagtcttggctcatgacatttcacaaacttcttcaatccggctcgaggatggcagcctggtgcaatgctgttcccccgaaggaaaagtagctctcagtcctcagcaaagccattttgcctgcatgccgatccacgttgagccggatgatgagttcttttcagcttttggagtgcgttgtttgaactttgttagattgtctttggtgcctagtcccgactgccaactcagttacggcaaacagctgaccaaggtgacacactttgtggacgcctcgccggtctatggatcgagtgatgaagcatctcgtagtttaagagccttccgcgggggccgattgcgaatgatgaatgattttggtcgtgatctgctgcccttgacaaacgacaagaaggcatgtcccagtgaggaagccggaaagtcctgtttccattcgggagatggccgaacaaaccagatcatatccctgatcacccttcaaattctgcttgcccgagagcacaaccgtgtagccggtgcactacacgaactaaatccgtcagccagcgatgaaacgcttttccaggaagctcgacgcatcgtcattgccgagatgcagcatatcacctacaacgagttcttgcccattataataggaccacaacagatgaagcgcttccgtttggtgccgcttcaccagggctattcccatgactacaatgttaatgtgaatccagctatcacaaacgaattctcgggcgctgcctatcgcatgggccattccagtgttgatggtaagttccaaatccgccaggaacatggtcgcatcgatgaagtggtcaatataccagatgtgatgttcaatccttcacggatgcgcaagcgcgagttttacgacgacatgctgcgcactctatacagccaacccatgcagcaggtggacagctcaatcagccagggactcagtcgctttctgtttcgcggggacaatccgtttggcctggatctagctgccattaacattcagcgaggacgcgaccagggtctgcgtagctacaacgattacttggaattgatgggtgcacccaaactgcatagctttgagcagttcccaattgaaattgcccagaagctgtcgcgcgtttaccgtacacccgatgacattgacctctgggtgggtggccttctggagaaggcagtcgagggtggtgtagtgggagtgacctttgctgagatcatagccgatcagtttgcacgcttcaagcagggcgatcgctactactatgagtacgacaatggtatcaatcctggcgcattcaaccctctgcagctgcaggaaattcgcaaggtaacgttggcccgactcctgtgtgacaactccgatcgccttacgctccaagctgtgccattggctgcattcgtacgtgctgatcatcccggcaaccaaatgattggctgtgatgatcccaacctgccttctgttaacttggaggcatggcgtgcttga

SEQ ID NO: 17097 - protein, 725 aa, DROSOPHILA
MESHEKPQICDLPAGKFGYCCETGQNHTAPKPETSPKERRSGFPTILSPAVLDEARRNFEHLMHGVAQIPVRRGFPDFAHGLVFHSTAKDDLHNFAISNSAIEQVMTTQLFGKKEQVPVEDFITNNVPIKFTETPLAHHCQPPPVCGNIRSVYRSMDGTCNNPEPQRSLWGAAGQPMERMLPPAYEDGIWTPRAHSSDGTPLLGARKISRTLLSDVDRPHPKYNLMVMQFGQVLAHDISQTSSIRLEDGSLVQCCSPEGKVALSPQQSHFACMPIHVEPDDEFFSAFGVRCLNFVRLSLVPSPDCQLSYGKQLTKVTHFVDASPVYGSSDEASRSLRAFRGGRLRMMNDFGRDLLPLTNDKKACPSEEAGKSCFHSGDGRTNQIISLITLQILLAREHNRVAGALHELNPSASDETLFQEARRIVIAEMQHITYNEFLPIIIGPQQMKRFRLVPLHQGYSHDYNVNVNPAITNEFSGAAYRMGHSSVDGKFQIRQEHGRIDEVVNIPDVMFNPSRMRKREFYDDMLRTLYSQPMQQVDSSISQGLSRFLFRGDNPFGLDLAAINIQRGRDQGLRSYNDYLELMGAPKLHSFEQFPIEIAQKLSRVYRTPDDIDLWVGGLLEKAVEGGVVGVTFAEIIADQFARFKQGDRYYYEYDNGINPGAFNPLQLQEIRKVTLARLLCDNSDRLTLQAVPLAAFVRADHPGNQMIGCDDPNLPSVNLEAWRA

SEQ ID NO: 17098 - DNA, 4161 bp, DROSOPHILA
gtggaaaaactgacgaattcccgcttataaccccaataactaaccatgagcgaatcttttaccgacagcaaatatatctagttaacttaaacatagttgaatgctcaggatggctagacctaaaattatttctaagatatttgaatgatgaatataaattctaatggagtatgcatacgaataatatgtaattttaaatctttttgttaaaagtggtggttagtagttgatatttgaaattaaatcatacaagttgctgataaagatatcctgctttcccaatattcaatttacgttgcattaggcaaacctacgcctttttttaaaactttaaaacctttgaatgtaaggctttgcagtatgacagctctattaacggataagactgtcttattgtaatcttcagttgagattgcgaattcctcaccggctttccagcatctttaccacctttttacccttttctcgtaacggaaaacgtcagtcagtcagttgttacccagttaggcagtaaagcagtaaagcatttccctcgactcttgccggttcggttcattcaactaaataatttgagtggcattcatgcaggtccactggctcacagctcatgtttcaggattccctgtttggtcctgactgctgctgttggtacattcgttttgtaattgtgtggcaggtgacggcaatcttccattgttcgagctatgaaggccgagccgggagttcgagttcggtttctacttgaactcaccccatgtcgaattgtaagggcgaaaagtgccccctacgataagaacaagctgcagtgcacacacacaaagccattcgttttatgtgccctgcaatatacaatatttatttgaatttaagtcctttgtttgggacctgaaatccgcacacagcggtacactgattccagggttgtttgctttggctactatttttgactttgtccaggagttcgtccattcttcccactcgcaaaaccattttctggctcgttttgatcgtcaactttatttgcaaaaataaatctttatggttttacatcgaaattcaatcttatcaccttaaagttctggccctgactagctcgctttccttgcattgcaataactgatatagaatctggcataacctacatacacttaatcgattgtacagttaattatggctaatacctggttcattttaagaatccttatagataggtcttaaatctagaatggcaaggtacgtatcgcttacactaaatggacaaccgatttgtactatatagtcaagaagaatgcgaatatgttgagaagaagagtgctttttggaaaattgattaccctaagcacttttaattcaaatattcaccagagatccgcaagaaggaagccaatgaatacaaatataatgggaattcatatgaattaataatgagttcgtgaagcttaactttggatgtttgactttaaattggttaatctattgaggatccctctataacatgaaactaattgagttcaaagattagcgcaagtgtgaaatatacaatttttaaagatatttcattttcaaacttgatgataatcttagcagtcaattaggtgcctcgcttattaccaatatcaacggattgcaggaaagttgagaaaagtaaggaagggaaatcccgagataggacccataagttactttagttatgtttttaaagtaagtcaagggcaaatcgcttagaggaattccccttgatcagtttcctgcaatttccggcaatcttttagtatatcacgctgaaaaccctaagatcgtagtttggcccacaaaactgtgctacacctgcggggcgaagtttttgtagctgtgttgatgtggaacgggatgcacgtgtgcctgatcctccggatagtccttccatggcggtgtttgcgagtagaagctgctctgctggtgaatcccagaatccaagttcgtagaatgaagattggcagctgcatcgaaggatcccctgaacagatcgtatttctcctgcgagaactgctgcgggctggactcctgctggggattaggctgcagatggtgaggctgatgcggctgctgttgctgttggtggtaaaaccgcatgctgcctgtaaagtcgaatcctggtggctgctgcggatagtccatgccgtgctgaaagccacccatcgccggcggctgctccgcgtgcgatgctggagcagtctggtgctgtgcaagaggcgccattccctgtccataggggaacattcgtccgaacaagggatacggctgtggattcacgaaaagagcatcgaagagctccttggtaatcctctcaccactcagcgtgaagttctgcagcttctccagatccaggttgattgaacctccgctttccagcacctgctccagggcaaagatgtagttgtgcgcaaatcgcagaatctcgatcttcgtcagcttcgtctcctcgggaagcgagggcagagtgacgcgtagtttctccagggcatcattcaagttatgcatccgattccgctcccggtcattggccttcatgcggcggaaacgcttgatcttcaccacttgggttggactgcgcgagcgagttactctgttcttgccgacggcatatttgcgtttcggtcgcggcgcattgggatcctctggcgacttcaccggcgtactggtcaatggcggatcgaagacgccattcgtggcccgactgttcagatgttcgaccagtgtcctgccgctccgagtgctgtgattgctgctcgtatcgagcaatcccacgaagcccgccggcggtgagctgagcggtacggcgtcccaggtgccgccggagtacggttgcgggatcgccggagtcggcggagtgccaaagtccaagcggcgtcgtgagctcaactgggcctccgtctcgaaactcttctcgtagccactgtcgaaggaggcgtcgtcgtcgtcctcgtcgaactcgaaggactgtgatccagcgctataggcattgtagcaggcggccatgatctcgtatctgtatcacggtgtgtatatcctttagcacatttccgatttacgatttccgctttgagagagttgtttcttcgcgtctcgcgtgcccgcaccaactaaaagctggcgaggagtgcgcaccggttttatgtgcccggccagccattaagcccgctgatttgggtccggactaacaggcatcaaccctcggcgcattgtcgtcggtcgtggcggcgccatagcgcaaagtagagagcacagaaccccgacacaaatcccaacagatatgcgccgtgattgccgcccgggggtggcttttgccaactcacacaccaacgtcgtctagctagaactgcctgcagcggggtgaacttcctggagatggagattcgttctgcgggccgccgctaccagtcaaaatacgagcatttttcacgcttcgctgcgagcggtgctctctaggccaatcggaaggatgtctgcgtccgaggatcagcggtgtcgccaacggcatcatcaaagctcgtctctatagtcatacccttcctctagggttatttaaatacaatgtgcttactgcacagcttaaacttaattatatttatattaatgaatgagtagtattgttggtcaatttaagatatgctttatattatagttaaattaaaagaagaaatattatattattatatattttgtaaaaatcacttagtttaaggataaatccaaaaattatttgaaatagggaatacttttgtttaatatgatatcttcggatcattacgactttgttatattttcggtgtaggtataattttcggacgagatttaatccatttccgtactaaaagatttcttaccctttcctacatatatagagtatgtgtgcttcgtggactaaataaattgttattttgttttatcgccacatcgaaataatgcgattgcaattcaaaagattcaattaccatcaactctttcgcctttcgcaactaaaccgcaataatcgtttagggcttacgcctgtcgctaaacgggttagtggcacgtggccaggatgccgcctccacttaccaaaagcaacatgtgtattcaacggaaagctctcactcccacaggactccatcctcctggtagaaaacccaggcgttgcca

SEQ ID NO: 17099 - DNA, 2161 bp, DROSOPHILA
ggcacataaaaccggtgcgcactcctcgccagcttttagttggtgcgggcacgcgagacgcgaagaaacaactctctcaaagcggaaatcgtaaatcggaaatgtgctaaaggatatacacaccgtgatacagatacgagatcatggccgcctgctacaatgcctatagcgctggatcacagtccttcgagttcgacgaggacgacgacgacgcctccttcgacagtggctacgagaagagtttcgagacggaggcccagttgagctcacgacgccgcttggactttggcactccgccgactccggcgatcccgcaaccgtactccggcggcacctgggacgccgtaccgctcagctcaccgccggcgggcttcgtgggattgctcgatacgagcagcaatcacagcactcggagcggcaggacactggtcgaacatctgaacagtcgggccacgaatggcgtcttcgatccgccattgaccagtacgccggtgaagtcgccagaggatcccaatgcgccgcgaccgaaacgcaaatatgccgtcggcaagaacagagtaactcgctcgcgcagtccaacccaagtggtgaagatcaagcgtttccgccgcatgaaggccaatgaccgggagcggaatcggatgcataacttgaatgatgccctggagaaactacgcgtcactctgccctcgcttcccgaggagacgaagctgacgaagatcgagattctgcgatttgcgcacaactacatctttgccctggagcaggtgctggaaagcggaggttcaatcaacctggatctggagaagctgcagaacttcacgctgagtggtgagaggattaccaaggagctcttcgatgctcttttcgtgaatccacagccgtatcccttgttcggacgaatgttcccctatggacagggaatggcgcctcttgcacagcaccagactgctccagcatcgcacgcggagcagccgccggcgatgggtggctttcagcacggcatggactatccgcagcagccaccaggattcgactttacaggcagcatgcggttttaccaccaacagcaacagcagccgcatcagcctcaccatctgcagcctaatccccagcaggagtccagcccgcagcagttctcgcaggagaaatacgatctgttcaggggatccttcgatgcagctgccaatcttcattctacgaacttggattctgggattcaccagcagagcagcttctactcgcaaacaccgccatggaaggactatccggaggatcaggcacacgtgcatcccgttccacatcaacacagctacaaaaacttcgccccgcaggtgtagcacagttttgtgggccaaactacgatcttagggttttcagcgtgatatactaaaagattgccggaaattgcaggaaactgatcaaggggaattcctctaagcgatttgcccttgacttactttaaaaacataactaaagtaacttatgggtcctatctcgggatttcccttccttacttttctcaactttcctgcaatccgttgatattggtaataagcgaggcacctaattgactgctaagattatcatcaagtttgaaaatgaaatatctttaaaaattgtatatttcacacttgcgctaatctttgaactcaattagtttcatgttatagagggatcctcaatagattaaccaatttaaagtcaaacatccaaagttaagcttcacgaactcattattaattcatatgaattcccattatatttgtattcattggcttccttcttgcggatctctggtgaatatttgaattaaaagtgcttagggtaatcaattttccaaaaagcactcttcttctcaacatattcgcattcttcttgactatatagtacaaatcggttgtccatttagtgtaagcgatacgtaccttgccattctagatttaagacctatctataaggattcttaaaatgaaccaggtattagccataattaactgtacaatcgattaagtgtatgtaggttatgccagattctatatcagttattgcaatgcaaggaaagcgagctagtcagggccagaactttaaggtgataagattgaatttcgatgtaaaaccataaagatttatttttgcaaataaagttgacgatcaaaac

SEQ ID NO: 17100 - protein, 398 aa, DROSOPHILA
MAACYNAYSAGSQSFEFDEDDDDASFDSGYEKSFETEAQLSSRRRLDFGTPPTPAIPQPYSGGTWDAVPLSSPPAGFVGLLDTSSNHSTRSGRTLVEHLNSRATNGVFDPPLTSTPVKSPEDPNAPRPKRKYAVGKNRVTRSRSPTQVVKIKRFRRMKANDRERNRMHNLNDALEKLRVTLPSLPEETKLTKIEILRFAHNYIFALEQVLESGGSINLDLEKLQNFTLSGERITKELFDALFVNPQPYPLFGRMFPYGQGMAPLAQHQTAPASHAEQPPAMGGFQHGMDYPQQPPGFDFTGSMRFYHQQQQQPHQPHHLQPNPQQESSPQQFSQEKYDLFRGSFDAAANLHSTNLDSGIHQQSSFYSQTPPWKDYPEDQAHVHPVPHQHSYKNFAPQV

SEQ ID NO: 17101 - DNA, 3730 bp, DROSOPHILA
cgtggtatccccaatttgcgctttgcgcagttcccgtagtttacggttgttagcctcgagttcttgagcaagattggacttgacccgggtgtttagaggcctggcatttgccgcagtatttacgtaaaccgtttcagatggtagggggaagatctgtaataagttttggagattatatgtgtatgtcactgttagcattggcattcattcacctgcgtctccgcagatctctgttgagccaccacagcatcccaacgaccgagtttcttggtaactccctcgtagccaatggtccgtttaattcgatccgcagctggtttctccagcggcttctgtagcacctttttgctgccatggatgttcttgagcttcttgcccgtctgactgtgcttggtggaggtgcgtaggatgtctaccagatcgttcagacccacggctctgggggcatgatccgtttccgctgacgaaacaccttttaccagctggaactcatcctggagcgactgccgctcgtcgcgcgtggacttctggatgtgctgcaccttgcccagactgccgatggcctgcagcagcttcttgtgtgcctttggttcgtagtgctcctcgtcgtcactcatttttgtcaggaaaatatttaaaatcaaataacaatacaaaaatacttcgcgcagcacgtgtgcagaataacagctgaagagttatcgataagttttgcggcccatcacaatttctacctgtgctcgatagcatgagtgtggaaaatggagctgccttcttttaaaaattaacttaaatataataacatttactactcaatacatatatctatgcatcaaaaatcaattgatttttttttaacaataaatgtacttttaactcagcgaaaacccccttcgtaacgcccttgatgattactatcgattgtccccccacgaaagaccggctatcgatgacaacgggatgaaaatattttgtttacgaattcgacattcgaatcgtcatggccgacacgaaatccggtagtggtcggcattcggctgccgggggaagtggaaacgccgtcctgtcgcccttggggcagggtcctgcgaacttggagtgtaaggactttcaggagtatctgcgcacccgccaaacgccagagtcgctggagaagctgtacaactatccgcccatttgtttggccgtttttcgggagcttccagagatagcccggcagtttatcataaggatactgttcgtggatcagcctgtgccacaagcggtggtcacatcatggggtgcccaacgttgtgccaagtatgactgtatccaattggataaacaatatcattgcaatgcattacttttgcagggagcaagccgaggcaaccagctgcctgacggctttgaacgtctggcgggtcacagccattccgggtggcctttctgcgtgggagctctcgcccaccttcaagaaaagcgtacgccaggtgctgctgggcggcggaaaaccttggcctatgaccaacacgctggataaggactcgaagcccagggacattgcttttctggatacatacgccatgtcccgctggcgttgcgtgttgcactacatggtcggcaccggaaatcgcaatggcaccgatgcggaggccattagtccggacgccgttcggattctgctgcacgccaatctcatgaaacgtgatgaacgagacggtatcacaataacccggcagggctttcagttcctgctgctggacacgcgagctcaggtgtggcattttatgctacagtacctggacacgtgcgaagaaagaggaatcagcctgccggaatgcttgtccatgttgttccagctcagtttttcaacgctgggcagggattacagttccgagggcatgaacagtcagatgctgacattcctgcagcatctacgggagtttggactggtcttccaacgtaagcgtaaggagggacgcttctatcccacacgtttggctctgaatgtgacaagcaaggaggcggctgcgactgcatctgtggccatggatgaggaggccactcaggactgtggctacattgtggtggagacgaactaccgagtgtatgcctacactgattctccgctccaggtagccgtgttaggtctgttcacggagcttctctaccgctttcccaatctcgtcgtgggcgtgctaacccgcgattcagtgcgccaggcgttgcgtggcggtatcacggcagagcagattgtctcgtatctggagcagtatgcgcatcccaatatgcgcatggtcgagtcagccattcactctaaatcctgcctgccacccacagtcgttgatcaaattaagctgtgggaattagagcgaaatcgcttcacctacaccgaaggcgtgctgtacaatcagttcctctcgcatacagatttcgtaacgctacgagactacgcccagtcgatccacatgctggtgtggcaaaatgagcgaactcgcacaatggtggtgcaaaagaatggccacgacgatgtcaagcgttactggaagaagtactctaagagtggtgtttagcccggtattacgaccaattattgggaagttattttagaagtaacatctgtgcccattttgttacaagctaaaattttaaaatatggtttaataagggagtgtgggattacacatttatcatcgacattcaacatacaagtggaataaaattaaaatacacaagtatcatacacataaaaacagaaaaccaccaaagcttttcctagattgtcctttaggatgggtcgacatgtaatattgctaaacgtaaaaaacagtgaagagacaactaacaaatgcatacaaaataattttatttacccaataaaatagaaaatttagaatgtcctatacgttatacctaaagaaagcatatcgaaacatcctcgcctacctaaatgcgagtggaaaagaaactagctcaacctaatacaaaatgggacgctggggcatgcagagattgtagtagctgcccttggcccaaaagtccatgcccttccagccgcaccaacctttaatttgaatggtggccaaatcatcggcacctgtataatggggatccaagatgaggaacttcacctgacccgtctgcacgcagtagtccaccccgataatggtgtgggccagaacaccgccaccaatcattaccggtgtaccttgcgtttggaaatgcatcgccagctcggaggcaatagtcgccagctcagctccagaggctacgtgcagaatttttgagtccacgttaaggaatccctgcagacacatgctgatttctgtggaaccaatccactgagaagaacccacgaatgcagcaggtttgtcgttgatcttgtgaaggtattcctgcacctccagatgcgtcggaatcggtgcgttcgtataaccctgcagcacaaaccaggagcagatcgtctgcagcgagcgatatgcgcatccccatcccttgtcctgcacctgctgttgcaggtaatgatagtaatggtagttaccatttactaagtactctttgccgtcgacaactccactgggacgtaatccgatgtgggtatttagcagcggagtccatggtgcgtcctccgtttcacctaggaaaagcatctggttggccctgcggaaataaggacgactgatgggcaaagcaaactgtcgatgcaggcgcttgcgtctcattagcatgcttggtgtatcgtcactca

SEQ ID NO: 17102 - DNA, 1675 bp, DROSOPHILA
atggccgacacgaaatccggtagtggtcggcattcggctgccgggggaagtggaaacgccgtcctgtcgcccttggggcagggtcctgcgaacttggagtgtaaggactttcaggagtatctgcgcacccgccaaacgccagagtcgctggagaagctgtacaactatccgcccatttgtttggccgtttttcgggagcttccagagatagcccggcagtttatcataaggatactgttcgtggatcagcctgtgccacaagcggtggtcacatcatggggtgcccaacgttgtgccaaggagcaagccgaggcaaccagctgcctgacggctttgaacgtctggcgggtcacagccattccgggtggcctttctgcgtgggagctctcgcccaccttcaagaaaagcgtacgccaggtgctgctgggcggcggaaaaccttggcctatgaccaacacgctggataaggactcgaagcccagggacattgcttttctggatacatacgccatgtcccgctggcgttgcgtgttgcactacatggtcggcaccggaaatcgcaatggcaccgatgcggaggccattagtccggacgccgttcggattctgctgcacgccaatctcatgaaacgtgatgaacgagacggtatcacaataacccggcagggctttcagttcctgctgctggacacgcgagctcaggtgtggcattttatgctacagtacctggacacgtgcgaagaaagaggaatcagcctgccggaatgcttgtccatgttgttccagctcagtttttcaacgctgggcagggattacagttccgagggcatgaacagtcagatgctgacattcctgcagcatctacgggagtttggactggtcttccaacgtaagcgtaaggagggacgcttctatcccacacgtttggctctgaatgtgacaagcaaggaggcggctgcgactgcatctgtggccatggatgaggaggccactcaggactgtggctacattgtggtggagacgaactaccgagtgtatgcctacactgattctccgctccaggtagccgtgttaggtctgttcacggagcttctctaccgctttcccaatctcgtcgtgggcgtgctaacccgcgattcagtgcgccaggcgttgcgtggcggtatcacggcagagcagattgtctcgtatctggagcagtatgcgcatcccaatatgcgcatggtcgagtcagccattcactctaaatcctgcctgccacccacagtcgttgatcaaattaagctgtgggaattagagcgaaatcgcttcacctacaccgaaggcgtgctgtacaatcagttcctctcgcatacagatttcgtaacgctacgagactacgcccagtcgatccacatgctggtgtggcaaaatgagcgaactcgcacaatggtggtgcaaaagaatggccacgacgatgtcaagcgttactggaagaagtactctaagagtggtgtttagcccggtattacgaccaattattgggaagttattttagaagtaacatctgtgcccattttgttacaagctaaaattttaaaatatggtttaataagggagtgtgggattacacatttatcatcgacattcaacatacaagtggaataaaattaaaatacacaagtatcatacacat

SEQ ID NO: 17103 - protein, 499 aa, DROSOPHILA
MADTKSGSGRHSAAGGSGNAVLSPLGQGPANLECKDFQEYLRTRQTPESLEKLYNYPPICLAVFRELPEIARQFIIRILFVDQPVPQAVVTSWGAQRCAKEQAEATSCLTALNVWRVTAIPGGLSAWELSPTFKKSVRQVLLGGGKPWPMTNTLDKDSKPRDIAFLDTYAMSRWRCVLHYMVGTGNRNGTDAEAISPDAVRILLHANLMKRDERDGITITRQGFQFLLLDTRAQVWHFMLQYLDTCEERGISLPECLSMLFQLSFSTLGRDYSSEGMNSQMLTFLQHLREFGLVFQRKRKEGRFYPTRLALNVTSKEAAATASVAMDEEATQDCGYIVVETNYRVYAYTDSPLQVAVLGLFTELLYRFPNLVVGVLTRDSVRQALRGGITAEQIVSYLEQYAHPNMRMVESAIHSKSCLPPTVVDQIKLWELERNRFTYTEGVLYNQFLSHTDFVTLRDYAQSIHMLVWQNERTRTMVVQKNGHDDVKRYWKKYSKSGV

SEQ ID NO: 17104 - DNA, 25656 bp, DROSOPHILA
actaccacatcgagtgcggaatactgtcaaacgatgcccaaatagtcacgggctccagtgatggagacgcctttgtttacgacctgctcgatgggaaagtactgcagcgcattcgcataagtaagcaagtgaagttgaactttgattattagctatatacatatattaacatgtgggtttcctttgtcatatatccgtcaggtgataatggcggcgtcgtccactccttagccactcatcccaagcgacaggaaatgcttttcgccagacgacgggacatgtatgtcttctcgacagatttgcaaatcgaagaggagcaattataggtactcataatgctgtatagttttaccaaaagctagtgatataaataatatagttataaaatataaagactccttcaggagcccacctcatcaaaatacccgcaaacataaaaaattgattgttttgttgagggaaaaaggaaaaaccatttatttgacataattttttgttttcatagagcatgaatgtatgtagtaatatgtgtttgttttcgtatgatctggcttatatattcttcacgattcttttcctttaactatgaacggcctgcataatgtttccttaatcaaatatttcgaatgcggacgagcggcgagcaggcgagcaggcgtggttgacacaatgtagctgccttgcatgcattggctgtatccttcatcattctcatagtctctctccttgtgggaaaatgcggtacgcctagccgcggggcagcgctgagcgaagaagagtttcttcaattcaaatccgggtctcaacagtggcgtccgagcagggacacttggtgtcctagctggcagctatgagacgtgttgaacaaagtcaagaagaaactgaaattgcacagcgcagacgcagcttggcgaaggcagacagctgcagcattgacctctagctcaaacgtgcgcattcttttgttgaaaggtaaaggaggatggggaggggagaggaggggggaaatgggatcgagggactcctggttaaactctctgaacctgtcgtacttatgttactaaagcatattaaatatgtatgcaaagtatttgtttatggtagtttagtagtaatattatgtaatgttccgttacttatgttcgtatgtacgctgcatgtattatttatatatgttgtggtaggtatgcgtaatttgtatataatttatattaatatatatatatatatatatttatataatagtttatataataaacgatcttgctttttattttgttttcgttttgcatttttttatctcttcctttagaatgttttaatttttatgtttttatgttcgttttttgtttttttttttgttttgttttgttttgttttcttgctttgtttaatgtttaccacctacgctcatcactcgcttacataattagacttaaaatttttttacacaaatatatcaacaaaaactcaataagttccattcaaaagtatataatgtacgcctatgaacgttaaaattaaagatacgaaaaaataatttaaaaaaaggtaaaaattaatgcgatggtttttatagagttcaaggaatcatcaattaaacatgcttaaacaatttcggcatctcgttcaacgttcaaatttttagtttttcgcgcttttccaatgcttttccatgcaattcaaaagaattaaccaaacaaaattcataaattgtatgtctatttgcgttcttttttgtttcttttgtactctgttttgtttcggtttcgtttttttttgtcgttatgctgtttcttgcctgctgctctattatgttgttcaaaatcaattgctcatttgtatttttacgtttccttagttaattctagtttcttaaccaataaatgaacaaatggtatttgtattttactctttgcatttaattacagtggctgtatgtatgtatgtattgtggtttgttggcgattgaagcttggaaaaggaggtcctggtttagttcgaactgaaatcataattatcccaaaaatacaaaatttgtttaggtctgcttggtattatcatactttctttgttgtttgtttcgttaaactcttactaatttacattcttttgcctctgcctctgtttggtaacagtctctttaacatttctgtggctgctgctgctgatgatgctactagttttactgcttacaataaggttactattcttactgttactgttgctgttactgttacgttgccggggggaggcagcaaaatgattttgcttagtaaattgttgttgagtggttgcggttgctttcgtcggtgtggatgttgtgtcctggcgagcgcctttaatactagcccgtgctccagttacagctcctgccccacgctgggcgccacatcttcctcctgcttttactccagctccattattgcccgatcccgctcccgatttggggccattgaatcaggacgacggcaactgcttggccactatcacgcccggtcggcactgcttcaacgatgtggtgatggtcagctgctgggcaccaccgctgccattgcttccagtgattatggtgcccgtcgatgagcccgctggtaaatgactgccgtttccatgaccgcccgttgtttgcaccttgaagatcgccgtcggcgtaaccgctgtactgctggtgctcgtggagaccaaaccgccggaatccttggccgtcttggccgtaatgatcacctgcttgttgccgccgctcttgagttgaaggaagggtcgaagctccgccagcgccgcatgctgcttgcccgtggtggtgagggccagcggcgcatcctgcgccagacgatggtgttgcagctgctggtggtgaactccagacatttggtggtgatgctgctggagattctgctgctggccaaacttttcttggcccccactgccgtccgcgaataggtgatcgccctccagatgcctgatggcctggacaatggtctctagattctggcgatgagaatgctgatagtgtggtgcggtctgcatcgatggcagatcgtgcttctccgtcttgaccttgacaatcttctcgtggatgcgttccacctccaccttgggcgtggccttgatggccgcctgcagaattggctgaagcatcgcagcactcgacgtgcatccttcggcataggctttggcaattgcgttcacgttcacttcgttctcggactctgtggagctgttcgatgacaggatgacctcctcgtgcacctgatcctcggttatgatctcggcagcggcatcggcctccagctcctcgatgctggagcacacgaccacctgctgctggccagtcatttcatcgatttccacatacgagacagtgccgccaagttcctccaaatcctcgctgcgcacaaagttatcggtgtgctcgatgacctcacgtggaatgtaggcgccactactgccgccggatgcggcggccacagctgttccgggcggtgcggttgccacgctgtacagctgccgcttgatcatctggagctcatcctcgaggagtcgccgcagactgcgctccttctccaactgcttcttcgactcatgcagctccttggccgccagaagagtagcagcattgctcagtttggtggccgccgctccgccggctgtcagcagagtcatcggctctggagacatcgatcccagaccttcgtcggaactgtcactaatcgcctggatgttaatcacgttatcagtcagcttccgtttcttgatggccaccgccgtggaattgcccccgctggcattggaatcattgtagtttccgccggagttggtaccaccaccatcgccagaaccgccggcctcgtgctcgcccacctgtcgcttcagttcactgttctgcgtcagcagctgcgtcttctggttctccagttccacaatgtattggaaggtctgttgtaggatggccgcctggaaagaataaggacgaaaggattaaaaaccatgcttaagatgtacatatgtgaaagttttatgcaagcaacggttccatttcagctcttttcttttttttgtttcactttttttaattaaattaaaatattcatcattttatcagattttgtgtatggatatcacacaaatatggtcattaagttggacaagttattaacccttaaatcaaccctcccattcttttcgctccacaataaaagtcattgagaagaagacaaatgcatagagaatctgcatttgcgtgtgggaaagaggagaaaatgaaggaatcacaagagaggaggaggacgaaggcgcaacataattgccgagagcagacttaattgcaagcacacacaacacaaacataaatggactgactttttgcttttgcattttcccttgactcttcgtgtttgcctctttgcaatgtttatagtaaacagtgtagtaaagctggaaacaacaagcctgccttataaaagggttaaggaactggtgtccttcgaaattcgcgcgctcttccaatcacgctttgtgcaacactggccagcaaaaaagcgtgggaagtaaaagtagtgaggaaaaaagaggagaaatgagtatcgatgatgcgaattcaaccaagccggttgtctaaaagcacaaatggctcaaaatacgcaacaattggctaaatcttgactgtaattttttattgcatttgatttctacgcaagtagatacccaggtgaaatgaattaatataaaacattttccccaagaaccacaaatatcattaacatttccattataatagcacaaaatttgttagacaaaaaaagaaaaacataaatcccaaattttttcagtttacttttttacaaatgcaatactcatggcaaaggaatgcctttgcattcttcagactttgattaaaaaaccataaatctctgctttaatgcagttctttttttttctgttgttgttgttgcttaaaacttgtttcgatttcggtttgttgtcggaggtcactactaaaaagcaataataacaactaaaagatggccaagccaaacaacaacaataacaacaacattggtctgccggcatcgcacagctgctctcgctctctctctctctcttgtcgttctctcaccgtatctgtgggggctccacagtaattgcacaccatctgtgcagttgctgttgttgttgttattactccacttcagagagacgagcgacggagagagcatgttgtgtacagttttctcgggtttattattgttgtttccagtagtagtagtacccaagcgattttcaatcttacactccccatcccgccatatctttcgatatctatttctatcgccagacggcggcattgcaatgtcgtgcgcatatcttataagaagaaataaacagcagccagcggcaacggcgagaataaatcacacagcatatttaagttttctagctgggttttttgttattgcacacaaaggtcgttcattgacttgtctattggaaatcgttgcaggcatgggaactattggaaagataagaagcagcagtagatgttgccgctttgtctgataagcccttttcctttcaaataaagacaaagcggtcgtatggggcgaaatattaatgaatagtatgtaacaattatttgtttataacaacattttaaatacttcgacattttagttatctctggttaagaaaactgcagcataagaaacttttccaaaggactcaaaataaaccactccttaattttgccaatataaataaaaacattttactttctcatttgatttgaaaaaatgtataactgtaattgaaatatatttttcttttcataagttacaaacaaaacaccattttattctttgtttgtttcttgatttgcatttattcgctgagaagaatctttcaaatgcacttgttctttgatccgattggaataatcatatgctctatatggtctttttacccattcccgcgtcatatggttctctatacccctcccactctctcacaatcgcttttactagccggcaagttgaggccttggctaataagaaaatgtcgttgccttctcaattatagttgttttgctgggggaaaaaataatgccggcatgaaaaatccaccaccgtttatatcagtgtgtgtaaacaaaaggcaaagtcaaaagcaaaaccacataaacaaagcaaagaaaacagcggaccgaaaaaaaagacgatcaaactggcgggtccaacaagaatccaattcagagcgaacacaagccaaccaacaaagcgacaatacacaacagacggccgcttttgcggtgactgtacttttttccaacaagaagccagcaacagttccaatacgaaaagtttttcaatattcgccggcgtcgtcgtcgtcacaaatgttgctagagagagtcgctctcttgctctgactctcccactctcctcttcttcgacagttaggggtaattgtataatgttagagcaagacggctatggtcttcgttgggtttctgtattcgtttcattttcggtcgttccgtgaaacggaaaccagacgtagcgaaaaacatgtgggcccaagcttttgcatcagcggcctctcccacgtgctctctctctctctctctcaagctttccagctattcccggttggatgttgtgctccctctctttttgacagctgacttctataaatggcgcgtctgtttctggccctcttgttgttcttgctttcgacggcatattgttgttgttgctagcacaccctacaacttgcactacaatttcgttgattgaataaaaggaaatgcataaaaatagcaaatacgccgccggcacgagagagaattcgtcatcagctgagctggcactcgaaagcggcctacgctttcgtattggtgcatatctgtgtgtggggcgtagcggtaaatacaataaaaatgaataaaaagataatttacaaaacaagtactgatttcacagttattttatttagaatatctaaataatttatacgaaaacatctttaaaaaccttagataaacagctctacaatataaacgattttaagacttcataccttatacttcgttttgttgatatccgacagtgttttgtgggcgcgatttcgaaaggaaaagaacggggaccacccaaagaaaacagccggaaaacaatgcttcgctgtcccattcggtttgatttttgatgcgagattgtagcgcaaccaccaaaaatgcaccagcaccccactttttcaacctctccctcatttttgttatatttcttttttttggtggactacgtgcgtgcacgcatgtttcctaagcgcggtgcttttctcttggtaaaatgcggttaaaacgaaaaacaaccagggaaaatgaatttatttttactacttcggtgtgtggcccaattcaaaaacaaacaaaatggcaaaaccgaacgttgggattctatctttttgagtccaaatatttgtaagcaataaaactaggtactattgataaccgtttatttctcggaatcggaaattcctacttcttccacaaaacaaatgaagttttatcttttgaaaacagtaaacaaacccaacaaaaaaaatttgtctagtgtattttaatgtacatacataatcttacatacatacatgcgtacatatatcgatgcacagaacaaatggcaaaacttttagacaggtttaaaactcagttttgtacccctttcttttaaaaaacgaactctttcccatttgctcctgatattattgtttattcccattatctgccatctgccggttgattttttgtttgctttctgttcaactgcgtcgcacgtcagcgaaaagaaacaattaacgtagcgttctcgcttatctttcgactcttcacctgcagatgatggcaggtgtgtgtggagcgccacgaaaatgagaagtgaaacaaagcaagtcagctgacattaatttttgtgcaaatttttggctgagctctgtggccacgccaaagtagaagatagcagaaatcgtgtgttcgggtgcaccgaaaaaaatttcagttcaaatacttgacataaatgaaatttgaaaaacattatgctaagctatgaaatcaacaactatttatgcatatattcacttgttgtttccgtttatttcctgaatatattttaaggatcgctatgatgaactattaaacacgatttcgtatttattagtaacggcagcctgctaaaattagcatccaaatatttttgatcataacggaacctgagacgaattgcacgagccataaaatcgccgctagagaattgttgtttttctttgttgcaaaaaatgtgtgagcgtaaaaataggcaaaaacagctgcgacttctaccggctttactcgaaattacacacacacatttgcactagagatacggtttatagaatgagagctatagctcacacgctcgcgcacacccacaacctcacccacagatattggaggtctttcttcggttcagtcgcactcgcttctacgcccactctcgcgttctcgttctctcccgctcccactcactcagctgcttttgctgggcgccaaacatgtgttcccacatgtacacgctacgtcaaaatacgtgtgtgtgttggtgtgtgtgtgtggagtcccagaagagaattttggggtgacaacatcgcgttttttgcggtcaaatcaaatgcaacaaaatcgaggctatttttaaacacccacatgtatattccccccttcactccccaaattttcagtgaaaactggggaaatctgtagctgggagaatggggaataaaaggaatgccgtcatcgaaaatggcaaaatgcgaaaaataaagggcgtatgattcatttaagaaaaatattaataatatttaatggattaaaacgcactacaaatattaatatttaaatacggttttgctagcttcttaaaatagttcatacgataccaactgaatacaacatacccttttacatatatacatgtacacatacgtatatgtatgtatgaggatctgtgggaaaataaaaagaaagatttccgtagagactggggcgaggtcatttgggaacactttcacacacccacaagctgaaaacagctgtgtaccattttgatatgcacagacaccgaaatccgtatgggatttgatgtttgctaatttattaagcattttaagcaaatttttagcgagttgcgagcggctgttaaatttgcatatgtatgaacaaaatataaaagcattatttccttttcacgctaacccaattaaattgaaacacgtgcgttggatgagctcacacagctatgtgctttgtaccccagtcatatgtacagtatatctatgtatttatatgtgcctcaagttaatccaaggcaaaagtcataaaaaacagccattaaagaaagccaaagtagcgtggcaattgaaaaagtaacgtcagtagtaacgagccaaagcatgcagtaatagcaacttgctaagactatcggttacaaaatgcaaagattgatgagcatattcttcagttactttattttttaaggatcattaataggaattattggttttacattataaaattatcaatacatttgcaataccaatcatcaagttttctttcacacatcagtgttgttcacaacactgatctctaatctgagctttaataccataacgcacccactgtaacgatggctatgcaactttagagacttcgtcatcattcagcaatgtaaatttaattatatattttcactggcagcgccagcttgctgttgttgctatttgggttaattaaaacagctgtcttgggtaaacaacacagcacgagcccgttgataaaaataaatacaatgccgctggcgtcgtcgttcgcttgccgcgtttactttattttatagacgtgaaattcgatcagctgatttgtgtgtgagggtcagctgcctctcattttcgtgcatcttgttgtattatttacgtacatacatacatatattacttgaaatttaacaacattcttctcgccctttctctttctccggctaacttaattcaaaactctttcaacacactttcagtcattttcgcgtgcttgtgtgtctagccttttttttatgttaattaaatgctttcattgaccatgagctttgtttagccggtagcaacaaacaaaaaaagaaaaactatgaacctcgtggcatgtcgtggctttaccccattggcattctttgggttaagcgttttattgacctttggtggaattcaaatttgtctcattgttaatggtgcgtaagttttgcttcgagtgcaagtgataaaaaaaagtcgaatatttcgtttgaatgcgtttatcttttaatcttaaaaatctatcgatcaatgtcttcttttactagattgtattatcatgcactccgaatataaaaataatatataatatcgatttttttttgctaagctatacatttttctttgtgaccagagcttgcgacgcaattgggaaagctgagctcttgggaaccgagcttttctgccggtcagcttggctctaaccttgttttctcgctgtgtttgttgcttttgcttgaccagctgagtcgcgcttacacgtgattgcacttgtgtgcgtgaaattgcgcagcaaaaatgccggttggcttttgtttttgtttggcttttttgttgtgtctcgtactcagatttttgtgttatttattattttgcgatttctacagatatttatcgtgatttcacagctgtttgctgactcattcgagtatggaaattgaaaattttaatttaaaatacagtccctgtttaataacctaaattagggtctatagtgaataaatgatctttaagacaaaatatgaaaactttatacttagtaaatttctatgtacacgatcttttgcattcgcatggaaaagatacaaacctattgttgaagtctccgtaagaaatcgctttaaatgatgagcaataattcaatacaaacggaacttacatagacatacactgacagaaaagcggtcgacattgtaatgacgaccgtctgcgatcttggctcggtcattgatgaaaaaacaccgttacgatgcaacaaagtcattaaatccggcgagacggcattccatataatcaacacaaaaaaaaaaaatcgccagacggagaaggaaagagcgagatggaggcagaccaacgaccgaccgacatttttgcaaactcacacacaccatctactatcgcctatctccatctcgctctgtctgcccacaaagtaattgatccattgcacttatgctttttttgcttaagcttttggctaggctgttgcttttgtcactgctttctctttgccgatgcattcttctgagaaagtctcgagtgccgctatcgataacttatcgtcctggctaccgattagattaatcctaatttgtaatcggttcatctgcatagtgcgtttttaatgcacatttaatatttacaagcgctctcaataactttatttagatatatttgtgttaacaacttaataaacattttggcaatcgatatcaggatctattttccttcctagcgcctggtttaatttggcaaaagcgcggtttttaattaaattaacccactgaagcttaaaaataattcgaattacaaacagcgtgacttcactaattgcattttgtggctgctgctacatgcgagtactttacacctgattttcttatgcatttgtgcgtggcgtagtagtgcacgcatttttactacgaagtgcaattgaaagtacaggctatacacagtgcgctatgtaaatggggttatataactcgttatatagcacatatgtgctccatctacatatgtacttgcttttcagcaaactgggtgttggcgtggcccagaagttgtcgtcgcatccaaatctctagctgcaatcccgctttttgcctccatctgcaaaaggttgcgagatgccaatggcctagtgcactgcaacagcagcacccaacgacctccgcccaccgcccccagtgccacgcccctgagtccaaaaaatacaagggccatcagggctcaaaaggaaaacggattttgccgggccaacagtgccaatgcgcagctgccaagctgaagtccattttcatatgaagagggttacttttgggtggttctaccacccaccgttccattcggagtcgtcatcggctgtgaaacagctgcctaccaggcgccagacagacgccaacaactctggaaatgaaatggcaatgaaacactcttgggaatcataaacctcccggaaaaatgtaaccacccccacacacacacatgcaaaactttccacagctgagcgagtggtgtgggctcccatcagcagaaggcgaccaaaatgttggcgccatcgtcctatcccatcttcctgtcctttatccccaccgttcgttcccatgctatcatcagcaaccaaccttagagttccccaacttttttcgggggtaacttttgcgtttggcgcgcgtttttcttcgtcggccactggaaaaggaatcgatattgtattgtatatagaaaattttacagttttctctctgctcgctgtctgggcaaggtgtgtactgtgtacagtgaacacccccacccaccgtaatgtaggttagttcagctggggcgcgcctaaatcttcacacgctgcgaaatattgaaagtgctgttcaaatcaaatttaagaacagtttaaatttgagacattccacattaatttcacagaaggatatcgaaaccatggactatatttaagcacacgcaaagcacatcttttcaatatatttttattttttattccattattggacaccgcccaccggtgtagtacatttagaatttttttataatttgtgtaagtaaactttgcgcttttctctgtgtatttcgaatagtcacaaaaacaacaatgggggcaactgtacgcaattgcacatttgcacttcagcgccacctagcgagcaagttcattgacctgccaaatagtgggcgagaagagtgcgaagtggcgagtgcaaaagagaggagagcgcaagtaaatcacagacttgcacacacatttccattcctcagcctgctttatgccacccaccttagggcgtggctgtatatatatatatatatatatatatatatatatatatatatatatatatatttatatgtatgtgcattggtgtttggatatgtctctgacgtgcaccgttatgtgcgtgtgcctaactgtgaatggtttcagtcgtcgcagctttctgtcagccaacctcggcctgcattgcaatttcatttcgcacttttgtcagtcgcatatgcaccctgcatgtgtgttggagcaatgacgtacataagtatgtgggcatgtatgtatgtatatgtgcgtaaggtctgctttcattatatttcaggtgccctagtctttctttttagtcaaacgagtaacttatctactttctaagtgtgttcaatttgtgtcatctagtaaaagcacaactattactagcatacaaaatattagcaataacagacagttaataaactgtaatattaccaatactattaccaaccgtcttctaactcccttttaaattataatatttttcaaatattttctaaatattgagtttaaacaatgcaagcattttaagaacctgctttagtggcagatatgtatgtattttaatagaactgaacatgttatatagccggcactataagggcttaaacgtttatatagcgggtgtaaacttggtcaagctgtcagaggttcctccttcgttacgtgctctctcccactctctctctcaaaagagcttgtgcatatccccatctcttttactgggcataggctcttctctttcacacgtatttactacaatgtttactatgtgtgacaggcgttgtggtaccgtttgtaatcgtcgacgttgacgaagtgcatagaacaaaaatccataaactacttgcactagtcctacccctttccctactttctccttgtttcttcctttctcgctgcttccctgtctacgcccattatgtcattcatcaggctacgtcgttgttgttgttgttgtttatgccctttcgtttttgcatgtggtagtattttttttttaatatttacgcgcttttcttcctgtttgcatttctctctttttgctgtcgcttcgttccgcgtttgtttatgcggagtcttgttgcatcgcctttcttttttgggccaaatactgatttatggggcttggcagtttcagttgacacttttcaatttgcaataaataagcaggtcataccgaaatcctcaaaacagggaaactactcaaacggcacataaagaagtagtgctggataatggtctaaaaattcggtgttgcataggtgctttgactggtaatttagaatcagagtaggaacgagaatataaattcattttaacgattctgactaaatttttaagcataagttttcttaaatacattttagttttattattacgattattgttttttttaatttgcatcacatttagacactgtgatttgatttgtacttgcaacagtatttttgtctagcaacagacacataatttaaaaaagaaataactgtcttgctctggccatttcggtgatttacgaccgtctgccatttaatcgtaccacaatttgaggtggaagtccttgggaaaaaaatctgcaagtacttatatagtcttctacgcaaaatgcttttcaggattggctaatatcatccctcacttaaaaggccgttcgttccaccggccttttgcgaaacacgcgtcacaacaaatcgatgtcgtctcaaggtgaaaatcccataaatatgagaacatgtgtatgccaacataagaaaaagaaaagctgagcaaaatatatatgcggcggcgtaaaaagaaaaagcgaaacgcctccaacgacaaacaatcgagacgacgacgccaacacggttgccctgacgactaaatgtcgaaaagggaccttcaaagctttagtccccacattttacgccccctccccataaacccatttccatctccattcacgttttatgccatagctggaagctttcagcaagtggcatgtgtgtttgctttccgtatgcgcctttttctttcgccaggagacgtcggcaatttgtcaacatgtgtttgtggacggccctgtaattgaggtccagtccaaaacgattcgggttggggctctggttaaatgtaattggagttgcgtgtcacggcttaaacgaataaaccagaaaaaactagaaggtacaggtgcggtggaggaggccgctgcatctcagcccaaaaatggtgttgatgtcgagatgatgctgattcgcttttgcttgacgagcaatccagaaaacacgtcaaccaatcgagaactgaccatgggcaataattttcactacttaaccctgcggacacacttgcaatgagatcatttaaatggaatggggctaatcaagactaataaccaattctatatagttttaaaatgagaaaaaaccttcttggcgcaattatagtcattagttttagggtttagtatgaaaacattaataaacacgctactttgccagctgagtatacaataaattgtataatcctccggtttacgatttgttcgaacttctctctctttcaaaaaaaaaaggtatatttcgaaatcggagaccaatgcttgtcagactggaatggatagtaacttaccttgctcaacttctcgccttcgtgtctcgggagcagggatcgcagactctggaatccggcattgatgctctgcatgcgtctgcgctcgttgctgttggcgatttcccgacgcattcgcttctcgctgtccacaaggggctttcccgaaccgtctccatcgctcaaggccccgctgccccctcctcctccacccttggaggtattcgtaccgctcatgctcgactgtcgacgctgagaaccctgatgagctgactcgctggcgaactcgatgtgatagttctcaccccctgaatcctctagttgcaatctggaaaatgataaaatgggttaacagtgagtcatgtggtggggctggttaacgaataaagaatgcataaatattggtggagtctcatatcctcctcagagaaatgataaatccaaacatatttatattctggagtatttttaattcctctgttctagatataccgattaactaattgggtaaatcacagaaatatttggttttactagggactgtagcctacagtcaggcttaggaccatttataatacattacatttgtgcacaattctttgaggtattatttacggtcctatttatggctcaacattaaaactagccgtgcataaaaccaattaatttttacatcatacaatccacacacaacactcacgcaaagtcacgttgccgctcaccaaagcgctgaaaaattcattcattcataaatttacaattccattcaattcaattttagttttaaccgccaacgctgcacaacaatcacaactacaaagagcccacaaatacactcacacacagtcactagtctgttgttgtcacgttagcatcatggcagagcaaaagttggaggtactatgtttcattaacaccttaacttgcactgattatttacataattttgaaaaccaaaataagcttactttaaacttttcatcaatattttaggccttttattattgcatatttcgaaaatgcatatatagtacaaattatttttaaagaataaaaacaaaatgcatttctatgctcaaactgacgggcatttttcagttagtacatcataacctcaacatcaacttcaaggaatatacttttagattcttgtagattttgttgaaacgatgcaccacaaacactttattgtagggtatcgactactgcaccacccatataacagagcgagagggaggcagttagagaaagagagcgatggcacagctgtcaatagtatgggcattccactttttgttattgttgccaccatcgccgccgccggtcgtcgtgattgttgttttctgctttctgttttgtcggttcgatttggttcgcttcggtttgctttggacctccgtttcgtgttatttcgcagctcttcttcttgctcttttccttagcgctatgctgcagcatagcatagtagtaccaaagacactagaataacaagatgcgtaacggccatacattggtttggcactatgcagccacttttttggtgacggccaaaattactctctttcggctcactcccgctgagagcgtaagaaatctaaaaatataatttgcttgcttgtgtgagtaaaaacaagagacgagaacgcgtataagtgtgcgtgttgtgctagaagacgattttcgggccgaaatcaattctgatcgaagaaacgaatttacatggtacatattagggtagtttttgccaatttcctagcaatatgataaaataaaaaaatttttaaaaattcagcgccctgaatattataattttaaagcttttttaaatttgtttgttaaaatcgccgctcgaattagctaccgtttacacatttatatttatgtttaattctaatttgtctctcatctgacaattttttaaaagcgaaatattttttttgaaacacttttaatgttaatgttacatcatattaagtcaaatgatttaataaatatactaaataagtaaatatgaataactgtttattgcaaaagtaatatcaaagacactagaattattctagtgtctttagctttgttcatatcttgaggcacgaagtgcggacacaagcactcaacaattattgccttattaatttttcacacgccgcaagatgaatactctaatgacaaatattcttatataaagtcatttttgaaatttatttttgtgataatatgtacatagatttggctatttctaatctattttcaaataataataacgttaaggcaatgcaaaacaagaatttttcgcatggtgccaattgatcaaaaataatatagattgaaagtctaagaacttctgaggtgaagggcatattttgtcaaatttacaatgcatgagcatacgtgtgcacacatacagttgtctgctatcactttgtgcgttgaaaagagctgttcgctgtagcgctcttcgctctctcgctctctaacaaaaattcgagagagcctggagccacctctagagccacggccaaaaaatcgtgtgccaaaaaatcgtatggcgttacgcatcttgttattctagggtctttggtagtaccaaagacgcgagatcccaagaatgccgaaccggttttaccctacgaaaaagagcaaacacgttttccacaggccacagactttggctgctcgtgctgctgcaggctaatgaaaacaattttcacaatggcatgctcaccgagaaagaacaacaaagacacaggtacacggagcgggggcggggggtggtatgtaaaagttgcaacaccacattccacggggaaacaacagaacaacaaccaacgctctcttccaagacgatgctagaaaatacagtcccacctctctaactcgaacattaccagggatttttctaaaatccatagaatcatttatatttttgggaaatgaagattgaacgtctatggtatagcataaaccatctatggcattgatggtataaaactcattgactattatgattatattggataaaataaaatcaatggtctgaaaatttatatgatataagaaactacaacttaaaactaagagtatatagttttaaactaaatcttatcctattcccaaccttgcaggttctgcaagcaaagttcggtacacttttgaaaaccggatggcaagaagcgttagttatagaagcctgactgtattagagacatggtctcgttggctgggtttatttttagcaacaacatctccaaaggtcgttcttctccgtcagcatttctgcggcaagtgcgccaaagagagggtttggggggcaatcaaaggagaggggagggggtggatgcctccaaagttggtcaactgctgcagcaggcggatgtggatattgtggcagccagaaaagcagagatgcagcaaggctccaatgactgcgatgctgctgcaaaaggccaaaggaatgtggttcggatctcggatctgcgcacttggctgctgttagccatttcgttcgtgtttgtttggacaacaaaggccgaaaaacgctgaatgaaaccgcgcggggaatgttgttgcatgctgcatgtggtggcacaacatctgttgttgtttttgatgctacacacatattttgggcattttatgagggctatactgattattgcaacaatgcacataaacggtggaaaaaatgcgataaataaaggaaagttctaagcagtttttacgaaaactttccttttcatgtgcgcagtttttgcctttaaagaagttaatataaatgattaaactagttagaaattttagttataaacttgaaaacttataattcagtgatttcttagcaatacaactcagttacatttctttaaggaaatattgactagacaaatctagaacctgcgatttcctatgtgctcttgaatcggatctaatttggaactctttcttgcaacatgccccacttgaggcgttgcaacagctgtttggatccgaatggttgcctttattacagatgcaactggggataatgtggccgtttcaacagcaatcacgcattttcgaggtgcaaacaaatcggtaaatataaaaataataacaacatatgatagtggacagctgacggcgctgcagcagcgctgcttttagccagggttcaatgtagttcattggccacttttcgccagcaagtacatagagagaaaagcgcagagatacgaacgataaacagacagagagacaaaagccgaagtcacgagtgctggctgccacctagccactcaccaccacccactccgacccgccgcctcttcagctgctgctgttgttgcactttgcacataaattgtacatacgtttattgggtcactgcttacgtcatcatttcactggaatttcgtcgtattgctgcagttgcagcaggtgaagataacggatgtaggaatgaaaatggggatgtagaagccccaggagcattgggaataaaagggaaatcccctattattaccgcggatatttatttttttatttttataataacatttactcgatatctacaagttagagatacctaaaaaaaaaaagatccagaagcgcaaacaaaaatcgagtaaagatatcgaaaaggatctggacaaacagctgaaaactatggaatgaaattgtcatttcttattactcctcagattgtattgtatttttgggctaatggatgaattgtaaagataaagataattgagatttataacttttaagaaagccttgaatccttatggttaccgagataaaaaaaactagtcacgtccgtcgtatttaaaaatagcaaggggaaatcccgctttcgaccttattgttggtgaaaatcgggacagccttacgaaactgacggtgaatgcgaggcaaaaatgaaatgcaacgcaataaggttcgcgccgcttgcgtaatttgtgcaacaatgtacaggcgcataaactaatgaacaaatagaattcgcatttccccgtttccccccggcgactactctttctacagttgcgcttgccagttggcgccgcatttcccataaaaatataaacaaattaacgcaaaaaaaaaaaaaaaatatacgtgtatgtataaagtggccgaatacggaaaatcacaaagcttaacgccgaaaagaaattctacaccagctgtgtgttttctaatgaaatctagagaaatgctgatactatagccaagtgtgtttacatttgggcggtaatttaagaggtctgagaaaattgatataaatatggtgaagtggagattttttaaagcttctgttattttaaagtccagtatatatacaatttgtaaatatgatcatcttactgcaaccatatatgataacggttttttgtaaactatggtgtaatagtagtttttcgcactcctttgccttcctctcttcgccatgccccaaaaactgttgtacacaaaaatcatgtgtttttcataaacaagccgtagcgctccatctcccttgcacacaccctagttcgccctctcttttgctcgcaggttgccaataaatgccgcatgggaaaaagcaaaaaaaaaaaaaaaaaagcggtgtggaaatgaaacgaaaacaagcgaaacgttttggcatacggaacgaaacacacagagccatcgcccaaaaatttgcgcagcagattttaagccatgtgttggtattagttttcatttcatttcggtttttttttcgcaaatttgcagtgggtttacggccttagcttttgtgtatatgttttttcaatgaaacgtgtgtggtagtaaaaaatgtgtgtgtggcggcatctgtacttttgcgcgctcttctctctcccactgtcgcgctcaacaagcttttggctttgagtgcaactcaaatggggctctctttctctcccgctgcttatgtacttcgatcaactggggagcggctcttataaaactgcagtgagagcgagacggaaaaagaaagagttgaggacgctctgtttcactctcgcactctctgctcctcttttccagtcgagtggggtaaaaacggaaatgacgccacacaaacagaaccgtgccaacaacaatagcagccacaacacatgctttcgtagtattcgcaaatgtgcaacggatggaattgagagagggagagagagagaaagatagaggtggagacttttagccaaggcacgctcttttattttagcaccaacaacaaacagacagcagctgctaaaacgcagttgttataccgtccacactggtggcaaaaataaccgtgccaccttcgaagttttaacggttatctatctattctgcaattgattggtttaaaatagaaatgtagccttgaagttttgtgaacagctttttagattttcataaaatataatcgtattttaattacgtctactggtttaacttaatgtatgcataacaattggttttatttgtatttgaatagtccctatacgtgcgtttacgaaatgcttgtattttcctaccaactatttcgaaatactaaatagatccataaaacacagaggaagtactggttttaatgcagcagcaaaaacatgtggcattttgccgagtttaaaatatttatttacccggtatatacgcaagctgaaataaaagtcttgaaaagccagctgaaacggattagtataagtgtgcaatcgcatacatatgtatatatttccgattctcttcggcgttgtgcaaaaacatatgctcgtgcgataagaaaaggcgccgcttatgacgtgtgaaaagcgaaaagcgctaccatatgattctgataagccggcaagggaaaaagaaactttcgctctgaaaacctgtgacatatttgcgaaaggaaaacgatcgaaagaaaagtaagagggaaaataagaaattaaaataatacatttatttcttagtcaacttattttcgacatttctcggtacactcattccttgagtacacagagagaaaaatggagccccatttatctgaaaggaatattagagatacatatctaaatcgatgtggataatggtaagaaaatgaactcgtattgtgtcatttctttcaaattgttaattaaactcagcaaactgatctttaaattagatccattttgctttcggtgtaaaaagagataagcaaagagagcaaaggaaaagggagaagcatgtaaataaagtcgaagcaaaatcatctgatgatacgaatttaccggtacagctgatttcatttcaactatgaacgcgaaagaagaaatagaaatgttgattaggcaacgcacgataagcgaggaggcgagaaagagagagggagtgcgggtgcgcagctgttttctacctccattaatttgaacatatgagctagagcaagagcagcagaataggaaagagcctgagaagagagagaggagctgagagcgaaacgcgatcgacgaacacagaaaatagcaaaagcagctgtaacaaattaaaccaaatattttaggaaaaagcaaaatggtgaaaataaaaacatacaaaattatttcaaaagatcgcttaaagtcatttatgtatcatacatatgtatcaaaggtacaaatatttgagaaactaaaaatacacctccataatagtatagaaaaaccaaaaatgtatttttaatattgtggcttctactgaactctacacttctaaagttaaagcaaataaaaaatcatcgtttctaacagctgtacccttgactcatgtttgtgccatcactgttgcccgtctgccgacactgctgacaaattgacaaaacagccgttttacaatatggacgccgaaaggcagagcgtaaaaacagcaacaacacaaacgctggacgagagcggcggaaaaaaagagaggatgttgagaagggggcacagacacgaacgacgagacaaaaaaggagcacatttattccagcaacaagaaaacggcatggaaatggaatggaatgcgacacacgctagcttgcatgtgtgtgagtgagagatgggtcttaatggtggtggtgtttttgtgccgtatttgttttgtcggcaaaacggcggcaaaaagcaaacgagagaattagagagagcgcgagtgatacggtgacggagaaaagggagagcactagcaaagtagtaaaaataatcaataatttgcgtgataaaaatgcaagccaagctgttgactcgccttgtttttatttgaaacaaaagagatttcgattaagatgcaaacttactgcaattcctcatccaattcctcggcgctgttgtattcggcgtgctctagaataacttcctccgttttgatggcaaccggtacggcggacatgtttaatcgtgtttgtgtatttgcttactatcgtggccaaaatgtctgtgccacgtggtttttgttgttgcgctgctactgctgctgcttgacggctacataaacatttgcaatttatttatagcctgttaactttattgtatttcgaacatacacatgcgtcagctggtctcagctgctttttgtatttagcggcaaattgtttgcccgtctcactcacactcgcacacactagcactgcacacacaagagagagagagagagatggggatggagagcgactcttagcgcgtccaaaagttcttcaattcactattctgcactctatgacttttgcgctcttagtgagcatgagatttgcgtattcaaattcgcagatgttttttgttttaatttgccaccgcactggcaccaacacacgcgcgctaatagatttctgtagacggcgaattggctgcactgtacgatttttccgatcggaagatgcgatatccgtccggtccgctacgtgcgttcaattcggcgataaacagcagagtgaccacggctgccaaggaaaaaatcgcacatagggaaatacattgatggcactatcgattacattgatgccactgcgatatttcgtatttttgcgcttcacaacactgaattttcgtttgctaaggcgccacctatctgcttaatgtttatatccaccaatacgccatctgaatgggtaaatttgcaaaaattgaagaccgcgttgtcccaaaaaatttcataactttattaattttaaactaaaactgaactccaaatatttaagtattacaatatttaaacatcgaaataagcgcaatttctacattttctttgtgaatattgtgaattatgttttcgccgctattagccaaccggtattatgaattttctttccgcagcgaaaattcgcccagtattatgaattcgcttttcgccgttaatattcgctgtgtttctgtgagttcgcttttcgccgcttgaattcgctgttcgttaagattggtttcgaatccttttagcaaagactcaacccaaaactgtgcaaacagagtggccagccagcgaaaaaaaattaaaaagattaggtcgcaaaaaaaaccctatcgcctaaaaccattttcataatatttaccgtcgcactgcattaaattatttcatcgaatctccagttaatcggcattttgaagcacaagaagcacttctcgaatcaaccgaaagccggagaatgtaaagatgttaaattacatcaagaggcacgccagtgagttaaagaaattaaagaaatttcgctgctgttttcacccaactccccttccccgtttcttcttcacccctcttcctcttctgttgacaccaattatatttggttttttgttgatttttatttaggccgacgtcgcagcagccaagatgccacggatgccatttgtggccaaatgccagcgtatgatgtggacaccaacgacgttgctggagctggtgatgcagccaacgctcacaaa

SEQ ID NO: 17105 - DNA, 3879 bp, DROSOPHILA
ccgaattgaacgcacgtagcggaccggacggatatcgcatcttccgatcggaaaaatcgtacagtgcagccaattcgccgtctacagaaatctattagcgcgcgtgtgttggtgccagtgcggtggcaaattaaaacaaaaaacatctgcgaatttgaatacgcaaatctcatgctcactaagagcgcaaaagtcatagagtgcagaatagtgaattgaagaacttttggacgcgctaagagtcgctctccatccccatctctctctctctctcttgtgtgtgcagtgctagtgtgtgcgagtgtgagtgagacgggcaaacaatttgccgctaaatacaaaaagcagctgagaccagctgacgcatgtgtatgttcgaaatacaataaagttaacaggctataaataaattgcaaatgtttatgtagccgtcaagcagcagcagtagcagcgcaacaacaaaaaccacgtggcacagacattttggccacgatagtaagcaaatacacaaacacgattaaacatgtccgccgtaccggttgccatcaaaacggaggaagttattctagagcacgccgaatacaacagcgccgaggaattggatgaggaattgcaattgcaactagaggattcagggggtgagaactatcacatcgagttcgccagcgagtcagctcatcagggttctcagcgtcgacagtcgagcatgagcggtacgaatacctccaagggtggaggaggagggggcagcggggccttgagcgatggagacggttcgggaaagccccttgtggacagcgagaagcgaatgcgtcgggaaatcgccaacagcaacgagcgcagacgcatgcagagcatcaatgccggattccagagtctgcgatccctgctcccgagacacgaaggcgagaagttgagcaaggcggccatcctacaacagaccttccaatacattgtggaactggagaaccagaagacgcagctgctgacgcagaacagtgaactgaagcgacaggtgggcgagcacgaggccggcggttctggcgatggtggtggtaccaactccggcggaaactacaatgattccaatgccagcgggggcaattccacggcggtggccatcaagaaacggaagctgactgataacgtgattaacatccaggcgattagtgacagttccgacgaaggtctgggatcgatgtctccagagccgatgactctgctgacagccggcggagcggcggccaccaaactgagcaatgctgctactcttctggcggccaaggagctgcatgagtcgaagaagcagttggagaaggagcgcagtctgcggcgactcctcgaggatgagctccagatgatcaagcggcagctgtacagcgtggcaaccgcaccgcccggaacagctgtggccgccgcatccggcggcagtagtggcgcctacattccacgtgaggtcatcgagcacaccgataactttgtgcgcagcgaggatttggaggaacttggcggcactgtctcgtatgtggaaatcgatgaaatgactggccagcagcaggtggtcgtgtgctccagcatcgaggagctggaggccgatgccgctgccgagatcataaccgaggatcaggtgcacgaggaggtcatcctgtcatcgaacagctccacagagtccgagaacgaagtgaacgtgaacgcaattgccaaagcctatgccgaaggatgcacgtcgagtgctgcgatgcttcagccaattctgcaggcggccatcaaggccacgcccaaggtggaggtggaacgcatccacgagaagattgtcaaggtcaagacggagaagcacgatctgccatcgatgcagaccgcaccacactatcagcattctcatcgccagaatctagagaccattgtccaggccatcaggcatctggagggcgatcacctattcgcggacggcagtgggggccaagaaaagtttggccagcagcagaatctccagcagcatcaccaccaaatgtctggagttcaccaccagcagctgcaacaccatcgtctggcgcaggatgcgccgctggccctcaccaccacgggcaagcagcatgcggcgctggcggagcttcgacccttccttcaactcaagagcggcggcaacaagcaggtgatcattacggccaagacggccaaggattccggcggtttggtctccacgagcaccagcagtacagcggttacgccgacggcgatcttcaaggtgcaaacaacgggcggtcatggaaacggcagtcatttaccagcgggctcatcgacgggcaccataatcactggaagcaatggcagcggtggtgcccagcagctgaccatcaccacatcgttgaagcagtgccgaccgggcgtgatagtggccaagcagttgccgtcgtcctgattcaatggccccaaatcgggagcgggatcgggcaataatggagctggagtaaaagcaggaggaagatgtggcgcccagcgtggggcaggagctgtaactggagcacgggctagtattaaaggcgctcgccaggacacaacatccacaccgacgaaagcaaccgcaaccactcaacaacaatttactaagcaaaatcattttgctgcctccccccggcaacgtaacagtaacagcaacagtaacagtaagaatagtaaccttattgtaagcagtaaaactagtagcatcatcagcagcagcagccacagaaatgttaaagagactgttaccaaacagaggcagaggcaaaagaatgtaaattagtaagagtttaacgaaacaaacaacaaagaaagtatgataataccaagcagacctaaacaaattttgtatttttgggataattatgatttcagttcgaactaaaccaggacctccttttccaagcttcaatcgccaacaaaccacaatacatacatacatacagccactgtaattaaatgcaaagagtaaaatacaaataccatttgttcatttattggttaagaaactagaattaactaaggaaacgtaaaaatacaaatgagcaattgattttgaacaacataatagagcagcaggcaagaaacagcataacgacaaaaaaaaacgaaaccgaaacaaaacagagtacaaaagaaacaaaaaagaacgcaaatagacatacaatttatgaattttgtttggttaattcttttgaattgcatggaaaagcattggaaaagcgcgaaaaactaaaaatttgaacgttgaacgagatgccgaaattgtttaagcatgtttaattgatgattccttgaactctataaaaaccatcgcattaatttttacctttttttaaattattttttcgtatctttaattttaacgttcataggcgtacattatatacttttgaatggaacttattgagtttttgttgatatatttgtgtaaaaaaattttaagtctaattatgtaagcgagtgatgagcgtaggtggtaaacattaaacaaagcaagaaaacaaaacaaaacaaaacaaaaaaaaaaacaaaaaacgaacataaaaacataaaaattaaaacattctaaaggaagagataaaaaaatgcaaaacgaaaacaaaataaaaagcaagatcgtttattatataaactattatataaatatatatatatatatatattaatataaattatatacaaattacgcatacctaccacaacatatataaataatacatgcagcgtacatacgaacataagtaacggaacattacataatattactactaaactaccataaacaaatactttgcatacatatttaatatgctttagtaacataagtacgacaggttcagagagtttaaccaggagtccctcgatcccatttccccc

SEQ ID NO: 17106 - protein, 631 aa, DROSOPHILA
MSAVPVAIKTEEVILEHAEYNSAEELDEELQLQLEDSGGENYHIEFASESAHQGSQRRQSSMSGTNTSKGGGGGGSGALSDGDGSGKPLVDSEKRMRREIANSNERRRMQSINAGFQSLRSLLPRHEGEKLSKAAILQQTFQYIVELENQKTQLLTQNSELKRQVGEHEAGGSGDGGGTNSGGNYNDSNASGGNSTAVAIKKRKLTDNVINIQAISDSSDEGLGSMSPEPMTLLTAGGAAATKLSNAATLLAAKELHESKKQLEKERSLRRLLEDELQMIKRQLYSVATAPPGTAVAAASGGSSGAYIPREVIEHTDNFVRSEDLEELGGTVSYVEIDEMTGQQQVVVCSSIEELEADAAAEIITEDQVHEEVILSSNSSTESENEVNVNAIAKAYAEGCTSSAAMLQPILQAAIKATPKVEVERIHEKIVKVKTEKHDLPSMQTAPHYQHSHRQNLETIVQAIRHLEGDHLFADGSGGQEKFGQQQNLQQHHHQMSGVHHQQLQHHRLAQDAPLALTTTGKQHAALAELRPFLQLKSGGNKQVIITAKTAKDSGGLVSTSTSSTAVTPTAIFKVQTTGGHGNGSHLPAGSSTGTIITGSNGSGGAQQLTITTSLKQCRPGVIVAKQLPSS

SEQ ID NO: 17107 - DNA, 9443 bp, DROSOPHILA
cgtcttcggcgccttttccacgatgacgggcacacggtccggatacttgcgccggatcttgtcgccttcgttgcggcgcttgtcgaacgagtggtccttcttgtactggtagttcatatccatctgggcggactggaatacggttcgaatcgaaacggagcgaaaaatgggttttcgttttggatttggtacgaaggtcttatgtagctgccggcctgagttgctgggaactatgtatgatttatcacctttactgcacagatagctttggcagatagaaaagtgcctgctcttctcggatttgaatgggaaatgggagagggaaaatgtgattgtaatcaggtttagtattcattcctattcatggaaaagtatatctatacctttaaccaatcaggaacatacgaaatttgttggaaattctaaattaaagaagaactacttatatatgagtgccaaatttccctaggggctttcatggtgcttacacacatatttcttgtatcgttttcatgcatcgctccaattaattaatttgaagtatcccattaccgtttaaactgttaattgtaattgtgtccttggaatcgcactacgaatgtgctgtgcaggactcctcgggctagaaactttccattccatacttcactggcgcatttattttatatattttcattgatttaattaaatattttgtaatacgacaaaaactatataaatccctgcagttggcaccgctctatgaacctttttttgcaggccgccccaaggcgacaattggcccaaagacgttacaatcaaggctcccaaggcgctgaccacaagggagctcaacaagtgtatgtgctgggggcgtacaactgcgaaagcttttacctgtaccgaccgcaacggcaacaatgcacgcaacacacgcaaagctggagcagatgtgttgttgggctccgtcgtcgctggctgctcgtcgctcggacagcgctggagctctcattccgccatagctgctggagctgctcggttgttcgcgttcggtgcctcggcagttcagtttgtcgttctacttcacagtactactacttggagcagttcgtgcatcgctggtttccggttgtggcctgggcgtaatcccttgcaacaggtgcacttcagttcggacgaagacaactgcaaaatacctgggatatttacgcttccggtgagcaacatgtccaagaacggaccctttcgattcgttagaaaaaggcgtgtgtgtgaaataatctttcggaaaatccattataattcagagtttatacgctcatgtgatggtcgaaaaaattgttagtcccacgatctctcctttgatgtgttgtgtgtgtttgctgaaaaaccaggccataaagttatcaattttcattttgcccaaaattgattcttgattttagtggcgattagccataaacacgggcaactaatctatgtgtgcctgtgtactgattgtgtgcggcaattgctaattaaactcacgggtgcgaaacaaatcaccaattgtattccacaatccgcaaaagtaatcgccctaatggtgttgctttagctcacctagaaatgtgcagtccagagcccattcgtttgtgagatgatctgagattcgatagaaacgtacggattttgtgatgtggttaccgcatacctgctaataagtccatgctaatagacttcaaaaatcagagagatttctttgactggatagatagaaacggccatgcgctttctaaacgcacaaaatacaattttaaaacaaattaaaatgcactttgttggcttggagacacacacacacgagtttttgcggtcagccaactggcaaaagctaatttgatttataaaacaaatgcgtatctgttttctccttttctcgtgaaaagtgcataagaaataacagagcaattaggtaggtaggtaaaaattgaagcttttctggccactgaactagaacattctaatttgatttatatgaacaatattgcgacttgcgcctaataaactcaaactgacttgttttaccatgttgttaatgcggcaattaacaataattcgttaaaaacgacaccataaccgtttttttttagggtccaaatatgagagcattgcgttcactggaccagaatctttggcgttcctcccacttaatcgtgtccgcctggtttaattactccaacttggtgtccgccattcaaaggggaattagttaaatggaatgcaagagtcgtcagagtggatttaatccaattgaacggctgctaactattcggtgttgattcgaaatacaaataatcagccagagctgccaatcaagcgaaatattgtgtaaataattgatttaactcattttcttggctttgtccgatggcccaatgatagattttgtatattcaaatgattttttttctatcattttctaagcaatgtgcgtcacatatttggattttcgtgatgattttttttttgtgtccaactgccattggaaaatcggttgcctattatctgcttcatggccaacgattgccattgaattccggcagaggttcacggtaactttcgcattccgccggaggtcgcccagccgtaggtgctaattaactcggaattctacctttaacggagggccagagttatagccagattgtgcattccgggcgaaagatcgacgccataaagctagctggagcacatgccagaacaaatattggctaattaagaaacatggttgaaacatggcgcacagctgtcggcattctttgaggtttctgataagcggccagaattcaaacagaaatagttgtggttctgggatatgggctatatggggatatatccaccgaaaactgagctcccagccaatctgggtttatggcagcactaattacacaaaactgaatgtttcaattagcgggcgagaactaaaattaagcaataaaacagagaaatgaaattttataggcccccaaaaaaacgtgacccgaaatatttacgcatactggtgtctaaaaataataccatggattaaatatgagctttatgcctgcatatagcatatgttaattaacgaactccattcgatatttgctcaacttctgtttgccagccccttttagccaagtaagtcagtgtcctctcgaccatatttccttgcccatgggcttcactgtaattgcttgcccaagaaatttgctggctgctgttcgcaactgatttcaatttattcgatttgtcgctggcttttgtacggttttgaaaatcaatcaaacacgcgtccgcgcctcacaacgtgaccgtccaattcgcgacatgccaaatatctgcggatcagcagggatggcagtgaattgtttgctcgatgctatttaactttatcatcagcttgatggcttcattagacactcactgaaacggctcctggtcgttcccatttcgttccgcacaggctacggctacaagatgcagacgcgcatccaaaactaattagaagtgtttacggctacggatatttgcagaggaaatgagccgaacattatgtacctaggatcgctggacggaaaagacagtgagagccatggaaaagcacccgagtctgtcccagcggatgggtaccacttaccgtccgaggaagggcctgaagtgtctgtcattcgagttccagtgccgcctgcttctccaccatctgctgctaacgtcgctgagtggccggcatttcgtatacgccactagtgccgtcgggggggcgctgagtgccaacaactgtcacgacatccaccacggattcgatgtctaccccaatctcacggccgtatcgctggctcaatcgacggacacgcccctgaccgcgacgatgccacggtccgcctggaagtgttgttgctggaatgcaagtaatcaagtaagtgactgatagacgcacactttctacttaattctatatgtttaccagctatgccagcggcctccaaagtcaactgcagaacttgaaggttgggtaaacagtgaaactagaaggcagatccgttggctcctgttttagttgagtgtccacagcaactttaagcctttaagttccgaatgtcagttaattgaagtagtcaaacagccaacatggcattttccaccgacgttcattgagttttagttgtgattttgactaaaatgaagttacccactaactttattaataactactaacagccaaagttcaagatcacagaatgtcaaagggtcgccatcgatagcaggtcgttgtaagtgaaaggcctgcgcatttatttttagaattatactaggaaactaggttgaaatatgaggttaacactgctggctatattatttattactttcccaactgcacgactcccacgcacctggataaaaacatattccactatttccgcaggcggaggaggtggagtgccgctgcgagggcgatggactgaatcgcgtaccgcaaaccctgacgctgcccatacagcgtctaactatcgcatcggcggggctgccacgcctacgccacacggggctgaaggtctacggatccacgttgctggatgtgtgagttatattgcgatggatagacatatccaccgacatatccatatcctcattccatgcgtttactaatcgtcctttggcttggcagggccttcaccgactgcctgcagctggaactgatacaggatggcgcttttgctaatttaaccctattgcgaacaatgtaaggcttgattttaagtggcggcttcaagcgaccgaccgactgactgactcacttattaccctttattatcctttcagctacatcaccaacgcacccaagctgactttcctctcgaaggacgtattccttggcatttcggacaccgtggacattatgtgagtccaaatctagctctagatgccccatctgtggggcattcatcatggggccttcgtagggtggcggccaagttaataagcacacacagctgtgtggttttttttttcggccagaagatggggaatatgttgtgtcatcggtaaaaatagcactcaatgcccatctacgcggatttgtgcgcattcctacttcaatatgttgcctaaattgtctgctatgtcgagcattcctcaaaagcattctggctaaaaaaaaaaatgcaatttaatgaacatggtagaaaaatttatttgtccatcatgcagaaataaatattcgatttaattgctctgcgctaacggcaaaatacaaatgtagaactatttactttaaactttattacacaatattttaattaatcctgctgcgggaaggatgtgggtgtgctcatgaagttaacacagtctaacaatagtgtcactttactcccacagacgaatcataaatagtggcctgaccagagttcctgacttgggccacctgccacctcataatattctgcaaatgatgtgagtagcaaaacccagcttaccctttgtggtactaatatgtaccctattttttccgcagagatctcgataacaatcaaatcactcggatagacagtaaatctataaaagtaaagactgcccaattgtacgtataaatggtttattgccacacattcaagtaatctctgaagagctctaatctttgcagaattttgacaaacaatgaaataagctacgttgatgactccgctttcttcggctccaagatagccaaactgcaagtttaacccaatttcaaatagtaaatagttattaatcatgtggctttttagatcgctgaaggaaaacaaaaaactgcaaatgatgcatcccaacgcattcgatggcatcatagacataactgaactgtaagcttggaaattgtatctttattgcattcgcaagatttaaccctttgtatttgtatctccatagcgatctctccagcacctcgttagttggccttccttctgccggacttcagaacatcgaagcgttgtacattcagaacacccacactttaaagaccataccatccatctacaacttccgggtgagtaaaagtcactttctaccaaataatttaagcccaaagttgcgttttttttatagaatctgcagagggcctatctcacccactccttccactgctgcgccttccagtttccatctcggcacgatcctcagcgacacgcccagcggatgctggagattgagaaatggcggaagcagtgcaaaagtgactccggaacgcgaaaggagagatcaaccttggataaccccttcaatatgccagaagattttggttctttcggtggcaccgacgactcagcaacagatataacccccatcactttcgcttccttcgattacatggccgatgacaccatgaacaagggcacttttcacgaaaagatcatcctgaatccgggtgatgactcctcggccgaactttgcggcaattttactttcaggtgaattaatattctcttcatttagcaacgtccggtactaataggagatattattccctgcagaaaacccaatattgaatgctatcccatgcccaatgatctaaatccttgcgaggatgtaatgggctatcaatggctgcgtatttccgtctggattgtggtggctctggccgtcgtgggcaacgtggctgtgctgacagtaatactatcgattaggtaagtcgttacattcccatttggccaaaggcactcagagaaactgagggtctaacaatttcaagggttcaccctacgacgaatgctttttactgctttaaactagtttgttaaagtgcctataatctcttacctttccaggccggagtcgacgccggtgccgcgatttctgatgtgccacctggccttcgccgacctgtgcttgggcctctatctgctgctggtggcctgcatcgatgcgcattccatgggggagtatttcaatttcgcctacgattggcagtacggtgggtggtgcagctgattttgtggtgccggcatggatttagcttacaatgtcttctccattttcccgcagggcttggctgcaaagtagccggctttctcaccgtgttcgccagtcatttgtcggtgttcacgctgaccgtgattaccatcgagcgctggctggcaatcacgcaggccatgtacctgaaccatcgcatcaagttgcgtcctgcagcgctcatcatgctgggcggctggatttactcgatgcttatgtcctcgctgcccctgtttggcataagtaattattcgtcgacgaggtgagcaagtaaatatgtcattctgcccgagctttgtggttcaaatgctcggccctcgttcattgcagcatttgccttccgatggaaaatcgcgatgtgtacgacaccatttacctgattgccattctgggctccaacggagtggccttctccatcatagccgtctgctatgcccagatctatttgtccttgggtcgcgagacacggcaggcccaccagaatagcccgggcgagttgagcgttgccaagaagatggcccttttggtgagtagacttccaaactgcaactgtaaggatgtaaacttcttctactactactactaacttcctgtaggtctttacaaactttgcgtgctggtcgcctattgctttctttggactcaccgcgttggccggatacccactgattaatgttaccaagtcgaagatattgctagtcttcttctatcccttgaattcctgcgcggatccctatctgtatgccatattgacgtcccagtatcgccaggatctgttcaccttgttgtccaagtaagacgataagacggccatcgtggtaaagcagatcaaaattcataccaactttgcattctttccagattgggcctgtgccagcagagcgctctgaagtacaaggatagcctttccggccaagccaccaccagatttacaatccacggctccattcagaggcacagctcactcacgtgcaaaatgcagactgtgatgggcgctgagacgcagaaaatgctgaagaacagcgaggattatgtttaaaccgaacccgggtattgtgaactcacctcttcccaccccgttgtgatatatgatacatatatgtaatacatacatacgtgtactattagttaacgctctcttcatgatttgctatctgttgcagtattgctagcatcccacgattaatgatatttaacagccataagtttaattacgttatcttgtcataattaagtgttaactcctaagtatattttagctaagagaaatattgcttgaaggaaggagcttgtccccggataacaactaagtggtttcccattgaatggtattaaatgtttagatgtacacatttaaaactctaaatgttcaaatgttctgttgaaatatatgaaaaacattgaaaaaaaaaaaaacaatttaaaaacgcattaaaattgtgtatattgatgtaaatttgtagtttccgtttccctttcattaaaattcaattttttattgctagcaacataatttaaagcaagaaacgctataatcgagatacccgttactcagctagtggctccgcagtccaaaacgcagagctccgaaactgtgtcccgacctatctcgctggattatcccaccgacatgtcctgctaatctgtcccgccgacctgttgttccatacacaggtctttaattatacaagcgattattaatagcagatcgtgtatttatacttcgtgtatcgtacacatattttacatggcttctagtggcgccatctaggtgtgcaaaatgccacgacagtcgtgcagtcgtcagccctggcgaacagctggctttgaaaaggacgaagcaatcgaagggtaaggaaaatgacgcgtcctgcgattttcctcgttgtctgctcaataactctgcttaattccgtcaatggctacaaggagatccatggaatgaatggcaagctgtttccgaaggcggcgacgtttaattttcccgaatatgcttacaaggagaccagcaaaaatgtgagttatcgcaagcctattgatttttttttcatgaccacttacccattttttgcccaacaaatggtgaaaaataaaataggaaatcacttaccacgaactggaggtgacctgtgaccagcacgcccagtgcattggccttagtccggtgggcgtggccaagatcaactgcatccgacagtgcatttcgccatcgtgctaccaggacatctatgccttcaacgagctggaggagggcgaaatcgacgccaggctgaactcctttaagggatgcgttatccaacgcatgtagcagcgaccgcagttgttcaaggagtgcttcatcttcaagtggctggagctcactggcatcgcctactaaatggacccaatgccgatccgtttcgagcacttgcagttgatggagctattggctgttgactgcgaagataacacac

SEQ ID NO: 17108 - DNA, 3158 bp, DROSOPHILA
gctgctggagctgctcggttgttcgcgttcggtgcctcggcagttcagtttgtcgttctacttcacagtactactacttggagcagttcgtgcatcgctggtttccggttgtggcctgggcgtaatcccttgcaacaggtgcacttcagttcggacgaagacaactgcaaaatacctgggatatttacgcttccgaggaaatgagccgaacattatgtacctaggatcgctggacggaaaagacagtgagagccatggaaaagcacccgagtctgtcccagcggatgggtaccacttaccgtccgaggaagggcctgaagtgtctgtcattcgagttccagtgccgcctgcttctccaccatctgctgctaacgtcgctgagtggccggcatttcgtatacgccactagtgccgtcgggggggcgctgagtgccaacaactgtcacgacatccaccacggattcgatgtctaccccaatctcacggccgtatcgctggctcaatcgacggacacgcccctgaccgcgacgatgccacggtccgcctggaagtgttgttgctggaatgcaagtaatcaagcggaggaggtggagtgccgctgcgagggcgatggactgaatcgcgtaccgcaaaccctgacgctgcccatacagcgtctaactatcgcatcggcggggctgccacgcctacgccacacggggctgaaggtctacggatccacgttgctggatgtggccttcaccgactgcctgcagctggaactgatacaggatggcgcttttgctaatttaaccctattgcgaacaatctacatcaccaacgcacccaagctgactttcctctcgaaggacgtattccttggcatttcggacaccgtggacattatacgaatcataaatagtggcctgaccagagttcctgacttgggccacctgccacctcataatattctgcaaatgatagatctcgataacaatcaaatcactcggatagacagtaaatctataaaagtaaagactgcccaattaattttgacaaacaatgaaataagctacgttgatgactccgctttcttcggctccaagatagccaaactgcaagaaaacaaaaaactgcaaatgatgcatcccaacgcattcgatggcatcatagacataactgaactcgatctctccagcacctcgttagttggccttccttctgccggacttcagaacatcgaagcgttgtacattcagaacacccacactttaaagaccataccatccatctacaacttccggaatctgcagagggcctatctcacccactccttccactgctgcgccttccagtttccatctcggcacgatcctcagcgacacgcccagcggatgctggagattgagaaatggcggaagcagtgcaaaagtgactccggaacgcgaaaggagagatcaaccttggataaccccttcaatatgccagaagattttggttctttcggtggcaccgacgactcagcaacagatataacccccatcactttcgcttccttcgattacatggccgatgacaccatgaacaagggcacttttcacgaaaagatcatcctgaatccgggtgatgactcctcggccgaactttgcggcaattttactttcagaaaacccaatattgaatgctatcccatgcccaatgatctaaatccttgcgaggatgtaatgggctatcaatggctgcgtatttccgtctggattgtggtggctctggccgtcgtgggcaacgtggctgtgctgacagtaatactatcgattaggccggagtcgacgccggtgccgcgatttctgatgtgccacctggccttcgccgacctgtgcttgggcctctatctgctgctggtggcctgcatcgatgcgcattccatgggggagtatttcaatttcgcctacgattggcagtacgggcttggctgcaaagtagccggctttctcaccgtgttcgccagtcatttgtcggtgttcacgctgaccgtgattaccatcgagcgctggctggcaatcacgcaggccatgtacctgaaccatcgcatcaagttgcgtcctgcagcgctcatcatgctgggcggctggatttactcgatgcttatgtcctcgctgcccctgtttggcataagtaattattcgtcgacgagcatttgccttccgatggaaaatcgcgatgtgtacgacaccatttacctgattgccattctgggctccaacggagtggccttctccatcatagccgtctgctatgcccagatctatttgtccttgggtcgcgagacacggcaggcccaccagaatagcccgggcgagttgagcgttgccaagaagatggcccttttggtctttacaaactttgcgtgctggtcgcctattgctttctttggactcaccgcgttggccggatacccactgattaatgttaccaagtcgaagatattgctagtcttcttctatcccttgaattcctgcgcggatccctatctgtatgccatattgacgtcccagtatcgccaggatctgttcaccttgttgtccaaattgggcctgtgccagcagagcgctctgaagtacaaggatagcctttccggccaagccaccaccagatttacaatccacggctccattcagaggcacagctcactcacgtgcaaaatgcagactgtgatgggcgctgagacgcagaaaatgctgaagaacagcgaggattatgtttaaaccgaacccgggtattgtgaactcacctcttcccaccccgttgtgatatatgatacatatatgtaatacatacatacgtgtactattagttaacgctctcttcatgatttgctatctgttgcagtattgctagcatcccacgattaatgatatttaacagccataagtttaattacgttatcttgtcataattaagtgttaactcctaagtatattttagctaagagaaatattgcttgaaggaaggagcttgtccccggataacaactaagtggtttcccattgaatggtattaaatgtttagatgtacacatttaaaactctaaatgttcaaatgttctgttgaaatatatgaaaaacattgaaaaaaaaaaaaacaatttaaaaacgcattaaaattgtgtatattgatgt

SEQ ID NO: 17109 - protein, 829 aa, DROSOPHILA
MEKHPSLSQRMGTTYRPRKGLKCLSFEFQCRLLLHHLLLTSLSGRHFVYATSAVGGALSANNCHDIHHGFDVYPNLTAVSLAQSTDTPLTATMPRSAWKCCCWNASNQAEEVECRCEGDGLNRVPQTLTLPIQRLTIASAGLPRLRHTGLKVYGSTLLDVAFTDCLQLELIQDGAFANLTLLRTIYITNAPKLTFLSKDVFLGISDTVDIIRIINSGLTRVPDLGHLPPHNILQMIDLDNNQITRIDSKSIKVKTAQLILTNNEISYVDDSAFFGSKIAKLQENKKLQMMHPNAFDGIIDITELDLSSTSLVGLPSAGLQNIEALYIQNTHTLKTIPSIYNFRNLQRAYLTHSFHCCAFQFPSRHDPQRHAQRMLEIEKWRKQCKSDSGTRKERSTLDNPFNMPEDFGSFGGTDDSATDITPITFASFDYMADDTMNKGTFHEKIILNPGDDSSAELCGNFTFRKPNIECYPMPNDLNPCEDVMGYQWLRISVWIVVALAVVGNVAVLTVILSIRPESTPVPRFLMCHLAFADLCLGLYLLLVACIDAHSMGEYFNFAYDWQYGLGCKVAGFLTVFASHLSVFTLTVITIERWLAITQAMYLNHRIKLRPAALIMLGGWIYSMLMSSLPLFGISNYSSTSICLPMENRDVYDTIYLIAILGSNGVAFSIIAVCYAQIYLSLGRETRQAHQNSPGELSVAKKMALLVFTNFACWSPIAFFGLTALAGYPLINVTKSKILLVFFYPLNSCADPYLYAILTSQYRQDLFTLLSKLGLCQQSALKYKDSLSGQATTRFTIHGSIQRHSSLTCKMQTVMGAETQKMLKNSEDYV

SEQ ID NO: 17110 - DNA, 4922 bp, DROSOPHILA
cttataatctaatctcagtacttttcgtttaaaaaattatcttttgaaacaaacaagtttcttgaaagtgtggtattttatgcacgtacatccatggtcatattattttatattgatattatttccgcaccgtatttatttaaactaacaatagaataatagcaaaatgagcctgccagctgcactattgcagcgcctgaagaagcgcggacttgtgaccaaacagtcgggtaaatacaaagaccagtatagaatccaaaaagaggataaccaacttcagctttccacaggagcagcaccgatttcagaagctatagaagagattatagccgagaactacgatgacgatgacaagagcggcccttacccgtacaaggaggacacatcgccggagcccaagcgcaggagcgtcgaggagaagttctggtcgcaccgcatcaaggagcggatcggcgtgaacgagtcctaccatggctacaagctgtgtcccaacaaatacaacatataccacaagtgctcgctgtactgcgtaaacaagttcaacagctcgccgctttcgcagcccagccataggtatctcaagcgctacaagagattgctgcggaagtatccactggaggcgggctggaaggatgtctacgataagggctgcaaggcgttttacttctataactcgaccacacagactgtttcgtggctacctccttcgcatcccaaagcacggatcaccaacagcgccgcagtgtttcgcagacaactggccaactccaacgatgagttcaacttcgataccaacatggttcagcccaagtcttctaaccaaaatgaacccgacgagcccgacgtattcgttcccgccaagaagcaaaagtccagggacctggaacgaaaaatccaacgacgtcgccgtaatgataactagcactactaactagccatttgacttatgagctgtagatcgctactgttcaaataaaaatgaataactatgatagatattaaggtttaaaaatgtacactctgctttattgaattgctagcttaagacaatgaatggtggagccgcgaacagatttaaatcgaaggaaccggaaattttacgaaagcagcaactcgataaaattgtgtcgcacgagtcgggaagtatgtgaaagttgaatttgaggcggcgattaaagccctcaacatgaggatgcggtggacacactttcaccaaactatgtgctatgtgtaaagtgttttaaccaagttatatatattggtgaaagatcaatacaattattttttttttgggtttatttcaaggttcgttttcccttaacaacaaccggtcggtttcgtatgtagcccttgcgacgcttagagttctgcaaagaatcagattgttaatgaagttcattgggagctgcagggtacactacctttctcgaaatgaagtttgctggaggaatcgttctctccttggtcttcagtgatggtctattgaactcatgcggcttcttcaccctatagatgcgaacaagccagtgttctgtggtgtaggcctcctccaggtaggtcagatcgaagtccttattcccaatgacggcgttacgtgtgcgatcatatccagatggacctctgaaacaggcagttagtgtgcatcgctacctgagagaaatgtttccgcttacctgtagtccaacttcaattccccgaatctgtagtagcttaatttgtacataaggcagttgagcagggccggagcaccttcggcatctaccctgaattcaccgcggtcggtaaagtaatcgctttccttaatgtccttgggatgctctccctcagcaattcggaccatccacaggaacttgttgatatcatcgccagaatagccgatcacaccgccaaagatcaccaaaacgtagtccacgtcaagagatgtcataatttcgtaggacttctcctcggttgaagacattgccttgccaaccagcgctatgtgactattgttccacgtattattatccactagcgtcgttctgtttgccattcccgctatctggtatccgtaatcccaccaagacataacgcgagcatcatcggcagtgttctgcgaaagccagtagtaagcctctctgaaatcgtctaaaatgttgcgggatctagtggagaaaaggttagataggtttaaagaagacatgatgctacttggtgcttacccatcttgactgttgtggaaagccaagacaatggagggactggagtaggcattgctggtcacccacgtgcagtggacagcgaacatcatcaacagcattagaacggccaaaataacaatactcttcaggttggagctgacgccagtatcctgctgggcatcatgcttagtacgatgcttcagcttgccagcctgcaaatgcgatgtattttaaaatcaaatcccatggatgtgtgttagtaagaactcaccttgtcgtacagcgtcttcttctcaatggaatcctcagcttcatccacttcggtggctgcgcttatggctgtgcccattcgcttagacgaatcctcttgcaggaacacatccaacagtcccgaaaaggccactccggccagcatgcacaccaccggcgtgagggtcaacatcaaacgcaccatcacaccagcgaagtaaaccgcactgatggcgtacagcaccacgaaaacgcgctcgtcgttgatctgcttgatgcagtaccacactcccactgggaaggcgcacaccaggatgtgcagatcaaagaagaacgagaaccaagtggtgggctgatgctccgacacggatgcaatgatgggaatgtggatcttggcgtagccagtatcccacagcgagtagaagcgtccactccacggggccacaacgcccagcatggtgagcaccacgacggccacaaagacgccaacgcccaccagcaatccgccgacgatgaacagcttccggaactcgttgcgcgacagcacggactgcaaatggcgcaaggtggccacggccataaggagcacaaacactcccagcgcagccatgtgttcactggtgcgtatcggttggaatcccacgaaggggatctgcatggagaacagcagtcccaggatgtagaaggtgctgtagctggtcagcagacgcggcgagtacctgcccataatgagcagtacgaagacgtgcaggggtatcaggttgatgatgaacacgtagccaccccaggcggacaccatgtagaagtaggacaaagcggctgcggccgaccagaacacggatccagtcttcactgagcgcacccacaggaagtaggtgaactgcagggcgaatatggcaatgccctcgttatcgtacgatccagccaccgacctactgatgtagccaggcacgatggcgatgaagctggcggcgaagaggccggcgcccgcggaccacagctccttggtcagcaggtaggtggagatggaggtcaggccactgaagatcggcgccaggaacacgcagatgtcacgaatatggaccggtatgttgagtacgtgcagcagccaatggattccgccggacgtaatcatcaggccgggatagacggtaccgcccacaatcctgccgagcggataccatgcgcgctcgtcgaaccagttgaggaagttgtaccaaccattctgcaccatgtaggcggtggcccggtagttgaaccacggatcaaactcatggataatcgactcgaaacggatgacggcgaagaggcgagaggaaaatccggccagccaggcgattagcaggatggcgaaggtgattaggctgctgtagccagccaccttgctgttcagcatcttcggcgtccgattcatgtcccaattccagccagtaactcgaaaattataaccgatctgaaatgcaacgacacattcttcgcttagacacgtagtctaaaaaaattgccgggtagactgccaactcggttttagatacgctatcgatagtgcaatcgataacaagaccagggcaacgtaactttgaatgcttttaaatttgtacttgcctcgttttcgttgtattccaaaataatttaaaatacatctaaacaattttttggaataactttttgttccatttatttgcatagcataaaaaaataagcaaactctccattccatttgttctgtgtcttgttcaaaataatcgccgttgcgctcatctctagtttaattcctatgattgacagaagccgctgaaaaacctaagaatattgaaaatcaacatgaataatgggaatataaaacgccttcaaaagaaactcagcgtttcgaaaaagccagcagtcactgtggattcaccattggcaaaatatcctttacaaaagcaaaaaacccactgaaattctattgttgtttacactttctagccggtgtttactaaaacatgttgttttctaatataacttttaatttcgaataaatatccagctagttggtttccttaactgaacttaactatacgtatgactcctcgggcatcttgacctgcattatttgcaggattcctatcaaacccaacgtctggaaggtgcatataaattccaagcagcacaaactgaacgtcgatcaggctaagcagaataaggtggagaaacccgtcaccactactgcacccaaggatcctacgggtccgtccaccaagacttcagctcctgccaaaaactccagcacactgccagataaaactccacagagcagccaggaaaagcatcctcccctcattcaagagaaaactgcccagggaaatgcgagcagcaagcctgagaatgaaactactgtcgagaaactgccagaaaagttcttcgacgaggataagaccaataaatcggaggccgctcgccttcaggacgaggaatggcagcgattccagcaggagatcaagcgggcggaca

SEQ ID NO: 17111 - DNA, 2699 bp, DROSOPHILA
gactacgtgtctaagcgaagaatgtgtcgttgcatttcagatcggttataattttcgagttactggctggaattgggacatgaatcggacgccgaagatgctgaacagcaaggtggctggctacagcagcctaatcaccttcgccatcctgctaatcgcctggctggccggattttcctctcgcctcttcgccgtcatccgtttcgagtcgattatccatgagtttgatccgtggttcaactaccgggccaccgcctacatggtgcagaatggttggtacaacttcctcaactggttcgacgagcgcgcatggtatccgctcggcaggattgtgggcggtaccgtctatcccggcctgatgattacgtccggcggaatccattggctgctgcacgtactcaacataccggtccatattcgtgacatctgcgtgttcctggcgccgatcttcagtggcctgacctccatctccacctacctgctgaccaaggagctgtggtccgcgggcgccggcctcttcgccgccagcttcatcgccatcgtgcctggctacatcagtaggtcggtggctggatcgtacgataacgagggcattgccatattcgccctgcagttcacctacttcctgtgggtgcgctcagtgaagactggatccgtgttctggtcggccgcagccgctttgtcctacttctacatggtgtccgcctggggtggctacgtgttcatcatcaacctgatacccctgcacgtcttcgtactgctcattatgggcaggtactcgccgcgtctgctgaccagctacagcaccttctacatcctgggactgctgttctccatgcagatccccttcgtgggattccaaccgatacgcaccagtgaacacatggctgcgctgggagtgtttgtgctccttatggccgtggccaccttgcgccatttgcagtccgtgctgtcgcgcaacgagttccggaagctgttcatcgtcggcggattgctggtgggcgttggcgtctttgtggccgtcgtggtgctcaccatgctgggcgttgtggccccgtggagtggacgcttctactcgctgtgggatactggctacgccaagatccacattcccatcattgcatccgtgtcggagcatcagcccaccacttggttctcgttcttctttgatctgcacatcctggtgtgcgccttcccagtgggagtgtggtactgcatcaagcagatcaacgacgagcgcgttttcgtggtgctgtacgccatcagtgcggtttacttcgctggtgtgatggtgcgtttgatgttgaccctcacgccggtggtgtgcatgctggccggagtggccttttcgggactgttggatgtgttcctgcaagaggattcgtctaagcgaatgggcacagccataagcgcagccaccgaagtggatgaagctgaggattccattgagaagaagacgctgtacgacaaggctggcaagctgaagcatcgtactaagcatgatgcccagcaggatactggcgtcagctccaacctgaagagtattgttattttggccgttctaatgctgttgatgatgttcgctgtccactgcacgtgggtgaccagcaatgcctactccagtccctccattgtcttggctttccacaacagtcaagatggatcccgcaacattttagacgatttcagagaggcttactactggctttcgcagaacactgccgatgatgctcgcgttatgtcttggtgggattacggataccagatagcgggaatggcaaacagaacgacgctagtggataataatacgtggaacaatagtcacatagcgctggttggcaaggcaatgtcttcaaccgaggagaagtcctacgaaattatgacatctcttgacgtggactacgttttggtgatctttggcggtgtgatcggctattctggcgatgatatcaacaagttcctgtggatggtccgaattgctgagggagagcatcccaaggacattaaggaaagcgattactttaccgaccgcggtgaattcagggtagatgccgaaggtgctccggccctgctcaactgccttatgtacaaattaagctactacagattcggggaattgaagttggactacagaggtccatctggatatgatcgcacacgtaacgccgtcattgggaataaggacttcgatctgacctacctggaggaggcctacaccacagaacactggcttgttcgcatctatagggtgaagaagccgcatgagttcaatagaccatcactgaagaccaaggagagaacgattcctccagcaaacttcatttcgagaaagaactctaagcgtcgcaagggctacatacgaaaccgaccggttgttgttaagggaaaacgaaccttgaaataaacccaaaaaaaaaataattgtattgatctttcaccaatatatataacttggttaaaacactttacacatagcacatagtttggtgaaagtgtgtccaccgcatcctcatgttgagggctttaatcgccgcctcaaattcaactttcacatacttcccgactcgtgcgacacaattttatcgagttgctgctttcgtaaaatttccggttccttcgatttaaatctgttcgcggctccaccattcattgtcttaagctagcaattcaataaagcagagtgtacatttttaaacctt

SEQ ID NO: 17112 - protein, 774 aa, DROSOPHILA
MNRTPKMLNSKVAGYSSLITFAILLIAWLAGFSSRLFAVIRFESIIHEFDPWFNYRATAYMVQNGWYNFLNWFDERAWYPLGRIVGGTVYPGLMITSGGIHWLLHVLNIPVHIRDICVFLAPIFSGLTSISTYLLTKELWSAGAGLFAASFIAIVPGYISRSVAGSYDNEGIAIFALQFTYFLWVRSVKTGSVFWSAAAALSYFYMVSAWGGYVFIINLIPLHVFVLLIMGRYSPRLLTSYSTFYILGLLFSMQIPFVGFQPIRTSEHMAALGVFVLLMAVATLRHLQSVLSRNEFRKLFIVGGLLVGVGVFVAVVVLTMLGVVAPWSGRFYSLWDTGYAKIHIPIIASVSEHQPTTWFSFFFDLHILVCAFPVGVWYCIKQINDERVFVVLYAISAVYFAGVMVRLMLTLTPVVCMLAGVAFSGLLDVFLQEDSSKRMGTAISAATEVDEAEDSIEKKTLYDKAGKLKHRTKHDAQQDTGVSSNLKSIVILAVLMLLMMFAVHCTWVTSNAYSSPSIVLAFHNSQDGSRNILDDFREAYYWLSQNTADDARVMSWWDYGYQIAGMANRTTLVDNNTWNNSHIALVGKAMSSTEEKSYEIMTSLDVDYVLVIFGGVIGYSGDDINKFLWMVRIAEGEHPKDIKESDYFTDRGEFRVDAEGAPALLNCLMYKLSYYRFGELKLDYRGPSGYDRTRNAVIGNKDFDLTYLEEAYTTEHWLVRIYRVKKPHEFNRPSLKTKERTIPPANFISRKNSKRRKGYIRNRPVVVKGKRTLK

SEQ ID NO: 17113 - DNA, 9390 bp, DROSOPHILA
tcttaagcgaccgcaaacttttctgatttccaataatttgaataatccttaaattccttatttccaaagtgtattcaatataactgccgtgcaattacggattggatatcggtggcatatggagtgaccagcacaacacaaggcctgccgcccaagaaacgcaagcccagaagtccggcagtcgagaatcacgagggactgggaccttgggcttacggttctcagtttggcttgacatgcatcagcatcattattttgtgcttttaatgttttatttagcccggttgccgacagccatcgcagtgcgggcaaacagagtggtggtgcagatctgtgtgtgggaatgggaatgggtatggagatggggtctggtaatacctgtgagtgcgtgggtgctgtctgaccgcctgcgagcgttgcctacgtgccgtttgcactgaactctcgccactctgttctccttagctccctctctctcatgcttgcctgtgtgcccctcgttttccaccagttccaagagtccaccgctttccctcccacaggaagggagccatttgcaacggagcactcaaacagcagttaaaaaggcctcatttgtgcctgtgtgtgtgcaggacgaatgtggcgggaacgaggaagaagggagtggggatcctgacagagtgtgtgccactcggcacataattgtttgaaacaaatgttgtgcacacactcacagcggcagcagcacacactcatgtaccgctgctcctactcgtgctcgtgcacccacacagacaaatctgggatattttattaggccattcagttagtcagtcatttagtcagtcaatcaagctgggcaggcaattaaactttcactgcccgccgtcggaagccaaaggtaacaagaacagccagtcagggcggctgccaagtgggggaaataaacacatcaaatggcaaacagcctggcaaacaagtgctgggtttaagaaggtatcggttcgccggatacccgatgaagggaggacgtgggactgagaatggcacgaacgtggggaaatcctttgagatagatgaaattcatcagaatgaattcgctttcttttcaggcctatcccaaccgagacataaccaacattgtggagtcgtcccactaccagaagatcggcggctggtgtcgccagggggcattgaatgcggctaagtgcaagggatcccaccgatggatcaagccattccgctgtctcggtaagtataccaaaaaacgttattgacccaattgaaaagtatcacccagatctgaactgatccactttcctctgccttgcctcaaccatccttcatgcatcacctaccactcgatgtcgtttggccttagaaggaccattccaatctgacgccctgctagttcccgagggctgtctgttcgaccacatccacaacgcctcccgatgctggccatttgtgaggtggaaccaaaccggagcagccgcttgccaggagcgcggaatgcagatgcgcagcttcgccatgcttctgccctgcggaatctcggtcttctccggagtggagttcgtctgctgtcccaagcacttcaaaagtgagtactgactacataaacatattttaaaatatattttaaaatcgctacttttactcatcaccccctcttagccgatgaaattcatgtaaagaagaccgacttgccggtgatgccggcagctcagatcaatagcgccaatgacgagctggtgatgaatgacgaagacgacagcaacgactcgaactactcgaaggatgccaatgaagacgatctggacgatgaggatgatttgatgggtgatgatgaggaggacgatatggtggcggatgaggcagctaccgcaggcggaagccccaacaccggttcctcaggtgactcaaatagcggatctttggatgacataaatgcggagtacgatagcggagaggagggtgacaactacgaggaggacggtgctggttccgaaagcgaggctgaggttgaggcctcctgggatcagagcggaggggcgaaggttgtgtccctaaaaagcgattcctcatccccgtctagcgctccggttgctcccgcccccgagaaggcacctgtgaagtccgaatcggtcacgagcactcctcagctgtctgcctctgccgctgcttttgtagctgccaattctggaaactcgggaaccggagccggagcaccaccatccactgcacaacccacatcggatccctacttcacccattttgatccgcactacgagcaccagagctacaaagtaagtcagaaagtaagtgtttacgttgagggcgcaggtttatttatcgatgcaacacaaaacgtattctaaacaaaggaagcccaacagcgccttgaggaatcgcaccgcgagaaggtcacgcgcgttatgaaggactggtccgatctcgaggagaagtaccaggacatgcgcctagcggatcccaaggcagcccagtcatttaagcagcggatgacggctcgcttccaggtcagtcatctttcgtgtgacgcactcatttccagtctcccaattcccacaactctcttactctcactgtctctactcatcactatatctctgtctcgcaccgaaccccatctctgtctcccgttgaccacctgctccatcctgttgaatgtttgatacatttcaaagctatgtctctgcatctgaatgtgtgtgtatgtgtacgaagagcttcacttggcatgggattgataacgagaagagcctttctgctcttttagtaactacttgatttgaaattaatttcagtcaatccacattcttttatttttaaagaaaacagaccgctttactctacgagtaacgggtgtaaagatgattgattagagaaattattcactaacgaccgaagatcagtacatctgtgataattattaatgaaattggaaattacctttgccacctgaagtctctttagttataggcctcataagaagtatttaatccatatgtagtataaagcccacttttttttttcatttgagttattttctgtttcgcttttaaacacattatcatgcaccctttaattgtttataatctagccattatcgtagctcattatattcatatttttaatgcatcaagtagttctcattgtattatctgcttctgtttgctgcactgcgagatccagaaatgggttaagtaatactgttgataaggtggagcttcccatacctctggatatcgttgggcagtgttttgtgcatttgtgtatccatatgtatggcaaatgggagcgaaagaggcatcagattgtaatcacaacagcattaggaataccagtaacaataacgataatgctgctcgaaatctaaccagttaacaaagtaccacaacatcaacgaatcaatagatccaatattcatattactaacattgcaagtgctttgtagtcaagctgattggcatataaactaactataactcgctataactaactataaacgtatcctttattttaaattttttgatttcggatctctaaagatcgatcaccgaaaacagacacgaacgaacgacaaagcgacgatttcaatttggtccttatcgacggatgctgtttacgtaatcgctgcgcatccgcaagcattgctattgccgcaaataaattgcatacatgtacatgtacatataccatatccaccatatactatatcatatcatatcatatatcatatatgccaaatatcatagaccctgatcccgaaacccactcacaacccgatcaggaccttttcgctccctcatggcagcactaaaagttaactacctactaaaagtaaacacccgacaagacgcgctacgctttcccaacgctttcctaacactttaaccacaatccttctacgagacggttacgagtcgaggcaattttttcgaaaacttaagcgagaataaccaaagtaccaatagactgatcgacagctgcaaattgttatcgatcgacgcaaattccccatgctgataatctttctctcttggtgtgcaatacgtctttatatgggaatgtaattttagacttctgttcaggcactcgaggaagaaggcaacgccgagaagcaccagctggccgccatgcaccagcagcgcgttttggcccacatcaaccagcggaagcgcgaggccatgacctgctacacccaggccctgactgagcagcccccgaatgtaagtagatgctccgccatggaattatcgctttcacgaggtgggctaattgcttcagaattgaccgacagagtgtgcccacaaatatttattgtcaaggacctgattagatagatcgaagcattgccattagccccccctccaatagattggcggaaatgaaatctgtgctaactcttgtgatatcctctaggcccaccacgttgagaagtgtctacagaagctgctgcgcgccctgcacaaggaccgggcccacgccttggcccactaccggcacctattgaactctggaggacctggtggactagaagcagctgcttcggagcgtccacgcacgctggagcgcctaatcgacatcgatagagccgtaaaccagtcgatgaccatgctcaagcgctatccggagctctccgccaagattgcccagctgatgaatgactacattctggcactgcgcagcaaggatgacattcccggctcctcgctgggaatgagcgaggaggcggaggccggcattctggacaagtaccgcgtcgagatcgagcgcaaggtggccgagaaagagcgactacggctggcggagaagcagcgcaaggagcagcgtgccgctgagcgggaaaaactgcgcgaggagaagctgcgcctggaggccaaaaaggtggacgacatgctcaagtcacaggtggccgagcagcagtcccagccgacccagtcgtcaacccaatcgcaggcgcagcagcagcagcaggaaaagagccttcccggcaaggagctgggtcccgacgcagctctggtcacagcggccaatcccaacctagagaccaccaaaagcgagaaggatctgtcggacactgagtatggggaggcaacagtgaggtgggtcctctcgagcttgtgcacaccctattctaggactaagaactctacttcgttttgcagcagcaccaaggtgcagaccgtgctgccaacggtcgacgacgatgccgtccagcgggcagtggaggacgtagccgccgccgtcgcccaccaggaggccgagccgcaggtgcagcacttcatgacccacgacctgggccaccgcgaatcggtatttgagctgcggcgtcaactcgtgccgcatttgcctaaagcctatcccctctctctctctcccctttcgttgcagagcttctcgctgcgccgcgagttcgcgcaacatgcacacgcggccaaagagggccgcaacgtctacttcacgctctccttcgccgggatcgccctgatggcggccgttttcgttggcgtggccgtggccaaatggcgaacatcgcgctcgccgcacgcccagggcttcatcgaggtcgaccaggtgggttgtcaggtgggtcagtgcttcgtgggggcagtgggcagtaagtcactgcagtacggaagtggcgagttgctgttagctaacataactcacgaatctacctcttattcccaccagaacgtcacaacacaccatcccattgtgcgcgaggagaagatcgtgcccaacatgcagatcaatgggtacgagaatccgacctacaagtatttcgaagtgaaagagtaagcgagatggcaagatggcagcatgggcgcggctggcaagagcgagcgagtggcacacatcaacaacaacagtaaacgcaactgcagccaccgcgatttcaaaatggaaaaacttaagcgtattattaaagcagatgggaagagaaatgattttttttcgtgaaatgagcgcagtttcaataagaaagaatgaaagggtagaagaagaaagataaattcaataaatggtaatatatctatatattaaattaaagcaagcagaaaggcaacaatataaagcaagcaattaaatttaagtatttgaatgtttaacaaaacgccgtaaacatcctttccagctctctctttctcttcccctgtctctgtctctgtcccatcaccacacacacacacatcaacaacaatggcacacactcacacacacttgcctctaactttgtgattcttcttgagcgccagctacgcaaagagagtagaagtgctgaagtgaagatcatacacgcagccgaacgaagagtggtggagcgggggaggagaggatggagaagagcggaagaagagcaaaacaaaagatattcctagtaaataaattgtcgacacacacatcacatccacattcaaacaccgagtcacccgcagaacagtcacacccacactcacacatacagtgtcaggaatgcgcaaaaaagacacaaacgcattcatgcctgcttcgtagcatatttttgagcgtttcgtggcattagaacgcttgcaagccgatcgcaattcttaccaaaaacctacgccattaattagagcggcagcgagagctaaaagataagagcaggaggcagaaacaccaacacacagacacggaatctcgcacactgagacacttgtgaacctaagagctacctacgcgtactaatccctatacgatcgtgcatatgcgcttgtgtatatgtcgaactttctctctctgtaagccacacacactcaccagagaagggaatagaacacacaaaccatacacaaaccacacacgcatacacgcaaaatatatacaaaatatttacagcaaagccagaagaaatgtccataaatgtatttatgtatctatacacgagccacacaaagcaaaggtcgaaggtcagccagctagggaagaatgacgacgcttggcgggctttgaatataatatacgaatcagctatgtaacagaaacaatgcaaaacgctaagctaattgcagacagaaacaaaagaaggaaaaccaaatattaaaatgaaagcgaacaaattttagaactttttctgcatattttgtgtgtaagtcgatggtcgaacaaaaacaacagaagaacaaaaagaatttctctcttttttacgtacattttcaccgaaaagacagcacaaaacaagacagcagttacaactcacaactcacagctcacacccacacagcacacacacacacacacacacgctgcacacacacacacacacacacactgaacggagcccttgagccaagtagagttgagttgttgcatttcatatcgaaggcttcgcaagtgttgcataattgccttagagccaactgcggcagaaatcagataagcgggctcggcgaatcgcaaaatccagagagctcgcagctcggagacggcaccacctggagtggacgcttcgaagaacccgaggcccagagataaaccaatttgaaacggctagttcatttcacggctcgattgcttggcaaatatttggcctgttttgttcgagcatcgagatactgttactcaatcaagcccaataatcgaaatgctttccccgctgaaagccgacaagtggctgcccttctcagttcgttttccatttacgatttacgtttaatttccattgccaaattggccattttcttggtgtgactcacttcggctgagattaagtgaaagcacacactaacacatcacagctgaaattcatgttcagatcaaagctaaatcaaaagtgcagcgaaagtcgatatttttcaaatgtacaaaaacaaaactggaaactgagaaaacaacacctaaattcaaaccaaaatatttgctgtacctcaaaatatatatattctgtttcatacattaatttgtgactagccagctttcgatcggtttaagcttaggcattattcgtggccccattttcagcataagttctcattcgaattaaactaaattgtattggcaattggcaattggcaatttgaacggcatgaatcttgggattgtttagatcacttggctctattgaaaagatccgggctaagattgttaccacgttttaaaagcatggcaatcaaggcaaatcaacggcgctccgcgacacacacataaacagacgcgttatataatgtattacaaacatatatatatttcaagaggaaaacccaaatggcaaatcaactacacaaaaagcaaataagaagaaatcttactagtcaaagcttgaatattttttattttattcattaatgcaacaagaacaacaacaaaaatgaaaaaagtatacatatatataaataaaaaaaaacaacaaaaaaagaaaaaacaattgatatttacacttagtgaagcaaaaagcaaaacaaaaaacaaaaaaagcgaaaagtataagcgaagaaaggaacaaaaaaacaaaaatgatgcaaatgtgtaagaaataaaccccgtcctgcataaataaaattaaataaaagaataaaataaatggaaacgtatagaatatcataaagtaaagaagatttacacgaaaattaaatgcaaaacaaacaaacaaaatacgagaaagcaagaacaacaaaattataatgaaatcgcatgtgtttttgtcgtagtctcatcattgaaaaccaagtgaaagtaaataatataataataaaaaaaaaaaaacaagtaaattgtaatgagaagaaacagcaaataagagcaacaatttgtgtaattcttttagtcgaactatgattttttgacgagcagaaaactaagttggagaaaagtatataaaaatttaaatattaaatgtactcgaagacaattgtaattgcaacaataattgtacgctacatatactattataattgtggaaatatttcagcattctgtcctggcgactaagccccgatatttgatcttcgatcgacgatcgacgatcgacgatctttgattcttgtcaatctatccggttggatatgttgggcattattacactatagccgggggcgcaaggaacccaggaaaagccaggaaaattgtataatgtttcacacaaagatccaataatggaaaaccaaatataaaacgtaagaatgcggaggaaatacagaacaacaaagaaaagaaaaccaaaacaattctcaatgtataatcatataatttgattttgaatttttgtgttctttttcgaaatattttgcataaataaaataaaataacaggaaaaacaaacaatcaattgcacgaacctggttcattatgcttgccaccgatccaaatccagatagcctcatgattatccattatttatttcccgcgatcggccatatattt

SEQ ID NO: 17114 - DNA, 5030 bp, DROSOPHILA
atgaagggaggacgtgggactgagaatggcacgaacgcctatcccaaccgagacataaccaacattgtggagtcgtcccactaccagaagatcggcggctggtgtcgccagggggcattgaatgcggctaagtgcaagggatcccaccgatggatcaagccattccgctgtctcggaccattccaatctgacgccctgctagttcccgagggctgtctgttcgaccacatccacaacgcctcccgatgctggccatttgtgaggtggaaccaaaccggagcagccgcttgccaggagcgcggaatgcagatgcgcagcttcgccatgcttctgccctgcggaatctcggtcttctccggagtggagttcgtctgctgtcccaagcacttcaaaaccgatgaaattcatgtaaagaagaccgacttgccggtgatgccggcagctcagatcaatagcgccaatgacgagctggtgatgaatgacgaagacgacagcaacgactcgaactactcgaaggatgccaatgaagacgatctggacgatgaggatgatttgatgggtgatgatgaggaggacgatatggtggcggatgaggcagctaccgcaggcggaagccccaacaccggttcctcaggtgactcaaatagcggatctttggatgacataaatgcggagtacgatagcggagaggagggtgacaactacgaggaggacggtgctggttccgaaagcgaggctgaggttgaggcctcctgggatcagagcggaggggcgaaggttgtgtccctaaaaagcgattcctcatccccgtctagcgctccggttgctcccgcccccgagaaggcacctgtgaagtccgaatcggtcacgagcactcctcagctgtctgcctctgccgctgcttttgtagctgccaattctggaaactcgggaaccggagccggagcaccaccatccactgcacaacccacatcggatccctacttcacccattttgatccgcactacgagcaccagagctacaaagtaagtcagaaacgccttgaggaatcgcaccgcgagaaggtcacgcgcgttatgaaggactggtccgatctcgaggagaagtaccaggacatgcgcctagcggatcccaaggcagcccagtcatttaagcagcggatgacggctcgcttccagacttctgttcaggcactcgaggaagaaggcaacgccgagaagcaccagctggccgccatgcaccagcagcgcgttttggcccacatcaaccagcggaagcgcgaggccatgacctgctacacccaggccctgactgagcagcccccgaatgcccaccacgttgagaagtgtctacagaagctgctgcgcgccctgcacaaggaccgggcccacgccttggcccactaccggcacctattgaactctggaggacctggtggactagaagcagctgcttcggagcgtccacgcacgctggagcgcctaatcgacatcgatagagccgtaaaccagtcgatgaccatgctcaagcgctatccggagctctccgccaagattgcccagctgatgaatgactacattctggcactgcgcagcaaggatgacattcccggctcctcgctgggaatgagcgaggaggcggaggccggcattctggacaagtaccgcgtcgagatcgagcgcaaggtggccgagaaagagcgactacggctggcggagaagcagcgcaaggagcagcgtgccgctgagcgggaaaaactgcgcgaggagaagctgcgcctggaggccaaaaaggtggacgacatgctcaagtcacaggtggccgagcagcagtcccagccgacccagtcgtcaacccaatcgcaggcgcagcagcagcagcaggaaaagagccttcccggcaaggagctgggtcccgacgcagctctggtcacagcggccaatcccaacctagagaccaccaaaagcgagaaggatctgtcggacactgagtatggggaggcaacagtgagcagcaccaaggtgcagaccgtgctgccaacggtcgacgacgatgccgtccagcgggcagtggaggacgtagccgccgccgtcgcccaccaggaggccgagccgcaggtgcagcacttcatgacccacgacctgggccaccgcgaatcgagcttctcgctgcgccgcgagttcgcgcaacatgcacacgcggccaaagagggccgcaacgtctacttcacgctctccttcgccgggatcgccctgatggcggccgttttcgttggcgtggccgtggccaaatggcgaacatcgcgctcgccgcacgcccagggcttcatcgaggtcgaccagaacgtcacaacacaccatcccattgtgcgcgaggagaagatcgtgcccaacatgcagatcaatgggtacgagaatccgacctacaagtatttcgaagtgaaagagtaagcgagatggcaagatggcagcatgggcgcggctggcaagagcgagcgagtggcacacatcaacaacaacagtaaacgcaactgcagccaccgcgatttcaaaatggaaaaacttaagcgtattattaaagcagatgggaagagaaatgattttttttcgtgaaatgagcgcagtttcaataagaaagaatgaaagggtagaagaagaaagataaattcaataaatggtaatatatctatatattaaattaaagcaagcagaaaggcaacaatataaagcaagcaattaaatttaagtatttgaatgtttaacaaaacgccgtaaacatcctttccagctctctctttctcttcccctgtctctgtctctgtcccatcaccacacacacacacatcaacaacaatggcacacactcacacacacttgcctctaactttgtgattcttcttgagcgccagctacgcaaagagagtagaagtgctgaagtgaagatcatacacgcagccgaacgaagagtggtggagcgggggaggagaggatggagaagagcggaagaagagcaaaacaaaagatattcctagtaaataaattgtcgacacacacatcacatccacattcaaacaccgagtcacccgcagaacagtcacacccacactcacacatacagtgtcaggaatgcgcaaaaaagacacaaacgcattcatgcctgcttcgtagcatatttttgagcgtttcgtggcattagaacgcttgcaagccgatcgcaattcttaccaaaaacctacgccattaattagagcggcagcgagagctaaaagataagagcaggaggcagaaacaccaacacacagacacggaatctcgcacactgagacacttgtgaacctaagagctacctacgcgtactaatccctatacgatcgtgcatatgcgcttgtgtatatgtcgaactttctctctctgtaagccacacacactcaccagagaagggaatagaacacacaaaccatacacaaaccacacacgcatacacgcaaaatatatacaaaatatttacagcaaagccagaagaaatgtccataaatgtatttatgtatctatacacgagccacacaaagcaaaggtcgaaggtcagccagctagggaagaatgacgacgcttggcgggctttgaatataatatacgaatcagctatgtaacagaaacaatgcaaaacgctaagctaattgcagacagaaacaaaagaaggaaaaccaaatattaaaatgaaagcgaacaaattttagaactttttctgcatattttgtgtgtaagtcgatggtcgaacaaaaacaacagaagaacaaaaagaatttctctcttttttacgtacattttcaccgaaaagacagcacaaaacaagacagcagttacaactcacaactcacagctcacacccacacagcacacacacacacacacacacgctgcacacacacacacacacacacactgaacggagcccttgagccaagtagagttgagttgttgcatttcatatcgaaggcttcgcaagtgttgcataattgccttagagccaactgcggcagaaatcagataagcgggctcggcgaatcgcaaaatccagagagctcgcagctcggagacggcaccacctggagtggacgcttcgaagaacccgaggcccagagataaaccaatttgaaacggctagttcatttcacggctcgattgcttggcaaatatttggcctgttttgttcgagcatcgagatactgttactcaatcaagcccaataatcgaaatgctttccccgctgaaagccgacaagtggctgcccttctcagttcgttttccatttacgatttacgtttaatttccattgccaaattggccattttcttggtgtgactcacttcggctgagattaagtgaaagcacacactaacacatcacagctgaaattcatgttcagatcaaagctaaatcaaaagtgcagcgaaagtcgatatttttcaaatgtacaaaaacaaaactggaaactgagaaaacaacacctaaattcaaaccaaaatatttgctgtacctcaaaatatatatattctgtttcatacattaatttgtgactagccagctttcgatcggtttaagcttaggcattattcgtggccccattttcagcataagttctcattcgaattaaactaaattgtattggcaattggcaattggcaatttgaacggcatgaatcttgggattgtttagatcacttggctctattgaaaagatccgggctaagattgttaccacgttttaaaagcatggcaatcaaggcaaatcaacggcgctccgcgacacacacataaacagacgcgttatataatgtattacaaacatatatatatttcaagaggaaaacccaaatggcaaatcaactacacaaaaagcaaataagaagaaatcttactagtcaaagcttgaatattttttattttattcattaatgcaacaagaacaacaacaaaaatgaaaaaagtatacatatatataaataaaaaaaaacaacaaaaaaagaaaa

SEQ ID NO: 17115 - protein, 816 aa, DROSOPHILA
MKGGRGTENGTNAYPNRDITNIVESSHYQKIGGWCRQGALNAAKCKGSHRWIKPFRCLGPFQSDALLVPEGCLFDHIHNASRCWPFVRWNQTGAAACQERGMQMRSFAMLLPCGISVFSGVEFVCCPKHFKTDEIHVKKTDLPVMPAAQINSANDELVMNDEDDSNDSNYSKDANEDDLDDEDDLMGDDEEDDMVADEAATAGGSPNTGSSGDSNSGSLDDINAEYDSGEEGDNYEEDGAGSESEAEVEASWDQSGGAKVVSLKSDSSSPSSAPVAPAPEKAPVKSESVTSTPQLSASAAAFVAANSGNSGTGAGAPPSTAQPTSDPYFTHFDPHYEHQSYKVSQKRLEESHREKVTRVMKDWSDLEEKYQDMRLADPKAAQSFKQRMTARFQTSVQALEEEGNAEKHQLAAMHQQRVLAHINQRKREAMTCYTQALTEQPPNAHHVEKCLQKLLRALHKDRAHALAHYRHLLNSGGPGGLEAAASERPRTLERLIDIDRAVNQSMTMLKRYPELSAKIAQLMNDYILALRSKDDIPGSSLGMSEEAEAGILDKYRVEIERKVAEKERLRLAEKQRKEQRAAEREKLREEKLRLEAKKVDDMLKSQVAEQQSQPTQSSTQSQAQQQQQEKSLPGKELGPDAALVTAANPNLETTKSEKDLSDTEYGEATVSSTKVQTVLPTVDDDAVQRAVEDVAAAVAHQEAEPQVQHFMTHDLGHRESSFSLRREFAQHAHAAKEGRNVYFTLSFAGIALMAAVFVGVAVAKWRTSRSPHAQGFIEVDQNVTTHHPIVREEKIVPNMQINGYENPTYKYFEVKE

SEQ ID NO: 17116 - DNA, 2449 bp, DROSOPHILA
cgatatgcgttttgaaaccttccaatattaggagaatgtgaaccaaaggatattaagtacagtacatttttcagtctaagaattgctattctaaatttctctcatttggcaactttactttgagacacacaagcaaccagttataaacagaagttatttgccagtcaaaatagctcatttaatccacaaaaaaaaaatccagaatcaaccatgattaatggttgtgcagttaaacctttagcatttcgagtttcgctttcaatagcgtaaaagttaatggaataatcgaagttgacgtattatacgtatatttagcacgcctcattaaatcaatttaatatatttggtattggcttttcggctgagcgctcattttaaccatgaccttttagagctgaaaatagaatttaaatctaatatatgaataactaaatggcacaatatgtcagcggctaggatgtctgcaagttggacgtgtgaatcatagtcaaaccactgtgcataactttcgatttcagatcggactgctatgcaggcacacctacaaatggaccccgaaaaatccaaaacagcttcattgtgaggcgataatggccaggcattagcacaaattcaatataaatcaaaacccgggctacgaacttgtattttttcgtcgggaaataaagcctctgcttttcggttgcaccaattcccgggctatgctgtttggcttccacgtctgatgttccgagaacgaatccagagagcccactggttagctgaagcttcctctattgaaatcgaaagcttccttttcggcctcgtcaaatgatttttgaccagttttaatttaactttcgagcgcagcagatcgcgtcgctaataactgccgctccataacggttaatactggggtactgactttggttctggttcagaggcagccgtatcgatatatcaggttcaagatccacagcgtaaaggcaaacatttgaattaattttaatgtaattaggcgatgatgtcgttcggcaaggtttgtgcgacgttttgtgactggtatttgatattaaccaactgaactcccaaccatgcgctcagattgtggtattcctggtcctagtcctagttcaactaatccattgtacgcgctttactgcgccatctttggacaggaccatctactaccggaatacgccacccgatcccttcggtcactacagcttcgagttccagaccaccaacggcattaccaccaagggagctggtaatgagaacggagccgtcggagtggttcagttcgtttctcccgagggtatacccgttaccttctcgtacgtggccgatgccaatggatatcagcccaccggagatcacattcccgccatcccgctgcacgttatccgccagttggagtacatccgcacgcatccaccggtggatgagattcggtccagacgttggtaaaaaaacaggacattaaaaaaattatatattgacttctaaatagctgtcgatgggctggctgaatatcgtcgttacacttcggaatatttttatttcgtatttatgttaattgtttttccatgcaaatcggaccagaagagaacaacaaaagcatgccaaaatctacagcaagtcaatatatattctagaattataaataaagtgctagacttaattgatctgcgttcctggagtccggaaagtttgcctaaatgcaggaactatgttcaataaattgcaatcaaaatccgtacattatacgagtactgcaatggtgaaactggctaaaatatgataagcatgtttgtggaattcaatttaaaaaacccataggggttatgcttactgacatgcaaataaggaaatcggtaaagaaatcggtaaaaataaaaatataaaaattaaaaaaattatttaatagatgcagaagaaaagaatgaataaaatgtaacgctttaatttaatgtaattgtaataatatcttatttcttggtaataatagaaaacttttttaagaactattgtctcaaagaaagctaagactcatggagtgcaaaacgaatcaaatccagttttaatgcttatgtcttataagtgaaacgcaattttagtcttacttagtttatcgagagcgtgttgaaaccggcaactataattatgaaatatgctaagaatgcttcttttaaatgctctttttaaagcttaagatttatggaccgcaaaactagtcgaagtcatgttttctatgctaatgaccagcgaatcaagcgcaccgaaatgtcagctttcatcagcgcaccctagatctgtgagcttcgctataaatctgtcatacccatccgatccaatctgatccgatacaaagtgcgaccttgtctttaagaacgactttcgcttttcgatgcggcaatcggcgagaagattgcgcctgccgtcgctcatttgcatgtgggcgcctaat

SEQ ID NO: 17117 - DNA, 384 bp, DROSOPHILA
atgatgtcgttcggcaagattgtggtattcctggtcctagtcctagttcaactaatccattgtacgcgctttactgcgccatctttggacaggaccatctactaccggaatacgccacccgatcccttcggtcactacagcttcgagttccagaccaccaacggcattaccaccaagggagctggtaatgagaacggagccgtcggagtggttcagttcgtttctcccgagggtatacccgttaccttctcgtacgtggccgatgccaatggatatcagcccaccggagatcacattcccgccatcccgctgcacgttatccgccagttggagtacatccgcacgcatccaccggtggatgagattcggtccagacgttggtaa

SEQ ID NO: 17118 - protein, 126 aa, DROSOPHILA
MSFGKIVVFLVLVLVQLIHCTRFTAPSLDRTIYYRNTPPDPFGHYSFEFQTTNGITTKGAGNENGAVGVVQFVSPEGIPVTFSYVADANGYQPTGDHIPAIPLHVIRQLEYIRTHPPVDEIRSRRW

SEQ ID NO: 17119 - DNA, 6389 bp, DROSOPHILA
cgagggggctaatttagtaatatgccacatttcaggcagttcctcctaatggaaatgaattgagtgcttttgttgaaaaaatataaaccttgcttcagtaattgtgacaccatcaattttttctttaatagtgctttataaggtagctaagtatgttatgaaaaatgtactaagtagagctgatgtttgattaatttccttatagatttcaaaaccaagatagttttatataaataaacaaatacttaatggtatacttatttatttattttttaatcagttttcttgtatgatcagtacaatgagtgttttcgtaacttataaaatatatttatatatatataaatatatttatatatataaatatatataaatatatttatattgaagttttaaacagaatattaatggtagtttgtatcaatatctttataagagctaagtactactaacaatgtttcttacatgagaagaaaatctatcccatatatgccacttaaattcacaccagcagccacgtgtcgccgtcgtcgtcatccatgttacaaagcttctccgccgcgtgtagctaatttggttttttagagccacaatgcacatcaattaggcagttaattgaagtgcggatgcgtttgctttttccattgagtgttgtcctggactcgatgagagtccttttttaaaggccctcgggcggcgttacagtccaaataaaaaccgaaatacaatgccggagccggaaacttggtcaaacagatgtacacgtaaataatttcatcaaaatcctggcgttttggtagccaaagcaaataccaagtgtgccccaggctaattgcattctaacaaccgagacgaattcgattttcccagctatacacttcatcttccttgctcccttcctctgctgcgcaaccaacgaacatcccttcgccagcattcgtttcgggcacgtagaacatcgcctctggctcggtagcaggctcgacttgtcaacagcgtgttagaatggaatgatggcctcctcgtaaagcggatccatatccattgcatgtgtaaagttattcatgggggggtttgcggctggaattggtgagttggacgaaagagagtccgaggacaactcgatcacatccggctgaaaggaaggcgatcgtcgcacatttggttctgttatacacttgggcccactgcgtccacggtcacgtccacgtcttctaatcgcagaaacagaccgagtcacttcctcgagatctgtcgaggaatcggatgtaatgtgcttgaagaccggcttggctatcatgcgcggcgatggcgtggacgattccgaaggtgctggcgagtccgatgtgatgtgcacaaacttcttgaagcggcgcctatcatattggcggtagttgtagctgtttgaagatccattgctgtcctcggtgtgggagcggctctgaccgttaagactcgctgtgagccttctttggctgcgacgtgtctggtcgttatagaaatttgccatattagttcgcttaacacgaactcttactcccctgagtttttctatgtctcgtggtgtcaatctggttaagcacacctgggaagaacgcgtcaggcattcgttgatttgacgatttgtctccatttccttaatatcgtttgcagatctggaattggattcgttgttcactgagtcaaattgtaagcacttgttcttagggttctcatcactgccatcccacagaagggtctcctccgcggtgtcggtttctgtcccggtttctgatggcgttgacatttcattaggcagctgagcattccctaagcgctgcatgtggataagcttatctttttgttttcttgtattcggtagatcccgttgcggttgtccagtttgttttggcttttcggccgcctgtctcgcttccagtccctctactttgaacagtccatttgggatgacctgttttaggtcactagtttttaaggcatctcccagtggctcctgggtctgttgtccagttctcacgggctccttggtcaaaaacagaaactccggagtcttctgtggcacttttgtagtttctaggctcccatggatcaaatgcgtcttggtctcaccagtgggctgcaacacttctgggtccatggttaaatcagactttgtggtcggcgaaggtgttagctctttacttacaccggtagaaccttcgctgacctcctcctcgttgaagtcgtgggtagccatcgtggaagtttctgagtttacgctttcagtttccgatcccgtgcgaacgatattttgaacaagctgggaacatggctgcacggcggcttttgcagctttggccattttgagggccttcaagattttgaatttgtttaatatcgagctgcactctatcatgctgctgctgtcttctaccacattctgcagctcttccttcttgaaactccatatgtcggcgatcggcttaaaaccgacggtttcgttggtaaatttgggtcgtgactccatcagttcgctaatcgtacgcttttcgacacgcgcagatgtttcttgtagacacagttgttttggaggctggactgcgatttttggctgctcctcgacgacgggctgcgtatgaaattggtgatgtgatgtctctggagagctcgatcgtcgcccaccgcgcacacttcgatccatgtcagacaacatggcattggctaccatggctgccgccctaacccgagtccggcggccatttcctgtgtagtagggctccgaatcgcttgaggcagcctcctcctcgtcttccgaaaatactactgtgggattttaaattgaaattattagtatgactgaattattagttattatgaaaggaagtggctcaaaagaaaacgattttgttgctaaccttcgtcccaaaatttgcgttttgcgggtcgccgctttttctgctccttggctttctctgcttcatcatccactgctgacgtttgttcagcttcttcctcagcctctgggagattaaccgcattttcgtagccctcttctatggtgccatagtccaactgagggcgatccctgtatttggcatagtcgatctggaggtacttcaaatcgtcgccagcttcggccatgttaagagacacaaattttctcttgaggtccgggcttttgagaagggcatggcaacgctcgtgtagcgtgtgccaatcgagagcccatgagtatcgtttattccgtggttggaagaccacggtcagaaggtcttggatcatgctgcggggaagccgcaacgcctgcagcgatttgtgtatcggatcgtagtcggccactggatcgtaatggttcgttatttttacaatctcgtccacatcgatggtggagctcagcagttcgtacttgacgttctgtggtgtcgtagcaggtagcaagtcgtcctcctgccgttttttcttaatacgcgaacagcgcctcacttcgttataatttgatgatgtggggtggaggtagaaagccgtaagccagaattctgcctccataaacccatgttcggagaataccttggctaggtcagcatagttttccgacatcttttgctccaaattaagcataaaatcaactgttaatccgggatgatatttccatatttcaattgcattcaactgttgtccaatgatcttcagcagcagggcaatcttagcaaatgtccatcctgaaaaattctacatgaaagcactgtgtttagtacaggaattccttttcatagttctcatcacttacccgctctgccagcagtttgtacacaaagctcaaaacttcctcattgtttggtacattttgaaacaccggatctatttgtctatcttgttcttcgtccacctcaggctgaatctgttcgtcgtcatcacagttcttgtagtcgcctatgttgctggctcggtttcccttgcatatctgctgctggtagttgagatttagctctactacatgtggttgaaagtggctgtttcgctggttttccttcttcttgagttcctctagaaggaagcgctcgctgctctctcgctcctctacatagcgatacattagctctttgaactgtggcaggtgctccagaaaatcgtgttcgttgagcgcctggagctccatcaggagattcccaagcacatagctggcgtagacctccagcatgacggcgaatgaagtgaccagactgaatttgaatttcctaaacccaatttgctcaaagaacccattttttccgagttgaagacgcacgcaaacgtgggcaataagccgagctggcgtaaagttaatgtcatgtaacatcgaagcttcctgcatgatctgggtatagaaccgtatgttgtacatctaaggagtggttttatgatgacattgtgtttgatatgttgtatcatgtatgttttccttaccaaattatctattacaaagcctcgattttcatctcttacaaaaacagtcaagaggtatagatgaccgattagtgtaattgagtttttatccccttcaaaggacacaaattgatcattttcgtgtgctttcacccaagcagccagcatccgaagcgccagctgtttcacggcctcaaagttgccggcattaaagagctgtattagccgcagcagggccagagatatcccttcctgtatcaggaaagcaacttctaagaaattgactatgattagataaatccttcgggaaaaatagtaattgcttgccttctcctgatgccgcaggaactgggtgctcgatggcgtggtgtttgttcagcttcaggttaaggaatagctgctgcaggtagggcaggctccagggccttgtctggaactgcagaacgtacgaccagttgaaattggccagttcaccaatctggtagaacgacggcaccgctttggtgaggctgtagagcaatagttgcttaaggccttcggagcaggtcttccactcctggctaaaccaaatcagcagcgagtggtgcgctaaaacccgcaccatgtgacgcagcgctgggtcctttaaggactcggaatccctggtgggcagatggcacacctcccatccgtagattaactgcgacaaccggtcattgcccattagctcaaacacatccacatcgctgtgcgcattgcagaatacaaacattttctgtagatcaagatttaagccattaaaacagggagttcaggatatatgtccaaagcgtgtccttaccgccgagaactcatcgtactccagtttctccgcacaatccaggaacttttctgcatcgtgcacatcctgagaaaatattagatccattccgcagtacctaattcatgacaatcctgcgaaaagtcgatttgtttttcagccggcttgtacttagttttatttagcttgcaacagctgacgccgattaccgtaagtggatggttttaaacatagtggcagcgctatctcgaggttcatgtactcgctaaaccacgagactagctgtaattgctgaatggggaaggtgaactcgctagggccattgttgccaacttaaatttatctcgcaggcaaaagtaattgaacaatacatttgaaaaaaatacaacaaaaatatatgcactttgtaaatgcaataaggaatggaatttttttttagctatatatataatcgatatttattcctatggttgactttattttaatttttttatattatcgtataagtatgatcaacgtacatacatacgtataaacgtatgatattacaaatttttcaatgtaataaaaattctaacgtagtaaatattccatagttgaaatccgtttctttgcatttgtacatatagaaattgtcctgatactatgttaggaaaaggaaaccagcttccttttgttaaacttaccttaagtccctttcaacagacctcgcattcctctcgaagatcgaaatttctggaaactttctaaaaacacgaaaaacgcgacgaaaacttacccgggcgaaaacacgcggattttttatatgtatattaactgcttggttgactaccaacaaaaactgaacacgtgttcatctataaaataattaaatactcagttatgaaattgattttgtataaaagtaatgaaacagctaaaatgtaattaacttgttaattatgaaaccactcagatatgtacaacattcgattcatgaacaggacattttggaagatttgccaaattatttgccatcttgaaagctgggaccacctatgaatgcacgtgcgacgagcacatttgtaggccctgatagaacataacctagactactgcggaaaaagaaattgttcacaacgcgcagagcagcaaaagtttagatgccgtcgccaaaccacttttatcatcaattgccacatctgaactg

SEQ ID NO: 17120 - DNA, 4014 bp, DROSOPHILA
caagctaaataaaactaagtacaagccggctgaaaaacaaatcgacttttcgcaggattgtcatgaattaggtactgcggaatggatctaatattttctcaggatgtgcacgatgcagaaaagttcctggattgtgcggagaaactggagtacgatgagttctcggcgaaaatgtttgtattctgcaatgcgcacagcgatgtggatgtgtttgagctaatgggcaatgaccggttgtcgcagttaatctacggatgggaggtgtgccatctgcccaccagggattccgagtccttaaaggacccagcgctgcgtcacatggtgcgggttttagcgcaccactcgctgctgatttggtttagccaggagtggaagacctgctccgaaggccttaagcaactattgctctacagcctcaccaaagcggtgccgtcgttctaccagattggtgaactggccaatttcaactggtcgtacgttctgcagttccagacaaggccctggagcctgccctacctgcagcagctattccttaacctgaagctgaacaaacaccacgccatcgagcacccagaagggatatctctggccctgctgcggctaatacagctctttaatgccggcaactttgaggccgtgaaacagctggcgcttcggatgctggctgcttgggtgaaagcacacgaaaatgatcaatttgtgtcctttgaaggggataaaaactcaattacactaatcggtcatctatacctcttgactgtttttgtaagagatgaaaatcgaggctttgtaatagataatttgatgtacaacatacggttctatacccagatcatgcaggaagcttcgatgttacatgacattaactttacgccagctcggcttattgcccacgtttgcgtgcgtcttcaactcggaaaaaatgggttctttgagcaaattgggtttaggaaattcaaattcagtctggtcacttcattcgccgtcatgctggaggtctacgccagctatgtgcttgggaatctcctgatggagctccaggcgctcaacgaacacgattttctggagcacctgccacagttcaaagagctaatgtatcgctatgtagaggagcgagagagcagcgagcgcttccttctagaggaactcaagaagaaggaaaaccagcgaaacagccactttcaaccacatgtagtagagctaaatctcaactaccagcagcagatatgcaagggaaaccgagccagcaacataggcgactacaagaactgtgatgacgacgaacagattcagcctgaggtggacgaagaacaagatagacaaatagatccggtgtttcaaaatgtaccaaacaatgaggaagttttgagctttgtgtacaaactgctggcagagcggaatttttcaggatggacatttgctaagattgccctgctgctgaagatcattggacaacagttgaatgcaattgaaatatggaaatatcatcccggattaacagttgattttatgcttaatttggagcaaaagatgtcggaaaactatgctgacctagccaaggtattctccgaacatgggtttatggaggcagaattctggcttacggctttctacctccaccccacatcatcaaattataacgaagtgaggcgctgttcgcgtattaagaaaaaacggcaggaggacgacttgctacctgctacgacaccacagaacgtcaagtacgaactgctgagctccaccatcgatgtggacgagattgtaaaaataacgaaccattacgatccagtggccgactacgatccgatacacaaatcgctgcaggcgttgcggcttccccgcagcatgatccaagaccttctgaccgtggtcttccaaccacggaataaacgatactcatgggctctcgattggcacacgctacacgagcgttgccatgcccttctcaaaagcccggacctcaagagaaaatttgtgtctcttaacatggccgaagctggcgacgatttgaagtacctccagatcgactatgccaaatacagggatcgccctcagttggactatggcaccatagaagagggctacgaaaatgcggttaatctcccagaggctgaggaagaagctgaacaaacgtcagcagtggatgatgaagcagagaaagccaaggagcagaaaaagcggcgacccgcaaaacgcaaattttgggacgaagtagtattttcggaagacgaggaggaggctgcctcaagcgattcggagccctactacacaggaaatggccgccggactcgggttagggcggcagccatggtagccaatgccatgttgtctgacatggatcgaagtgtgcgcggtgggcgacgatcgagctctccagagacatcacatcaccaatttcatacgcagcccgtcgtcgaggagcagccaaaaatcgcagtccagcctccaaaacaactgtgtctacaagaaacatctgcgcgtgtcgaaaagcgtacgattagcgaactgatggagtcacgacccaaatttaccaacgaaaccgtcggttttaagccgatcgccgacatatggagtttcaagaaggaagagctgcagaatgtggtagaagacagcagcagcatgatagagtgcagctcgatattaaacaaattcaaaatcttgaaggccctcaaaatggccaaagctgcaaaagccgccgtgcagccatgttcccagcttgttcaaaatatcgttcgcacgggatcggaaactgaaagcgtaaactcagaaacttccacgatggctacccacgacttcaacgaggaggaggtcagcgaaggttctaccggtgtaagtaaagagctaacaccttcgccgaccacaaagtctgatttaaccatggacccagaagtgttgcagcccactggtgagaccaagacgcatttgatccatgggagcctagaaactacaaaagtgccacagaagactccggagtttctgtttttgaccaaggagcccgtgagaactggacaacagacccaggagccactgggagatgccttaaaaactagtgacctaaaacaggtcatcccaaatggactgttcaaagtagagggactggaagcgagacaggcggccgaaaagccaaaacaaactggacaaccgcaacgggatctaccgaatacaagaaaacaaaaagataagcttatccacatgcagcgcttagggaatgctcagctgcctaatgaaatgtcaacgccatcagaaaccgggacagaaaccgacaccgcggaggagacccttctgtgggatggcagtgatgagaaccctaagaacaagtgcttacaatttgactcagtgaacaacgaatccaattccagatctgcaaacgatattaaggaaatggagacaaatcgtcaaatcaacgaatgcctgacgcgttcttcccaggtgtgcttaaccagattgacaccacgagacatagaaaaactcaggggagtaagagttcgtgttaagcgaactaatatggcaaatttctataacgaccagacacgtcgcagccaaagaaggctcacagcgagtcttaacggtcagagccgctcccacaccgaggacagcaatggatcttcaaacagctacaactaccgccaatatgataggcgccgcttcaagaagtttgtgcacatcacatcggactcgccagcaccttcggaatcgtccacgccatcgccgcgcatgatagccaagccggtcttcaagcacattacatccgattcctcgacagatctcgaggaagtgactcggtctgtttctgcgattagaagacgtggacgtgaccgtggacgcagtgggcccaagtgtataacagaaccaaatgtgcgacgatcgccttcctttcagccggatgtgatcgagttgtcctcggactctctttcgtccaactcaccaattccagccgcaaacccccccatgaataactttacacatgcaatggatatggatccgctttacgaggaggccatcattccattctaa

SEQ ID NO: 17121 - protein, 1310 aa, DROSOPHILA
MDLIFSQDVHDAEKFLDCAEKLEYDEFSAKMFVFCNAHSDVDVFELMGNDRLSQLIYGWEVCHLPTRDSESLKDPALRHMVRVLAHHSLLIWFSQEWKTCSEGLKQLLLYSLTKAVPSFYQIGELANFNWSYVLQFQTRPWSLPYLQQLFLNLKLNKHHAIEHPEGISLALLRLIQLFNAGNFEAVKQLALRMLAAWVKAHENDQFVSFEGDKNSITLIGHLYLLTVFVRDENRGFVIDNLMYNIRFYTQIMQEASMLHDINFTPARLIAHVCVRLQLGKNGFFEQIGFRKFKFSLVTSFAVMLEVYASYVLGNLLMELQALNEHDFLEHLPQFKELMYRYVEERESSERFLLEELKKKENQRNSHFQPHVVELNLNYQQQICKGNRASNIGDYKNCDDDEQIQPEVDEEQDRQIDPVFQNVPNNEEVLSFVYKLLAERNFSGWTFAKIALLLKIIGQQLNAIEIWKYHPGLTVDFMLNLEQKMSENYADLAKVFSEHGFMEAEFWLTAFYLHPTSSNYNEVRRCSRIKKKRQEDDLLPATTPQNVKYELLSSTIDVDEIVKITNHYDPVADYDPIHKSLQALRLPRSMIQDLLTVVFQPRNKRYSWALDWHTLHERCHALLKSPDLKRKFVSLNMAEAGDDLKYLQIDYAKYRDRPQLDYGTIEEGYENAVNLPEAEEEAEQTSAVDDEAEKAKEQKKRRPAKRKFWDEVVFSEDEEEAASSDSEPYYTGNGRRTRVRAAAMVANAMLSDMDRSVRGGRRSSSPETSHHQFHTQPVVEEQPKIAVQPPKQLCLQETSARVEKRTISELMESRPKFTNETVGFKPIADIWSFKKEELQNVVEDSSSMIECSSILNKFKILKALKMAKAAKAAVQPCSQLVQNIVRTGSETESVNSETSTMATHDFNEEEVSEGSTGVSKELTPSPTTKSDLTMDPEVLQPTGETKTHLIHGSLETTKVPQKTPEFLFLTKEPVRTGQQTQEPLGDALKTSDLKQVIPNGLFKVEGLEARQAAEKPKQTGQPQRDLPNTRKQKDKLIHMQRLGNAQLPNEMSTPSETGTETDTAEETLLWDGSDENPKNKCLQFDSVNNESNSRSANDIKEMETNRQINECLTRSSQVCLTRLTPRDIEKLRGVRVRVKRTNMANFYNDQTRRSQRRLTASLNGQSRSHTEDSNGSSNSYNYRQYDRRRFKKFVHITSDSPAPSESSTPSPRMIAKPVFKHITSDSSTDLEEVTRSVSAIRRRGRDRGRSGPKCITEPNVRRSPSFQPDVIELSSDSLSSNSPIPAANPPMNNFTHAMDMDPLYEEAIIPF

SEQ ID NO: 17122 - DNA, 3704 bp, DROSOPHILA
ccatgcccacacccgccatcagagtgatcaaatgtaatttccaatagctgccacaaatccatcattaccataatcattgtacacatgtgtaattgtaagtgctgcaatagttttgctaataatattcttaattttaaaggtcagttttgttttttttcctgacataactatgatctttagaatctatagagtatatatctaatatcccttgcattttgttgttgactgacatcggttgggttttccaacgaggtgcatgcgagttgacttgaaaattccacaaagtaaccaaaacgctaaacaactgccacaccaggctaatccccacctgccactaaccaagtgcccaagggctggaaacgaggcctgaatgggccccccttcggcctcaaacctcgtgggaaatttctatatgactgtgtaaatacaaatcgcgtttgtaggaccgactttaatatatagtcgcgcactgacacagacatgtcgtgcatatagttgaggtagctaggtagcactactgctagctccatagtacatatcgacttgtggcggggtaaaaagccactttgttatagcattcttgttgttggcattgctgctgttcgccaactgacaatgaattggagtttattttattttcgcttcaattcgattgtctcgctgtggatttcgctttatgtccgcccgtcgagctatttagcagctcgcaaatcgctagactaaacttgttgtcagccagccccagtcagtaagtcagttagggctaattgccgccacgcaggacattcgcggagttcttttccagggtatcgcgatgtggcattgttgttgcggtttatagcctcggcgcgtgcggcacagtcagccactttgattaatggacgactgacaactggcaaccgacgatgacgccaaaggaaggcgacatcccgtgccgtctccaactccttatgctagtgcattgaattcgggtgaactatgcccgcaatcacggcaacagtttgtcgtttatccaatcgttcgtttatagatatcacttaacatatacgccgctgtgtatacatttcacatttaagcctagagaacagagccggaaacttaagctagacaatggaggctccctgttggttggttcgctggttgatcttcacgtgcgtctgccgcttcttttcctccttgaaggcctccgtgttggccttcttttcgatgcgacgctcgttgcgatagtccttcagcaggcgcttccgctcctttttctcttcgtgggtctcgtccttgggtctaatggacagaacgcttaatgtggagagcaccgatttggcgcacagtgacttcggcccagtggcagcgggtgattcatcggccaaattagcaagcgccttggctgtcagttggccatcgaccccaccacgcaggacattcgtgggcaggcctgtcttcgggtcgatctgaatgggagctggatttgtgctggcactggagcgacgactgcgtcgcggctcgtcgatcaccttcgggtgattgtagatattcgagtaggtggacaggatagactcgcagtcccacttcttctgcttagggtcgtcgacctcatattccaccaactcctctgtgggatcttcctcaccctcgaccacatttcggtacttttcgatacgctcgcgatcccactccttgttatactcgatgcccttgtcctttttcttgaactcctggaagcactgcatcacaacgggatgtttctggtgccagttgccctcgatgtcctcgagagccaagtcgcccagttccggatcatcgtatgtggcgtaaaacttctcgaagcgatcgtccaatagggacagctgctcattgcgccgaattacgctggaggacatggagtactcggtgaagcgcgacttgacctcttcgtcgtcaaagcgacgttcgcgcatcaggggtgccaaacggtccattagttcgtcctcattttcatcctcgtttaggtcatcggaatcgaagtccatgtcagattgctcctccccatcttcgtcatcccattcctcgtcgtcggagtcgccctcggccatggcctggattacgaagtcatcttccagctcttcgttctcacaatcgctgtccagggcggcgaccacatcgggatcccagtcgagacgcaaggtttgaggagccgccttgtttagcatgccctcggattcctcaaactcgctagcgaacaccgagctgggcagcataagcttgggcgcagggcccggtttctcactatcctggactttctgctttctcgcttgattgggattctccatgaactcccaaaccacgtcgttttcacgtttcttcagatgctgcatgtaatcatagtcatcgtcgaagtgaataccaaacttcttcagctcctcctgccgttgggcgggatcggtgggtggctctggatccttcggcttttgctggcgcgccgctgcctcgaggagcaccctctgtggagcattttcatcggtcaccaggggatcgtgttgactgcggtgcaccaaatggaaggtgaccgccttcttgcggtcaatgtacggtttcttgcccttaacctgcaatggaaggaggtctgtgagataggtttcatccagtttagaagtgttttacccaccattattggattgttttcgtaaaatcttttgtaaatacagagaaacacatgtgcctgctggagctgccacccagaaagggattttgtattactgccttgcggtcacactgtttttttcactgcgcagttggccttagtgttgaacaacgcacactcaaattcgaaaaaaggcgccaatggattattattaattgaacgtatgcgatttctcttacatacatcaaatttcttttacatctacagattattaaaataaatcatgttaaaaagaagccaagttctagttttttcattgcatgaaattaatagtttttgagattttgttctgatggtaaaaactgtgaacagcacttttcccatttgattgtaaattatatataccataataagtaaaaactaaagttgatttgtaaaaatctgccaagtctgaaataagtatggaaagacaaatttgtatttggatatttattaaatcgtttttatttgttgtatgtacatttacaaacttgacacttcgaaaacaattatacactcgcaatgttttacatacacttgggtgtgaatatgattaaatttctacacgtttacattcatatgggtctgcaatctcgacagactctatagattatacataaacaaggtcttcgaaacatgtacatgatactaataagtaataatagttagtctaaatagtaaaatcaatctcttctaccaattaaaagcttgcaaattatcaacttaaagtaaatcaaatgtttcgaatatcaggctccttgctacgcgtaattatactcacagtccttacagttttcttgactctcaattaatagacgtaatttagtttatttcaaaacatttttcgacatgcacagaacaaattcgaatcgaagcctaactgagaagctttcaatagtaagcgatactctgaacagactaaaaataaatataatctagtcactttttgaagatcggtatatagttattgcctatcgagtttttcgggcaccggaatcgagcaggtcgctattgtctttggatgacctcgccagtccggcgccctcaa

SEQ ID NO: 17123 - DNA, 1645 bp, DROSOPHILA
ctccagcaggcacatgtgtttctctgtatttacaaaagattttacgaaaacaatccaataatggttaagggcaagaaaccgtacattgaccgcaagaaggcggtcaccttccatttggtgcaccgcagtcaacacgatcccctggtgaccgatgaaaatgctccacagagggtgctcctcgaggcagcggcgcgccagcaaaagccgaaggatccagagccacccaccgatcccgcccaacggcaggaggagctgaagaagtttggtattcacttcgacgatgactatgattacatgcagcatctgaagaaacgtgaaaacgacgtggtttgggagttcatggagaatcccaatcaagcgagaaagcagaaagtccaggatagtgagaaaccgggccctgcgcccaagcttatgctgcccagctcggtgttcgctagcgagtttgaggaatccgagggcatgctaaacaaggcggctcctcaaaccttgcgtctcgactgggatcccgatgtggtcgccgccctggacagcgattgtgagaacgaagagctggaagatgacttcgtaatccaggccatggccgagggcgactccgacgacgaggaatgggatgacgaagatggggaggagcaatctgacatggacttcgattccgatgacctaaacgaggatgaaaatgaggacgaactaatggaccgtttggcacccctgatgcgcgaacgtcgctttgacgacgaagaggtcaagtcgcgcttcaccgagtactccatgtcctccagcgtaattcggcgcaatgagcagctgtccctattggacgatcgcttcgagaagttttacgccacatacgatgatccggaactgggcgacttggctctcgaggacatcgagggcaactggcaccagaaacatcccgttgtgatgcagtgcttccaggagttcaagaaaaaggacaagggcatcgagtataacaaggagtgggatcgcgagcgtatcgaaaagtaccgaaatgtggtcgagggtgaggaagatcccacagaggagttggtggaatatgaggtcgacgaccctaagcagaagaagtgggactgcgagtctatcctgtccacctactcgaatatctacaatcacccgaaggtgatcgacgagccgcgacgcagtcgtcgctccagtgccagcacaaatccagctcccattcagatcgacccgaagacaggcctgcccacgaatgtcctgcgtggtggggtcgatggccaactgacagccaaggcgcttgctaatttggccgatgaatcacccgctgccactgggccgaagtcactgtgcgccaaatcggtgctctccacattaagcgttctgtccattagacccaaggacgagacccacgaagagaaaaaggagcggaagcgcctgctgaaggactatcgcaacgagcgtcgcatcgaaaagaaggccaacacggaggccttcaaggaggaaaagaagcggcagacgcacgtgaagatcaaccagcgaaccaaccaacagggagcctccattgtctagcttaagtttccggctctgttctctaggcttaaatgtgaaatgtatacacagcggcgtatatgttaagtgatatctataaacgaacgattggataaacgacaaa

SEQ ID NO: 17124 - protein, 493 aa, DROSOPHILA
MVKGKKPYIDRKKAVTFHLVHRSQHDPLVTDENAPQRVLLEAAARQQKPKDPEPPTDPAQRQEELKKFGIHFDDDYDYMQHLKKRENDVVWEFMENPNQARKQKVQDSEKPGPAPKLMLPSSVFASEFEESEGMLNKAAPQTLRLDWDPDVVAALDSDCENEELEDDFVIQAMAEGDSDDEEWDDEDGEEQSDMDFDSDDLNEDENEDELMDRLAPLMRERRFDDEEVKSRFTEYSMSSSVIRRNEQLSLLDDRFEKFYATYDDPELGDLALEDIEGNWHQKHPVVMQCFQEFKKKDKGIEYNKEWDRERIEKYRNVVEGEEDPTEELVEYEVDDPKQKKWDCESILSTYSNIYNHPKVIDEPRRSRRSSASTNPAPIQIDPKTGLPTNVLRGGVDGQLTAKALANLADESPAATGPKSLCAKSVLSTLSVLSIRPKDETHEEKKERKRLLKDYRNERRIEKKANTEAFKEEKKRQTHVKINQRTNQQGASIV

SEQ ID NO: 17125 - DNA, 6705 bp, DROSOPHILA
tcaaactcgctagcgaacaccgagctgggcagcataagcttgggcgcagggcccggtttctcactatcctggactttctgctttctcgcttgattgggattctccatgaactcccaaaccacgtcgttttcacgtttcttcagatgctgcatgtaatcatagtcatcgtcgaagtgaataccaaacttcttcagctcctcctgccgttgggcgggatcggtgggtggctctggatccttcggcttttgctggcgcgccgctgcctcgaggagcaccctctgtggagcattttcatcggtcaccaggggatcgtgttgactgcggtgcaccaaatggaaggtgaccgccttcttgcggtcaatgtacggtttcttgcccttaacctgcaatggaaggaggtctgtgagataggtttcatccagtttagaagtgttttacccaccattattggattgttttcgtaaaatcttttgtaaatacagagaaacacatgtgcctgctggagctgccacccagaaagggattttgtattactgccttgcggtcacactgtttttttcactgcgcagttggccttagtgttgaacaacgcacactcaaattcgaaaaaaggcgccaatggattattattaattgaacgtatgcgatttctcttacatacatcaaatttcttttacatctacagattattaaaataaatcatgttaaaaagaagccaagttctagttttttcattgcatgaaattaatagtttttgagattttgttctgatggtaaaaactgtgaacagcacttttcccatttgattgtaaattatatataccataataagtaaaaactaaagttgatttgtaaaaatctgccaagtctgaaataagtatggaaagacaaatttgtatttggatatttattaaatcgtttttatttgttgtatgtacatttacaaacttgacacttcgaaaacaattatacactcgcaatgttttacatacacttgggtgtgaatatgattaaatttctacacgtttacattcatatgggtctgcaatctcgacagactctatagattatacataaacaaggtcttcgaaacatgtacatgatactaataagtaataatagttagtctaaatagtaaaatcaatctcttctaccaattaaaagcttgcaaattatcaacttaaagtaaatcaaatgtttcgaatatcaggctccttgctacgcgtaattatactcacagtccttacagttttcttgactctcaattaatagacgtaatttagtttatttcaaaacatttttcgacatgcacagaacaaattcgaatcgaagcctaactgagaagctttcaatagtaagcgatactctgaacagactaaaaataaatataatctagtcactttttgaagatcggtatatagttattgcctatcgagtttttcgggcaccggaatcgagcaggtcgctattgtctttggatgacctcgccagtccggcgccctcaactttgatttcatttgcgattctttacaggttttaagctaacgattataatgataatttgattatttgttgcctcccagttggctttatttgcttgaaggagagcgcatcactagacaaaagcacttggattgcagctaggctaggtacagtctggtcggcggagtatttaggttatcccaaataactaatccattactttagcgcctccttggccctctgctcccactcggcgcgtctctggtggattcccttgaactcgcccacggtggctgatctctcgatgggtttactgggcgctactgatgctgttgctgctgcagatgttgcagttggtgctgcaacaggtgttgctgctgccggagacgttggagtagttgctgtcgggttggcctgcttcagttgcagggaaaacctttcagcagcgggccttgcactcccattaccattgcttatattgttattcaggctattgcggccctgattgctggtcttaatggggggcaggtaggtgaccaccttgggtggcaccttctgttgctgctgatggttattgttattattgttgagattgcggaagtctgcaaccgaattgcgattggtgctggggtgatgggtcgcctggggctcgctcttgggcgccagcttgtccagcttctcctcgctgttcgactgattctccttgtcgctatccacgctctgacctccgcctccactgggcgacagcttcttactgttgctgctcactggagcggctggttgtacctgtggcaatgtcacaacgtcatcatccttcacttttagtgaacggcgggcaaagaccttcatcagctcgggtgtgggatcgtccttggagggactgggattgccattgcagctcgcaaaggatttcttgcgcaacaccacgggattggaggtgggtgaagtgttgccattgacctcgaatatttcgggagaggtgggagtaaccggagtgactggaatggcgggcgtggctggaatcaccgaaggagtgggtggagcagtgctttctgtcttggtaatggacttcctgcgctgctccactgacttcgttcgctcttcgctgaggaataaccgcttgcgatcctccagagagaggcgattgctcttcactggctccttcgggctgactggctccttggtatctttaacttcctttacgttcttgggagcactgagaatacttttcgaaaacccattgcttttaggtgtgcttggtgtagtgactggagtaactggagtggctaatccttcactactactaccatagctattcctcatactagtggcactaacggatttcaattgcctgctcaagctgggctccagtgccgttggcctgattgccggacttagaggcttcggctgagggtgctccacaatctcgattcccgccagattttcttcgctgctccgtcggaagctgagatcatcgttgctctgactccgctccgtgggcgacttaaagttcttggctagcaccaagtgattggtcttgttgtgcagacgcgcctggtccacgcgattcagctggatcttcatgaactccggctcaccgttattctccacgttactggaattccggcgactgctgttggaggatccctgacctttggccggtgtggtgggtggactgttcgagagcttggcactcttggtcaaaggacttgccgggctgggacttggatttgccgcaggagctgtcatctttgctcccaaatcgagtagcttaggtcgctgtttggtcggagcagtttgctccttgggcagcttatccgccacattaccggatttccttagaacgctcaccagaggtgatttcacgataaggtcaatgttctgctcgatcttggagatatcagccgaacccggactactaactattagctttgtggaagcggccttttgcggtgagattttcgcagcagatggcaactggcccgtggattcagctcgggactgcagcaatttgttgtcgttgatctcgaatcccagtgacacacacttggcgttggaggaaatcggggaacagggcgattgtggcgcctgcttgtggtaggcaggcacacgaaaacttagcgacagatccggcaaactcggcatattgttgtgcacggccgtggagtccacagcctcgtcctcataatttcgaaagctgcgggacttttcaattgtcttgcgctgcttctcctcgtagtacaggggcgagggctcatccgtgctggtctccaacgagttggaggagctggagtgctggcccactgagtcactggatcgcgatagcttctgctggaaggcactcaagcccacaatccttggtttcctctcgaaatgcgttgaggtctccactttgttctgctgttcccgcaccaaagtggtggactggaaggtgtcgttgccccgcgagctcttcgacagcaagttggtcacatcgttacccgaggtgatcttctccagcggagcagctcccagttccttgggcatgtatcgctgcctggcggcaggacctgatttcggctttaatgccgtgggtggatgtggatgcacaccgtagttactgaccatggcgttcaatccgtgcttgccctcgttgtgaatctcccgcttgattgtttgtcgcgtctcctggatgtgctgctcgtgcgatgtggcactgcgtgacttgtccggcacttgaacggcatcccgagcagcggcctccaagcaggaggttgagatctgcagcttcttggccacgctctggctggaatctgtatcctcaactccgtcgttggccctggctatggatctcttggagttccggtggatcaggcggcgcaggaatccactctcgttctccttctcccgctcgttggccaggaagtcgtccccatccgtggaagactctccgcgattctccagcaaagcgttgctcttgctggtcagacctcgaagtccgaacatctgagatgtcgtggaggacgagcttgtggtcttagtggtgctggtgatggtggagctctgctcgattgtattggttcgcttggttgtcaccgagctggcggcgttagcctgaaccggcggtgcaatggcagttaaagttttcggtggcaaagagcgcgtcttgatcttgagatcggcttctaaaaattggtattaaagagtttcgtttagacttgatgccgacataatatattgtcagtttcttaccatggacagccctcaatccagggctaatctttagcacatcctcattggcctccggaatggaagtctgaaaggtaataatagtatttaaacgtttaatatacaaatatgaactaattttcccatgattcatgtcggcgccatgttatatccacttacctccaatgtcatccggtgctgcctggtgggtcctttctttttcacaggcctaatggccattttgtgcttggccgccgcatgggaaagacgatgacgttctccgcccacggcgtccacgtcgtcctcgtgatgtgatcgcagtatatccgagcccatcgagatggatgaactggtggaaactcgcgagtgatgacggtattgatgggagctctggctgtcctccgtctccacttcggcactattgacactgtgcaagctgagtgaagacacctcgctctggtgaccccgcgattggtgacccactccggaggtatttcgactgctggttccaccccctgctcgccgttgcggagaagccgggctgcggggcagacccaaatcctcgtcagaggcatcgggtctgttgcgtcgcttgcgcaggacatccgtgagttccgcctgaaatggatatttgtaatgatgttattcgggttttatgggcatagagtgagtggttcatggtttcatttctgttgggttacccagcttttccagcggaaaacgaaacgagcccgcagacaactgcgtcccaggcgactttcgcccatggaagagccacccagtttcatcttgaagggattctgcttaaagtcgatcatttggtgggcctcacagcgcagacgagactacaaatgactgatggatgggtaatccccgattaaactgggcaactgtggctaccaaagaagcctgcgattccaaaaagattgcgaaaatacctaactaattcttaccgcaaacgaaagctggaagggattggactgcgccctgagagaacccgaacctccggcaaccattgtgacgttaatatgactatggaaataactctgcctatgaggatcacgcgatctcaaagatttcactttcaactcgagcagcggcaactgacgacacccaagtgcaatgtgcaactgaagatttcgatgcagatgcatctcgagagtgaaatgaaaatgaaacgaaaatgggaatgggaatcggtatggaaatggaaatggcgtcgcatttgctttttacctagacgaacacaattggtgcagggcaggcacagaagatctgttcattgtcagctctcgaccgaatttcaagggtactactcgagggacccgaactctatccacagagtaaacacaacgagtccgaaaacgagaaagaatccctcctccaactccggaattcccgctttttcgtaacccatgttgttcatctatcagtgtttgcggcgcgtgacgtcgccatctgtttgttggactcatttctggtgaggatgctatttttgggagctcgttgctcgaggattaagtgctgggctggttcaggttaaagacctcgcccatcaattctagctaaacaattgcaattggggatttgggggcgagttcaatgttctgcaagatgataaatcgtggcgcctgcatccctaggtacatatttatgtaattcaaagcatattttacatttttaattaagttattattaggacacatgggcacagctttacaaagatgagatgtatctcacctagatgctttctggatctaacgcttaatgcgataactttatccttttcatatagtgaatctgcagtaaatgaaaacaacgttttacataacttcgctcagctgcttcaattccgcgaaattctcggtgtttcgtgtatcctgcaggtagttgtcctgtgtaccttaacccattttccagctgagctacctgcaccggatagccaccactgagcaaagttccacttcgcctttgagtaggaaaatcgcggagcggactcgagcagtcgtcacgttc

SEQ ID NO: 17126 - DNA, 4355 bp, DROSOPHILA
atggttgccggaggttcgggttctctcagggcgcagtccaatcccttccagctttcgtttgcgtctcgtctgcgctgtgaggcccaccaaatgatcgactttaagcagaatcccttcaagatgaaactgggtggctcttccatgggcgaaagtcgcctgggacgcagttgtctgcgggctcgtttcgttttccgctggaaaagctgggcggaactcacggatgtcctgcgcaagcgacgcaacagacccgatgcctctgacgaggatttgggtctgccccgcagcccggcttctccgcaacggcgagcagggggtggaaccagcagtcgaaatacctccggagtgggtcaccaatcgcggggtcaccagagcgaggtgtcttcactcagcttgcacagtgtcaatagtgccgaagtggagacggaggacagccagagctcccatcaataccgtcatcactcgcgagtttccaccagttcatccatctcgatgggctcggatatactgcgatcacatcacgaggacgacgtggacgccgtgggcggagaacgtcatcgtctttcccatgcggcggccaagcacaaaatggccattaggcctgtgaaaaagaaaggacccaccaggcagcaccggatgacattggagacttccattccggaggccaatgaggatgtgctaaagattagccctggattgagggctgtccatgaagccgatctcaagatcaagacgcgctctttgccaccgaaaactttaactgccattgcaccgccggttcaggctaacgccgccagctcggtgacaaccaagcgaaccaatacaatcgagcagagctccaccatcaccagcaccactaagaccacaagctcgtcctccacgacatctcagatgttcggacttcgaggtctgaccagcaagagcaacgctttgctggagaatcgcggagagtcttccacggatggggacgacttcctggccaacgagcgggagaaggagaacgagagtggattcctgcgccgcctgatccaccggaactccaagagatccatagccagggccaacgacggagttgaggatacagattccagccagagcgtggccaagaagctgcagatctcaacctcctgcttggaggccgctgctcgggatgccgttcaagtgccggacaagtcacgcagtgccacatcgcacgagcagcacatccaggagacgcgacaaacaatcaagcgggagattcacaacgagggcaagcacggattgaacgccatggtcagtaactacggtgtgcatccacatccacccacggcattaaagccgaaatcaggtcctgccgccaggcagcgatacatgcccaaggaactgggagctgctccgctggagaagatcacctcgggtaacgatgtgaccaacttgctgtcgaagagctcgcggggcaacgacaccttccagtccaccactttggtgcgggaacagcagaacaaagtggagacctcaacgcatttcgagaggaaaccaaggattgtgggcttgagtgccttccagcagaagctatcgcgatccagtgactcagtgggccagcactccagctcctccaactcgttggagaccagcacggatgagccctcgcccctgtactacgaggagaagcagcgcaagacaattgaaaagtcccgcagctttcgaaattatgaggacgaggctgtggactccacggccgtgcacaacaatatgccgagtttgccggatctgtcgctaagttttcgtgtgcctgcctaccacaagcaggcgccacaatcgccctgttccccgatttcctccaacgccaagtgtgtgtcactgggattcgagatcaacgacaacaaattgctgcagtcccgagctgaatccacgggccagttgccatctgctgcgaaaatctcaccgcaaaaggccgcttccacaaagctaatagttagtagtccgggttcggctgatatctccaagatcgagcagaacattgaccttatcgtgaaatcacctctggtgagcgttctaaggaaatccggtaatgtggcggataagctgcccaaggagcaaactgctccgaccaaacagcgacctaagctactcgatttgggagcaaagatgacagctcctgcggcaaatccaagtcccagcccggcaagtcctttgaccaagagtgccaagctctcgaacagtccacccaccacaccggccaaaggtcagggatcctccaacagcagtcgccggaattccagtaacgtggagaataacggtgagccggagttcatgaagatccagctgaatcgcgtggaccaggcgcgtctgcacaacaagaccaatcacttggtgctagccaagaactttaagtcgcccacggagcggagtcagagcaacgatgatctcagcttccgacggagcagcgaagaaaatctggcgggaatcgagattgtggagcaccctcagccgaagcctctaagtccggcaatcaggccaacggcactggagcccagcttgagcaggcaattgaaatccgttagtgccactagtatgaggaatagctatggtagtagtagtgaaggattagccactccagttactccagtcactacaccaagcacacctaaaagcaatgggttttcgaaaagtattctcagtgctcccaagaacgtaaaggaagttaaagataccaaggagccagtcagcccgaaggagccagtgaagagcaatcgcctctctctggaggatcgcaagcggttattcctcagcgaagagcgaacgaagtcagtggagcagcgcaggaagtccattaccaagacagaaagcactgctccacccactccttcggtgattccagccacgcccgccattccagtcactccggttactcccacctctcccgaaatattcgaggtcaatggcaacacttcacccacctccaatcccgtggtgttgcgcaagaaatcctttgcgagctgcaatggcaatcccagtccctccaaggacgatcccacacccgagctgatgaaggtctttgcccgccgttcactaaaagtgaaggatgatgacgttgtgacattgccacaggtacaaccagccgctccagtgagcagcaacagtaagaagctgtcgcccagtggaggcggaggtcagagcgtggatagcgacaaggagaatcagtcgaacagcgaggagaagctggacaagctggcgcccaagagcgagccccaggcgacccatcaccccagcaccaatcgcaattcggttgcagacttccgcaatctcaacaataataacaataaccatcagcagcaacagaaggtgccacccaaggtggtcacctacctgccccccattaagaccagcaatcagggccgcaatagcctgaataacaatataagcaatggtaatgggagtgcaaggcccgctgctgaaaggttttccctgcaactgaagcaggccaacccgacagcaactactccaacgtctccggcagcagcaacacctgttgcagcaccaactgcaacatctgcagcagcaacagcatcagtagcgcccagtaaacccatcgagagatcagccaccgtgggcgagttcaagggaatccaccagagacgcgccgagtgggagcagagggccaaggaggcgctaaagtaatggattagttatttgggataacctaaatactccgccgaccagactgtacctagcctagctgcaatccaagtgcttttgtctagtgatgcgctctccttcaagcaaataaagccaactgggaggcaacaaataatcaaattatcattataatcgttagcttaaaacctgtaaagaatcgcaaatgaaatcaaagttgagggcgccggactggcgaggtcatccaaagacaatagcgacctgctcgattccggtgcccgaaaaactcgataggcaataactatataccgatcttcaaaaagtgactagattatatttatttttagtctgttcagagtatcgcttactattgaaagcttctcagttaggcttcgattcgaatttgttctgtgcatgtcgaaaaatgttttgaaataaactaaattacgtctattaattgagagtcaagaaaactgtaaggactgtgagtataattacgcgtagcaaggagcctgatattcgaaacatttgatttactttaagttgataatttgcaagcttttaattggtagaagagattgattttactatttagactaactattattacttattagtatcatgtacatgtttcgaagaccttgtttatgtataatctatagagtctgtcgagattgcagacccatatgaatgtaaacgtgtagaaatttaatcatattcac

SEQ ID NO: 17127 - protein, 1218 aa, DROSOPHILA
MVAGGSGSLRAQSNPFQLSFASRLRCEAHQMIDFKQNPFKMKLGGSSMGESRLGRSCLRARFVFRWKSWAELTDVLRKRRNRPDASDEDLGLPRSPASPQRRAGGGTSSRNTSGVGHQSRGHQSEVSSLSLHSVNSAEVETEDSQSSHQYRHHSRVSTSSSISMGSDILRSHHEDDVDAVGGERHRLSHAAAKHKMAIRPVKKKGPTRQHRMTLETSIPEANEDVLKISPGLRAVHEADLKIKTRSLPPKTLTAIAPPVQANAASSVTTKRTNTIEQSSTITSTTKTTSSSSTTSQMFGLRGLTSKSNALLENRGESSTDGDDFLANEREKENESGFLRRLIHRNSKRSIARANDGVEDTDSSQSVAKKLQISTSCLEAAARDAVQVPDKSRSATSHEQHIQETRQTIKREIHNEGKHGLNAMVSNYGVHPHPPTALKPKSGPAARQRYMPKELGAAPLEKITSGNDVTNLLSKSSRGNDTFQSTTLVREQQNKVETSTHFERKPRIVGLSAFQQKLSRSSDSVGQHSSSSNSLETSTDEPSPLYYEEKQRKTIEKSRSFRNYEDEAVDSTAVHNNMPSLPDLSLSFRVPAYHKQAPQSPCSPISSNAKCVSLGFEINDNKLLQSRAESTGQLPSAAKISPQKAASTKLIVSSPGSADISKIEQNIDLIVKSPLVSVLRKSGNVADKLPKEQTAPTKQRPKLLDLGAKMTAPAANPSPSPASPLTKSAKLSNSPPTTPAKGQGSSNSSRRNSSNVENNGEPEFMKIQLNRVDQARLHNKTNHLVLAKNFKSPTERSQSNDDLSFRRSSEENLAGIEIVEHPQPKPLSPAIRPTALEPSLSRQLKSVSATSMRNSYGSSSEGLATPVTPVTTPSTPKSNGFSKSILSAPKNVKEVKDTKEPVSPKEPVKSNRLSLEDRKRLFLSEERTKSVEQRRKSITKTESTAPPTPSVIPATPAIPVTPVTPTSPEIFEVNGNTSPTSNPVVLRKKSFASCNGNPSPSKDDPTPELMKVFARRSLKVKDDDVVTLPQVQPAAPVSSNSKKLSPSGGGGQSVDSDKENQSNSEEKLDKLAPKSEPQATHHPSTNRNSVADFRNLNNNNNNHQQQQKVPPKVVTYLPPIKTSNQGRNSLNNNISNGNGSARPAAERFSLQLKQANPTATTPTSPAAATPVAAPTATSAAATASVAPSKPIERSATVGEFKGIHQRRAEWEQRAKEALK

SEQ ID NO: 17128 - DNA, 9936 bp, DROSOPHILA
aaaagtgggagttccaggggggaaaagtggcgggcggttgatggagcgacttactgcatgggtgcacagtaagaaaatattgggtcgtcaatagagaagtcataatcaacaactaaagtgtaaagtatatatataaacaattaattaataaaatatgaatcctatatatttgttgaaataaataccaaagtagatttagtaaacagcacagattttaatttctttaaatataaacttttttttaaatatatttctttcagtgccgtatctaacattggtttctgtttccagttgcaacttgcaagacgcgtgcgtttttcttttttcactcaaaaaaagaagagaaaaacgctcaaccgacttatgcattattgttgataatgacgttcacaatgatgttttagtctattagataaccatcttagccagactattttattttggactttcatttggcacaagagtttcaattcgatttaattagtttggtttgcaattgttttggaagttactaaatagttttatcaatgatgaaatctgatttgggaaataaacttaagccaatagagctactatttttggtagttatttaactcatccccatgggaaaaacactcaattaatggatgttctgtatcgaaaataagtcagttaatcaaagtggtgacaaagttgtgttttccccaccaaactcgaaaaatgttgagtcaatggactctagagaagatttggtcatcacaatgcagatacgagtgccaacaaagccaccaattgactttgattaaaatcaatttagattgattgcagctcaagtgctcagataacaaaaacatcaagcggattcccccagtgacccggggtccgtgaactttgttcaatgaaaaacaaaagtaaaatcacttcctcctattgccaaattgagagccataaatttgtattaaaatgggccaaataaatccgatttcactgggaatttggaccttaaaaggtgtagactccatcatacaggaatttggttccaaatttcactgggaatttggaccttaaaaggtatagactccatcatacatattaagtatttaaataactcaccttgagtacaatggatagactgctggctgtggccgattcagagaagacgctgtcatgtgactgggacagggtatcccgagagtaatccctgaaatcggagattgtactaccgctgtaactgcgaaatggagatgaactcacccgtccacatccaggagtcgaccttcgctgaggctacgctggctgtcggagatgtcagcggcgccaccagctccggatcctgatcctgatcctgatcccaagcctaggttggactccagttcctgcgaggagtcacccacgctgcgtagatggcgctgttggattctctgctcggcaaagtagctgctccggttaaggactagtgaatccgggaagacggccacgccgccatgctgtcgctgggcctggtacatggcttcctgcggcgattgcgactgcgcttgggaatcgggttggactgcaacctggctgtggtcctgcttgctggcccgttttttgcccagaagcacacttagcagctcatcgcgatgcgaaccgtacgatttggacttgggcagcgattgcgtctggtagttctccttcagctgctggggattcaggggagatcctgttggcgaggcgatcccgctgcgcagattcttctcactgctgctgctggcgggcggtggcaaggtgttgcaggatccgggtcctggcgactgacaggatgctggactgtccgtggagctattaatcgtacgtcgccggaagatgcgacgcaggttacgaagcggatggaaacgacgacgcttctgctgctgctgttgctgctgctgatttggatgctctgaaaggaccaagaaatatgcttaacataaggccatttttttttttaatttttttatttcgaaatataagtgatggcagctttccagacgcttgctgctgcaatatattttaagatccgtgtgtttaataaattgtatcgttagttaacggaaattatttaataaataattaaaagatatttatattagaattttagaatatttcagtaaatataaatgtgaggcattaacatgttaagtagggcaatgtatgcttccgctttgattgacacgctggcttaaatattccggagtgagagcaaaatcgcttggggattaggttttcacactctggcgaaggaaattaaattatcagcgatggaaattgcgttatggcagcaacagccacggaatcttatgcttcctcccttttagtaaatccaatttgataaaggatttccattaaagagatgacaaaattcactttgcaatcagtacatcagtacttccgtaaaaataacccaaacagttcgtagtaacttttgaggaagtggtcaacttcctatgttactcagcacagttgagcctatcgattattaatacaatttttctgtcattcatgagaagtcgagaccccaaatacacaaaaaaaaaaaaactaaatgagcgataagaagtaaacaataagcgcagcgaatggtaccaaaaacatgaccataaataggcaaaaagttgaagaactctcaattgctggaagttcctagccgagtgagagggaaatatgtagggattaggagagtgacaggaatggcttcttatcgtcgataagaatgattggacaccacgtgaaagccgcgtatagaagcctactagacaaggtcatatcgtatctcaagttatatacacaatttgcaatacttaaaacaattgaataggaaaatccgaaagcgaaaaaagggttataaaaaacgcttatcaatcgatttgagttatcttttatagcttttatagctttttccttttttggatatctgtagacgcaaaatgtttgcacaatttagatggccgataaggcagctaaaagaaaaagaaccatttcttatcgttcataaagaattgattgcattttgcaggtacataaatgcatcagagctaagtgaagtgtaaatactacgaatggcgggtttagttgggatttcatatatgggtttataatcgatacgtattttcactactgctgacctcattatgactgataagatgaatgataagctcctcttcagtcatctccgaatatttaacatctcctaaagtgactcacctaccacccgtcatcactcttttttgtgtgtcattaccagaaatgaaagtttcgaaaacaaatacccatctttcagtggaaagtctgcataccagcggtggtaagtgcatatattaattagagaaaagaacgccgccgaacggaagtacaagaatgtcgaaaaaaataaaatcaaaataaaatgaactctgccaagaaagcttcgacctctaatcaaaaaaaacagtcacgttttgaggccacgacacgcgagcagcaaaatatactacatatatatatatataccatatatacaaaacgtatatgtatttgaatttgtttatggccaaacacatgtgtagtcatgggtacgactacttcatttatgtttttttttttcgctgatggctcgattttaatgattaatttcacctgcgttggggctggtcatcgcttgattagtcatggaaaatgaagtactacgatatataaaaaaaaattattcgaggggcaaaaggactcccggtggcaagtcattctatttattgccccttggggtgtctggctgtctgcctcagttcgtcgccaaaattgcttagggaccggcggctaatggaattttaactgaacaaaagcgggaattaccctcccatttagcaagtgaaaattgtttatttatggaatgcctaattgggtcagccagtcagtcgagaatggaattacttcttcagttcgctgaagtttttaaaattaattaacaaactcttaaattgaaaagtttcgacttgactctgtctaactaacatggctgtgattcactttatgaggcaatctcgattacatcagcattgtggatacattacgagtatttctaatttatctaaagtctattgagcaaaatttgccattgcctaaagagcacccatattgttcaacttgccattgcccgctgtcatcggtttgggtttcgctttttccgcgaatgtgggcgaaatcttggcgtcattgtcatctttggcttggcatggctttggtaattcatcaaaagcgattttcgtcttttcaatttggcaatcggatggaatggatgccatggggattaatgttagctctaatagcgacttgcccacgtgggatttttggaggtgttcaagtgacaccgattgccattcgattcagaatttgcaattccaaaaaggtttggctgtgggttcgttatttattaattaatcattggcaaaagcaatctacttgccccacacacacactcagcatgcaaattgtgcaaatcaaatggcgaacaacttttcagccgattgcagtaattggagacctttttttttgccagtttttctttttttttttgccagttttttgtagccaacggatgtgagctgctcgaccagctccagctcttgggattgttgtattgggtaaggtcaagtgagccacgcccacatcgcacgcggccgccccttttggaacacaccattgtgggcagcttagccgcttaacaagtgctgagttcacttgcgtggaataaaaatagcaaaccatcgcagagaacgagaatcgagccagagagatagacaaaagctccaagaattgcacaacgctagcagtaaaataaaactaaattaaaagaaataaaacaaaataaaataaaataaaatagaaactgctctcggggccttcaaatgttggcttgactcgtgtgcatatagtaaattgcaattctgtaaacctcgagaatttaatgttatgccgatggatttagccaaggttcgttgagtttgttggtcaaagagttcaacaggcgtatgattaattacatcaacactgcgaataatcggccagctttcaatcaactactgcgtaattgtttcacacaaaaatcgctgcgatatcgcagcatttgcggctatatagattaggcatagtggccaataactataaataacttggtcgtagagctatcaaaaaacgtatttcttgaaattgtataatccaaagtacacaaaaaaagaaggagacaataagtgtcagggcttaaaaactttaattctcgttctttataaatcacatcttgttggtaaaaagataggttactaaatcaatagctgtacttagtcagataggtatattgcaatatatatcgcatgacctgattaataagtacttgctaatgataaagtcaattcctttttcctaataatacctactgacttgagtgtaatgtgctaagaattgtatttgagtacattttctggcaattttatttaaagatcgaatgccaatcagaacgtattccagcgaagacctatcgccaatctgtggcccaaaagacgacgactgcaatcagtcgtctgcgtgccaatggccaatggcttggcttatcagtcttaaccaggccaaaatgtagtgcttttttacttgaggtgttcgcactcgaacgcgacaaatcacaacgacaacaggcggtacaacgcagcaaattgattacacaacttatgtggcacttcaattagaggcgtcgatcaattggcccaatccccaggtgctgctcgtaacgaggtttcttcgaggagagatgggattgagaccaaaacaaaccatcatcatcagcttgataagctccaaactgttgtcaacttatataatgaatggcccatggtttttgtggtccagtgtgtaaatagttttaaactatatgctcatcgggcgttttaattgggctatacccatttatatgattgaaatgcatattcaaaaagaagattcaaaaaggtattcagtatcgaaagaatttcacaaatttcacacttcgttctagtcaaaaaaaaaatacgttttattacctgtttaaatatgtatcataaagaccgaaatagcgccagatgttttattcaactgaacaattcccgcgaattgtttactttactgattgttgcctattgtaaacaagcttgttttttttttagttagaagacagaatatggcatatatctttaggcataagtgtatctgctttagttgaacttcacttagcggcacacacaagtttgcacttagttcgatgactcgacgcgtggtgtatgtatatttcccgatattattgattaaactttgttgacttttgcatctcttttgtgtagctcttgtatctttgggattcggattgatcgctagcagattgcgaatggcgaattgcgagttgggtttacggattcgattgaatattgcgattgcattcagcgacaattcaattagtgcaataaccggcgcgttcggcagcgaaattgctcacctgtgttcaggtggagcggagcgcacagaatgaattgaatcaatgggacagcgcgaaagaccgccatggaaatcgaaataacagacccccaacacaatacaatacaagcaaataatactcacacactcgggaactgaaattgaaatctacgaaaaacgaaacgaagcgaaaaagcccgaacagaaacagaaagaaaaaagcgaagcagcgtactcaactgaactcggctaaaatgaatcgaatagagtcatcgacaacgacgggattgggcttattggccgcgttgtgttgccaattcggactgattagcgtttcttggcggctcactgcaggtgtctgccagccgtctgagcggctaacagcgctgttagcaacacaacagcacagtgggccataaaagcgatttgacgagcctaatcaaataataaaacaccatacatatatgtttactacttccgcgagctgtccaaaaaataaatatataactatatcaccgctctcatactaccaatcactgtgttatgcaatcagaggtaatgtaactgaatgcaatagctacatagagacaattaacaatgattttctaatgctatcaaaagagcacctattttgcattaacttagatacacaaaacacgaaaatgtaatttgaagattataatggaatcaaaaagagaattttaaattatattaaaagtttagaataaacttgaatataccgagtaccttaagtatcttaaatataccaccaagaggtaataaacttttaactaatatctttagtgcgtttttaaccactgtccatcgatccatttattcatgtttgagactaacacatgtgaataatatgtgtgcggtccgttattgttgatggcgtttctttgtgggagttgtcataacgaccacggttttggggtgaccccaaatggataaagcttcctattcccattacgaatccgcaggcagaacctatgaggttgtatgtcggtattcgctgtgcatttgcattagccgtagaaagttgggggcgttaattagcacgtgtaggcagtaatacccacaattatataaacattatccagttattcagttgtcggtggctatatgagggctcgcccaacgaaaacaaatacacaaaggccagttcacatgtgaactgaagtatatagattcgtgcagtagcagccatgtggatgtggctcaatctgaatatgtattacggccacttttatctctggctcattgtatctgcatctgtatttgattcaggtggaggtggcgtcgacaaaccgaaagccaaaacaaaacaacccactaattatgcacatacgaaacagccaacaaaccagcacatgaactctgttacatctctgtgcgtaccgaatcgtctgcccaagtcgcatataccctcacctcgtatagggtgtttacaataacatggctttgttgggtatgcaacacacactttcctaactaccatacgatcgggatctgcaaaaggggttcacgtctctgaactttgcaaaccgatcgcaacaatgatacttcacttagttttcaaggaagagcacaggcccaatctcgttccatatgatcatccatggcattactctggcaagtgatgtaatgaaggccaagtaaacgaaattcattgtatatataacatataaaactcaatagtggaatagatattttactgtgataataaaaatctggagttctatgagatataatccacgaatagtttgcgaaaaaggtaaacactatcatatttttagtatcaaaaccttatattacctacaacaaaggaattttttctttgccaaggaccctattgatgacttttcatggcgtcgaatatgttgacatattcccaacaaggtcaacagatattcaaagcccataaagcatacataaagccatggctaaaacctgccaaactgcaatcaaccctcggggatggcaatcaaaccaaactccaagcctttggcaatcagcgagaacctttttcgcaacccgtgtcctggggggattttcccgaaatgatgaacacgtgaaggagaaatcctcaatactgtaagcgattcccggaaagcgagagcaaaggcccccaaggcaatttcataatcccacattccgcacttgaatgatttaataacgcagcccaacgagaaattccttggcaggaataggaatacggcatgtgtttgtttatttgctcagccgcagctcagctctgctcgttggtggtattatgaaagcaattagataactcaccggcggtcggggactgatgggcatcgtttcctggactggagatgggcgttgaggtggcgccgtgggtgtgcgggtgggcgcggcccgccggcaatgacaatggtcccccggcgcagctggcatccaactccgattccagcggcggcgagttttcccttacacacgacatcaggccggaagacatgctggaaaaaaaaagggaaaactatttgtaattgccatctgcgagtatgcggtattagcgatatttgtgcaatggaaatatatgtatcttctctagactacgaagacggaatcttccgcatcggagtcctccgtacgggaacttcccgtgacttaacccatacccatcactcaaactgcactgacatcctgcgacaccgcactaatggatctccattatggcggtgttctggggggaaattaaatgtcatattgcattcgcgataaaagtcaccacaacctggcggaaaactcagtcttttgcagaatgacggagtgacagggaaattggttgagagaatccttaagttgtggcatttaattcaatttgtgcggatcttaaacataattgcttattgaatactgggtaattggatgtgttgactttgtaattaaagataaacaatgacagttttttgcaattaaaataattacctgtcaaccgaagaaggcaacaagtaagagtctgaattcagtttgaaagtgactcccctttctttaaaaaaacaatcacaatactgtttttgaaaatttggaaaaatctctatacttgcgcctgtaaataccataaaatgtgtaatgaatgttttaaatgaatcaatcattttttttatttatgtattaaagcaaggaattcatttcgacttcacatagatgacaatatgctcaaagcattaggaattagtgtgattcataataatttaaatgccaaaaatgccagcccattcttagttcagtcaacccactcgatcatcccgagtcatccaataaatacaagtccggcatgagcagaatgcattttccatttgttcggcggattccctcgaatcgctggcatcgaaaatcgcggctggtccaaaggcatttcaaggaaagctattttcatctaggaatttgccccttttcctgaactctgtggcctgcagactctgtcgatgtgcatatgccttt

SEQ ID NO: 17129 - DNA, 970 bp, DROSOPHILA
cctgatgtcgtgtgtaagggaaaactcgccgccgctggaatcggagttggatgccagctgcgccgggggaccattgtcattgccggcgggccgcgcccacccgcacacccacggcgccacctcaacgcccatctccagtccaggaaacgatgcccatcagtccccgaccgccgagcatccaaatcagcagcagcaacagcagcagcagaagcgtcgtcgtttccatccgcttcgtaacctgcgtcgcatcttccggcgacgtacgattaatagctccacggacagtccagcatcctgtcagtcgccaggacccggatcctgcaacaccttgccaccgcccgccagcagcagcagtgagaagaatctgcgcagcgggatcgcctcgccaacaggatctcccctgaatccccagcagctgaaggagaactaccagacgcaatcgctgcccaagtccaaatcgtacggttcgcatcgcgatgagctgctaagtgtgcttctgggcaaaaaacgggccagcaagcaggaccacagccaggttgcagtccaacccgattcccaagcgcagtcgcaatcgccgcaggaagccatgtaccaggcccagcgacagcatggcggcgtggccgtcttcccggattcactagtccttaaccggagcagctactttgccgagcagagaatccaacagcgccatctacgcagcgtgggtgactcctcgcaggaactggagtccaacctaggcttgggatcaggatcaggatcaggatccggagctggtggcgccgctgacatctccgacagccagcgtagcctcagcgaaggtcgactcctggatgtggacggggattactctcgggataccctgtcccagtcacatgacagcgtcttctctgaatcggccacagccagcagtctatccattgtactcaaggtccaaattcccagtgaaatttggaaccaaattcctgtatga

SEQ ID NO: 17130 - protein, 127 aa, DROSOPHILA
MYQAQRQHGGVAVFPDSLVLNRSSYFAEQRIQQRHLRSVGDSSQELESNLGLGSGSGSGSGAGGAADISDSQRSLSEGRLLDVDGDYSRDTLSQSHDSVFSESATASSLSIVLKVQIPSEIWNQIPV

SEQ ID NO: 17131 - DNA, 4826 bp, DROSOPHILA
taatcataatggctgaggaaggaccaccggagccgagcattgattttgtcccagctctttgctttgtaccacgcggcgtggctaaggatcgtcccgacaagatcgtgctgacgcaggcggagctggccaggattatcggtgatacgcaacaggaattggacgaggagagcgacgacgatgcagaggagggcgaaaatgccgaggaagaccaaaacgacatggatgtggacgaccacgcggatgccaatagtgagaaccgcgatccgcaggacgagttccaattccaggagtatgacaacgaggcgaatgctaatgtcaccagtctggccaacatcgtggacgctggcgagcaaatccccgatgaggacgaagactccgaggccgaggacgaggtgatcaagcccagcgacaacctcattctagtgggtcacgttcaagacgacgccgcctccatggaggtgtgggttttcaaccaggaggaggaggctctctacacccaccacgactttctgctgccaagctttcctctgtgcatcgagtggatgaatcacgacgcgggcagcgaaaaggcgggcaacatgtgcgccatcggctgcatggatccgataatcacagtctgggatctagacatacaggacgctatcgagcccacatttaagctgggttccaaaggcagccggaagcagaacaaagagcagtatggacacaaggacgccgtgctggatctctcttggaacaccaactttgagcacattctggccagcgggtccgtggaccaaactgtgattctgtgggacatggacgagggccagcctcatacaaccattaccgcttttggcaaacagattcagtcgctggaattccatccgcaagaggctcaaagcattcttaccggctgtgccgatggatacgtgcgactcttcgattgccgcgacgctgagggcgtcaactcgtccagcattgagtggaaagttgacggtgaagtggagaaggtcctgtggcatcccacacagaccgactacttcatcgtgggcaccaacgatggcaccttgcattacgccgacaaacgttctcctggacaactgctgtggtccgtaaaggcccacaacgaggaaatctccggtgtgtgcttcaacaaccagaagcctaatctgctgacctccacctccacggagggcaccctaaaggtgtggaactttgatggcacagaggcaaagcacgtctacgagcacgagttcaacatgggtcgcttgcagtgcatgcgccagtgccccgaggatccctacaccctggccttcggcggagagaagcctccgcgctgtgcgatctttaacatcaagaactcgatagccgtgcgccgaacgtttggaatccctgatgcagagtaggcaaatcgtacagctacgtatttatctgtgtatatgctttatatgacttttaaataaatatgaattatatataagaaccttaatgattgacttttatattaattaaaatttattgataacttgcgcatatatgcactttacacttttatgcttaaacaactaatcgacatttcaggggggatgggtcacaaacgaaatacaaaacattaatcctaaacattccgagcattccttaacactacattacgtataccaaataagcttatctgtgctcctaactcttgaatagacccacgcacatcaggagatttcggcgcgtaaagtgcaggctgacaaatggcgagttcttgctggggaaagtacgcatgaggtagacgtcctcgtcgttctcatcctgatggtgcgacacagtgatgtgattgctgatatagtcttcggtaaccttgtgaaagtcccacagagttagattgttatccaagccggctgcagccaggactgttccatcgcgactaaaggtgatcgtggtcacagtgctagtgtgcctcaacagggtggtgaccagggatccgttcgacagatcccagatgatgatattgtgatctactgaacccgaggccagataccggccgcaggcggagaaggccagagaactcaccgatcccttgtggcccgtcatcaggcgtaccgactgaccggtcatgttgtcccacaggcgtaccgtgcgatcgctagaaccggtggccacataattggaattgggatgaaattgtacacaatccacgtccgacaagtgacccacgaatacgcgcaacgcttgattggaatccgtggcccacagacgagcagttttgtcgtacgaacaagaaacaaaatagtagccatgcggcgcaaagcgaacatcccacaccgggtaaacgtgcccgcggtaggtgactacgcaggaccaggtgagcagagaccacagccttatggtgctgtcctcggaacatgagagcaacaggttcatctcgggggcaaaggcacagcggtatacgggtccggtgtgacccattaagctcctggttacctcaccacttcggtcatccagcatacgcacattgatatccgccgattccttgtccagttcgcgaagggaatctgcatccttcagcgtacgcagcttcgcgggcgtcaatgaccaaatcctcacgctagaatcgccaaatccacaggccaacatcgtggaatcgtctgaaatctcggcacaggttacgccctgatgggaattaagcaccgtgtagaagacggcagagggcagttgatccttgctgagggctaaacgcttgctggcttccctgagagccttaagctttagcaacttgtccgaatccttcagttccggcaggggaattctgtcgatggatggagcattcggatccgacttggactttttcgacagcaggggatccttttttggctttttctttttcggacgatccggggcatccggatcatcgtcctcctcctctggtgccggcgctggagtggtcagagtctgaaagtccacctccttgagcagtccgtagtacacccgcattttgttgtcctgtcgcttggcctctccgaggtgcgagcccgcggtggcgacgcactgcagcttgttgcgcgccatgccctcgtatgtgtcgaaatgcaagtacttggaaacaatatctgccaccacttcctgccggcgatcctgaatgtgtcgcttgaacagagagtgcgagtccctggacatgcgaatgacaaacttatcctgctccatggctactacgaggtcattctccagcagctcctcgggcttagacagcaaaagaaggttgaaaagaccctctatgtagtagccgtcgagatcgcatttgtacttctcaatgaattctttggccttctcccttagtccactggcgaggatcttgaagtagatctgcaccagaattgggtacagaaccatggacagctcatgcttgtatatgtccagggagtcctcaacgaaagtgcgcagctccttgtatgcctgctcatagtgctgagcatcaaagctgtcgtcgtcgatgaacttggccagttcctctgcagcattggcctccgtcaccgcggactgtttatgaccctgcgccggagattggacatgtttccgctcccggttggcatcgccagctcccaaaactgcgcccagcacctgctgaacatcactttcgctgatttccgacaattccacactgctcacattcgcctcttggcagagcagctcctcagtgctcttcagctggtactttttgatgagtttcagcaggcacagcagctcacgcttgtcgtgggacaattgagtaccgtttcccccgtttatattgctcacttccaggctcattttcgcggaaaattgaaatatatggaacttgtgtactattttgttatgcgtggaaaagtgtgaccaggttggcatcggttgaaaacggccaagtggagaatgaaatatactaaaatgcaccaagtacagtcaaaatatacagtagccactagcgaagacggattctaaaaataaattgtattaatacattataaattatatctttttgccaatttttggaattacttaaaatataatgacatatttcattctttcattttactacaaaattaatatttaacttttatgcaggtcaaagaaattatttgaagatgtgcttataaaggtcttactgtggacagctgactgaatacttttagtattttttgagcaaatatcttaccagaatcaaaacattcgtaatgaagaggagagtaattgtgaaaaaggtaaaatacaaagtaactggccaaataaacaagctaatttttatagcagagggtaataatttgctgtgcattaacagaattaacttgccattgcatatttcagtgtatttgtctggcgcctatcccccaactccttgaactttgacaccgcctcctcgaaattaacccttgtactcgtgctttctgttgtgtttagtccatatttattgtaaaaaatgaatgaaaatgatgatgcggtaggtccatatgtaacatttaagccatattagctaatatcgtgatcaattcccgcagaaaaaagtcgtcggcaagcggaattcggtgtcgttcgatcaacaagatccaggacagccgagatttagcttctctgggagagtacaggagctagtcgagggctacaattcggccatacagctgctggcgcccaagtggccctggttcctctaccccggatatctgacatacgccgtatactggcgttacgccaaatattacaagggcaagtttctgctgacccccattccgaaccgcctctacgatctgctgatcaagaacgagcagattaagtcggagcacctggtgttcgccagtcaggaggtgtacgaaaactatgcggaatcg

SEQ ID NO: 17132 - DNA, 2826 bp, DROSOPHILA
gcataacaaaatagtacacaagttccatatatttcaattttccgcgaaaatgagcctggaagtgagcaatataaacgggggaaacggtactcaattgtcccacgacaagcgtgagctgctgtgcctgctgaaactcatcaaaaagtaccagctgaagagcactgaggagctgctctgccaagaggcgaatgtgagcagtgtggaattgtcggaaatcagcgaaagtgatgttcagcaggtgctgggcgcagttttgggagctggcgatgccaaccgggagcggaaacatgtccaatctccggcgcagggtcataaacagtccgcggtgacggaggccaatgctgcagaggaactggccaagttcatcgacgacgacagctttgatgctcagcactatgagcaggcatacaaggagctgcgcactttcgttgaggactccctggacatatacaagcatgagctgtccatggttctgtacccaattctggtgcagatctacttcaagatcctcgccagtggactaagggagaaggccaaagaattcattgagaagtacaaatgcgatctcgacggctactacatagagggtcttttcaaccttcttttgctgtctaagcccgaggagctgctggagaatgacctcgtagtagccatggagcaggataagtttgtcattcgcatgtccagggactcgcactctctgttcaagcgacacattcaggatcgccggcaggaagtggtggcagatattgtttccaagtacttgcatttcgacacatacgagggcatggcgcgcaacaagctgcagtgcgtcgccaccgcgggctcgcacctcggagaggccaagcgacaggacaacaaaatgcgggtgtactacggactgctcaaggaggtggactttcagactctgaccactccagcgccggcaccagaggaggaggacgatgatccggatgccccggatcgtccgaaaaagaaaaagccaaaaaaggatcccctgctgtcgaaaaagtccaagtcggatccgaatgctccatccatcgacagaattcccctgccggaactgaaggattcggacaagttgctaaagcttaaggctctcagggaagccagcaagcgtttagccctcagcaaggatcaactgccctctgccgtcttctacacggtgcttaattcccatcagggcgtaacctgtgccgagatttcagacgattccacgatgttggcctgtggatttggcgattctagcgtgaggatttggtcattgacgcccgcgaagctgcgtacgctgaaggatgcagattcccttcgcgaactggacaaggaatcggcggatatcaatgtgcgtatgctggatgaccgaagtggtgaggtaaccaggagcttaatgggtcacaccggacccgtataccgctgtgcctttgcccccgagatgaacctgttgctctcatgttccgaggacagcaccataaggctgtggtctctgctcacctggtcctgcgtagtcacctaccgcgggcacgtttacccggtgtgggatgttcgctttgcgccgcatggctactattttgtttcttgttcgtacgacaaaactgctcgtctgtgggccacggattccaatcaagcgttgcgcgtattcgtgggtcacttgtcggacgtggattgtgtacaatttcatcccaattccaattatgtggccaccggttctagcgatcgcacggtacgcctgtgggacaacatgaccggtcagtcggtacgcctgatgacgggccacaagggatcggtgagttctctggccttctccgcctgcggccggtatctggcctcgggttcagtagatcacaatatcatcatctgggatctgtcgaacggatccctggtcaccaccctgttgaggcacactagcactgtgaccacgatcacctttagtcgcgatggaacagtcctggctgcagccggcttggataacaatctaactctgtgggactttcacaaggttaccgaagactatatcagcaatcacatcactgtgtcgcaccatcaggatgagaacgacgaggacgtctacctcatgcgtactttccccagcaagaactcgccatttgtcagcctgcactttacgcgccgaaatctcctgatgtgcgtgggtctattcaagagttaggagcacagataagcttatttggtatacgtaatgtagtgttaaggaatgctcggaatgtttaggattaatgttttgtatttcgtttgtgacccatcccccctgaaatgtcgattagttgtttaagcataaaagtgtaaagtgcatatatgcgcaagttatcaataaattttaattaatataaaagtcaatcattaaggttcttatatataattcatatttatttaaaagtcatataaagcatatacacagataaatacgtagctgtacgatttgcctactctgcatcagggattccaaacgttcggcgcacggctatcgagttcttgatgttaaagatcgcacagcgcggaggcttctctccgccgaaggccagggtgtagggatcctcggggcactggcgcatgcactgcaagcgacccatgttgaactcgtgctcgtagacgtgctttgcctctgtgccatcaaagttccacacctttagggtgccctccgtggaggtggaggtcagcagattaggcttctggttgttgaagcacacaccggagatttcctcgttgtgggcctttacggaccacagcagttgtccaggagaacgtttgtcggcgtaatgcaaggtgccatcgttggtgcccacgatgaagtagtcggtctgtgtgggatgc

SEQ ID NO: 17133 - protein, 704 aa, DROSOPHILA
MSLEVSNINGGNGTQLSHDKRELLCLLKLIKKYQLKSTEELLCQEANVSSVELSEISESDVQQVLGAVLGAGDANRERKHVQSPAQGHKQSAVTEANAAEELAKFIDDDSFDAQHYEQAYKELRTFVEDSLDIYKHELSMVLYPILVQIYFKILASGLREKAKEFIEKYKCDLDGYYIEGLFNLLLLSKPEELLENDLVVAMEQDKFVIRMSRDSHSLFKRHIQDRRQEVVADIVSKYLHFDTYEGMARNKLQCVATAGSHLGEAKRQDNKMRVYYGLLKEVDFQTLTTPAPAPEEEDDDPDAPDRPKKKKPKKDPLLSKKSKSDPNAPSIDRIPLPELKDSDKLLKLKALREASKRLALSKDQLPSAVFYTVLNSHQGVTCAEISDDSTMLACGFGDSSVRIWSLTPAKLRTLKDADSLRELDKESADINVRMLDDRSGEVTRSLMGHTGPVYRCAFAPEMNLLLSCSEDSTIRLWSLLTWSCVVTYRGHVYPVWDVRFAPHGYYFVSCSYDKTARLWATDSNQALRVFVGHLSDVDCVQFHPNSNYVATGSSDRTVRLWDNMTGQSVRLMTGHKGSVSSLAFSACGRYLASGSVDHNIIIWDLSNGSLVTTLLRHTSTVTTITFSRDGTVLAAAGLDNNLTLWDFHKVTEDYISNHITVSHHQDENDEDVYLMRTFPSKNSPFVSLHFTRRNLLMCVGLFKS

SEQ ID NO: 17134 - DNA, 3157 bp, DROSOPHILA
gtaattcctatatttaaaagggcaataaattaaaaaaaattaaattaattaattaattaattttagtgggaagaggacagcactgcttccaggggaaaaaaatattaattcttaagctaagaaaggaaggaaaaacatataggacattcaaaaaacccttgaatgttttgcccaaatggtaagccattaaatatgaatggaagctcggaagccgtagtgccatacataaatccagagatatagcaattctccaaaatttgccaggacctggtggactccatgccgcgtaggtgaaaggcagtgctggctaacaaaggaaatccaaccaagtattagaccctaattaatgtatttaaaggaaaaactaagttagttctagatcaagttgaattttgttactatttgttcgtaccactgctatatcagtgaactctagaattactgccttttatgttgttttaatctatatttttgaaactattaaagaaaaagtgatgtatttgttgaattttttgaaatgatattattaaaaaaatttgcccattaaaactgtaaatcataggaatttttatcttaaactcgcaggtcccaagcactgctatttttatgaacacagttgtataatcgccacacatgaactaataactattaaataagaaactgggcaaataaacaaaggaaatattcagtttaagctatgtatgttacttgttgaattttatcgagacttcaaaagagcacaaaaggaaatgcgataatctatctaaaatcggattagacagcatttatagaatggtagattggtggatgcttatgttatctttatatgtaacaccaatatatctttgctctcttgttaggttttcaatcttatcagtagtttacatgagcaatcaaaaataaaaatgcattttttgtatataaaacgtcaaatatcttgtattcaaattaaatgttacatgatcgttaatttgtttagcattttcgtccacatacatcttcaatcgactagttcgctccatctcaacacattaaagttcagatttcccaaatatacaaatttgggtcctttaaagcacctggtctcaactcgaatggcaaagtccgttcctggtggcaagtcgaacgaattgtgaggatcttcgtctccgctaattaggtccttcaggtaatcaattagaaactgcggaccttccactataaactttataaacattcgaggagtgcgcttggcttttgaatttggctgaatactgtaggtgtacaaagtgccttccaagcccctctgtccactgaaagaaatatatgatttgattaatctgcgaacatagatatgcattaaatacgactattacccatagttctgattgctcttctcgtggaagagcagctcggccagaatggaaatgaagtagatgcgtcgttgggactccacagtattgaagctggcctttgcctctccaatgacaccgatgaatgtgttgctcaattcgacctccacgttccagtgccaaatggtcttaccgaatcccaggattctaaaatttcgaaattgctgcagagatatgtgcacagctcacaacacggtagactcaaggagcaaaggacttaactcactcgcaataggccgaaaattgccattgtgtaatggaggcgcttaagcttcagtctctcagcactgaatacgttgaacgttcgctcattgaggaacaggaaatgggcaaggaacttgcccagatggtcagcttcgttataaaaaacagcctccttagagtggaagtgcagcagactgatggctacgtcggattcactgtcttcgtcggaaaagtagctaattgtcgtgcgcaggacctgcgaaaggcggttggatcatctattgatgttgttgaactagcccacctgcagcatgatccttttcgcgctactctgctccttctccgaggttccttccgaatgggccacctcgtaggccttgtgatgatgcaatatgtacgccgtgctgatttgcttcagttcctccgaagtttcccgcagcaacttgtggtgatataggtccaaatggcccatgaccatatgcagcacctcagccggcaagtcctgcaatcgaattcgtttatccacttgagcctcctccattcgactggccacggatttgtgaatatatgcgtaaaaagatatgtactaaagagttgtataaaaattctatgtagacaggcaacaaatgttgcgtgctagctggaaatttgtatgtaaaacacctactgcgctcggtttacatttatttttttattatacttttgagaaaattatgcaatttgctctttgatgtttgtctttggttatacactgtgtcggtatagtgagccttctcatgacggacctttcgcacctagtgcagcatcgtcaatattgtttagaaagaaatgcatctttggatcctcattcaacacggagccatccacacccaacggtcgtcaatactggcacatacaactgtgttcataaaaatagcagtgcccgggttggattgcctttgttagccagcactgcatttcacctacgcggcatggagtccaccaggtcctggcaaattttggagaattgatatatctgtggtttatgtatggcactacgtttttcaggcttccattcatatttaatggcatcggatactcgggcagaacacttaagggtttttttaatgtccttatatgattttccttcctttcttagcttaagaattaacattattttcttttggaagcagtactgttctctacccactaaaatgtaattttttaatttttttttaaatttattgcccttttaaatgtacgaattaacttaaacaaatacactttttaaaaaatatttgatcatttcattacttttacattgggcaaaaccagacactactattcttatgaacagcctaaaagttgtaaatttgctcaagaatgtaaataaagaaggataacatgaaaaactaacgggattttcttgtttttcctatctacacattacatttaacaaaaataagtggaataaaaagtcgatcccgttacgtaattgagtaaaaaaagtacttttgaacttcagtaattaatttcctttggaacgatctttttaagtttgtttctaaaccaaggttcgcgtc

SEQ ID NO: 17135 - DNA, 984 bp, DROSOPHILA
cacaaatccgtggccagtcgaatggaggaggctcaagtggataaacgaattcgattgcaggacttgccggctgaggtgctgcatatggtcatgggccatttggacctatatcaccacaagttgctgcgggaaacttcggaggaactgaagcaaatcagcacggcgtacatattgcatcatcacaaggcctacgaggtggcccattcggaaggaacctcggagaaggagcagagtagcgcgaaaaggatcatgctgcaggtcctgcgcacgacaattagctacttttccgacgaagacagtgaatccgacgtagccatcagtctgctgcacttccactctaaggaggctgttttttataacgaagctgaccatctgggcaagttccttgcccatttcctgttcctcaatgagcgaacgttcaacgtattcagtgctgagagactgaagcttaagcgcctccattacacaatggcaattttcggcctattgcgacaatttcgaaattttagaatcctgggattcggtaagaccatttggcactggaacgtggaggtcgaattgagcaacacattcatcggtgtcattggagaggcaaaggccagcttcaatactgtggagtcccaacgacgcatctacttcatttccattctggccgagctgctcttccacgagaagagcaatcagaactatggtggacagaggggcttggaaggcactttgtacacctacagtattcagccaaattcaaaagccaagcgcactcctcgaatgtttataaagtttatagtggaaggtccgcagtttctaattgattacctgaaggacctaattagcggagacgaagatcctcacaattcgttcgacttgccaccaggaacggactttgccattcgagttgagaccaggtgctttaaaggacccaaatttgtatatttgggaaatctgaactttaatgtgttgagatggagcgaactagtcgattga

SEQ ID NO: 17136 - protein, 320 aa, DROSOPHILA
MEEAQVDKRIRLQDLPAEVLHMVMGHLDLYHHKLLRETSEELKQISTAYILHHHKAYEVAHSEGTSEKEQSSAKRIMLQVLRTTISYFSDEDSESDVAISLLHFHSKEAVFYNEADHLGKFLAHFLFLNERTFNVFSAERLKLKRLHYTMAIFGLLRQFRNFRILGFGKTIWHWNVEVELSNTFIGVIGEAKASFNTVESQRRIYFISILAELLFHEKSNQNYGGQRGLEGTLYTYSIQPNSKAKRTPRMFIKFIVEGPQFLIDYLKDLISGDEDPHNSFDLPPGTDFAIRVETRCFKGPKFVYLGNLNFNVLRWSELVD

SEQ ID NO: 17137 - DNA, 3338 bp, DROSOPHILA
agctgtgccccaagtcctttgtaactatcgcagagctcgagcggcacacgaaggccaagcacagcaaggataagacgcttcggtgctttatggatggctgccggaagacttttgccttcaaacaccatttgatacgccatcagaaggcctctcatctgagcacgcggtatatatgtcccgtttgcaataaggaggaaaagtccaatgtgcatctgaaaaatcatatgagcgtgcacaaaggtgagataacctacaagtgtcccaagtgcgatcgctcctatttgcgacgtggcaggtgagagattccccttttcaaatcgtttgtaagccttctacaataatttctcttatgcagactcgtaacccatgcactcataatccatgacttgcgcttcaccaccgaagagttgggaaacctctcatccctggctacgaaccaagccagacctaacgatcttaaagtcgcgacgcccgtgggactcctggatggccgtaaggatgtgagcggtgcaagcgaagaaaatgggcagccctaaggagctgacgataattccaagtagttgtgaacttatgcttttacgaatcaagcaaagtaatcgcacaatgtacaaagtttgatatagtctaagtactgttcctctccatcattttagcacatcaaatgtcttgaagttttcttgttaagttctagactaggacattaaacacaatctcttatacaaaattagttgaaatacagacgaccgatcacttattgacaaatagacttcggtgaaattttcaatgtattatgaggatccaaaagtagcaatgcccaaatggcaacttaaggtatcgccttaaacataacaatccgcaacgggtctcaaggtgtcagtagttaatccattcgattcccaagcatgattgaggcaatctccaccagctggctctgtattggccaaagagaaacgcttcacatctaatgtttaaaattctccattatatatatgtataattatttttttttttgcaaacggtcatgtatttcgtatatttacgagcatcgtcatgaatagaataacccaatagttttaggtttaaattcaacgcgtagaagggataagttatcttcaacgatgttacttataaaagaaacgtacattaaataacttttactactagattcgagataaatatgtatttatattgcacctaaattgcatgcttgggtcagggaagctccttcttaaagatgttccatttccagctccattgattttccagactgatcaactgctggtaggaagcatagtcatcctttgcgaactccttcagccgggccagctgcatcatggcctcctcggtggaatagataggctctatcagagtcacggggtatggctcatcacaatcgtccttattcgagatgggttcgcttttcaccagaatcgcctcgaactcctgcagatccaggctgtcaccggtgtcattgtatcggacgttgtgtcgctttcgccatttctccagccatccggaggaggcagagaaattggagtggcccagctccacagctaactgcttggccttcttccgcaccatttcccccgatatgggtatattctcggtacggacacgggagaaccaatcaaagcacatctcatcgatttgggcgccccgctgagagaggggattcctccgcatctgattcaacttaagttctccactcaacagaccctctttaatcgactgtttgtgcttcaaaatgtctgctgcttgtgtctttccaatgttaaaccttcggaaacttgttatttttacccattcatatgtatgtatcaggcattgatcttacctcttggccagatcccgaaccgatagcttgtttcgctcctgggactggattacctccattttctcttccaaagtgagcgaggttctaggttttctgactcttcccgatggcatatttgtcgacgaacattactagtgagcgatgaagacttttatctgtcgaaattgctaccaaattagacagttttcttgtccgctcaagggagtgtccgtccgtccacagatatgtggtgttgtatgaccagagcgatgaagtatacaaaaggcaagggcgtatgctaggttttttatggctgcggtttagggggtttaagaaactccatattttactatatttgtaaagaataaactttttgtctagtattgtgtctttcatcaaaggcattttttataggccttgaatcattttcttgctagcgactgtagcccaaaggttactgcccggcctgtgatcttattgaaagcatgtaggttgatatatattatatatatatatgtatttaatatatattcgcttctatacgtgacttaactccctttgggaacgccattgaaacttaattgaagcagcacgcagccggcatgggaacttttgcgattgcagacacggtcacactgcatttgatcacaaaagagcggtataaaatacaatacacattgtttgccgaacttatttttgaaactacttctatctacaacaaacggataaaccagcgcaggagaagcatcttgatcaaccgcagcgccatggacgccgccgtaccggatcccgcgctcctggcgatgaacaagctgaacaagggctccaagtgccgagcctgtctatcggtggacaggaaaaccgtgcagttgaacgccgaggtgcccaacctgcaaaagacgcgtacctacgcccagagcctgaagcagtgcaccaacctggacctgcgggtcattagtccaggtggctacctgtggccgatgcaaatctgcgtgcgctgctgtcgcgccctggaggtggctatgcactttgtcgaaatggccctggaatcgaatctcaagctccaagccgaagccaaaagcgtaaagctgcccagtcccactggagagcttaaacgaaaggccagcaacgaaacgataccatggaatcagtttagccaggagttcgagcagtttgtcgagggctatgagggtcccatcgaggagaatgtcctctatatgcgaggaaccaaggtgccgcggctggatgtcgacgcttcttcgagcagcgagacagcgccaaaggaagatgaaggtaggcctaactgacagcttagcccagcattcaccctaatcttctctcttacacaccgaaaaagtaatactcttcgacgtcaagtatgacaccaatgatctggaggaggaggacgagaacgacggctcggatgccaagaacaatgagaccttcttcgagaacagtattacacctggagagtcagttatggtcgtctcagtcgcggaaaaagctgtcgagaataataacaatt

SEQ ID NO: 17138 - DNA, 1281 bp, DROSOPHILA
attaaatacatatatatatataatatatatcaacctacatgctttcaataagatcacaggccgggcagtaacctttgggctacagtcgctagcaagaaaatgattcaaggcctataaaaaatgcctttgatgaaagacacaatactagacaaaaagtttattctttacaaatatagtaaaatatggagtttcttaaaccccctaaaccgcagccataaaaaacctagcatacgcccttgccttttgtatacttcatcgctctggtcatacaacaccacatatctgtggacggacggacactcccttgagcggacaagaaaactgtctaatttggtagcaatttcgacagataaaagtcttcatcgctcactagtaatgttcgtcgacaaatatgccatcgggaagagtcagaaaacctagaacctcgctcactttggaagagaaaatggaggtaatccagtcccaggagcgaaacaagctatcggttcgggatctggccaagaggtttaacattggaaagacacaagcagcagacattttgaagcacaaacagtcgattaaagagggtctgttgagtggagaacttaagttgaatcagatgcggaggaatcccctctctcagcggggcgcccaaatcgatgagatgtgctttgattggttctcccgtgtccgtaccgagaatatacccatatcgggggaaatggtgcggaagaaggccaagcagttagctgtggagctgggccactccaatttctctgcctcctccggatggctggagaaatggcgaaagcgacacaacgtccgatacaatgacaccggtgacagcctggatctgcaggagttcgaggcgattctggtgaaaagcgaacccatctcgaataaggacgattgtgatgagccataccccgtgactctgatagagcctatctattccaccgaggaggccatgatgcagctggcccggctgaaggagttcgcaaaggatgactatgcttcctaccagcagttgatcagtctggaaaatcaatggagctggaaatggaacatctttaagaaggagcttccctgacccaagcatgcaatttaggtgcaatataaatacatatttatctcgaatctagtagtaaaagttatttaatgtacgtttcttttataagtaacatcgttgaagataacttatcccttctacgcgttgaatttaaacctaaaactattgggttattctattcatgacgatgctcgtaaatatacgaaatacatgaccgtttgcaaaaaaaaaaa

SEQ ID NO: 17139 - protein, 225 aa, DROSOPHILA
MPSGRVRKPRTSLTLEEKMEVIQSQERNKLSVRDLAKRFNIGKTQAADILKHKQSIKEGLLSGELKLNQMRRNPLSQRGAQIDEMCFDWFSRVRTENIPISGEMVRKKAKQLAVELGHSNFSASSGWLEKWRKRHNVRYNDTGDSLDLQEFEAILVKSEPISNKDDCDEPYPVTLIEPIYSTEEAMMQLARLKEFAKDDYASYQQLISLENQWSWKWNIFKKELP

SEQ ID NO: 17140 - DNA, 2588 bp, DROSOPHILA
gatctgccggcgtagcttcaaaagcgccgaaaccctaacgatgcatcgcaagcggcactcggagcggcactaccagtgcggtaagtgctcgcttaactatgttaactcggcggagttgcgagtgcactacgaacgggctcatgtcaatgaggaaccagttagctgccttacctgtggcaatcagttccaaaacatgaccctgctgcgcgagcacgagcaaagaagtcaccagaagtcgaaggtctggcgctgtgaggtgtgcaactttgagacgaagaccagatggcgcaggcgtcagcatcagtacgagcacatggattacccgtacaagtgccagaagtgcaccagcgagttcgctgatcgcagcaagtacgtaatttactctatcacagggccagcaaatcatcaccatgccacttacagattccgccaacattccaagaaggtgcatggcatcgaactgagcgacgagcagttggctgagatgttccgcgagaagaagggctacaccaatcggcatgatgcattcaacaagtcgattaactcactggagattccaggcctcacggaagactgtttcaccgagctggagagcctgggcgtagactatgacgccataactactgatctctttgccagctccgccgctctggacaacctgctcaatttgataccttaaaaacagggccacgatcaatctacctgcatagaatttacaaatttaaacggcacacatattagctgacgagagcaagaagactgtctgcactttacaaatcgccctaacaaaaaatagcatttatacaccacaactgtttaagtttgaacaactattttgctcaaccgattcagaatccagatcagaacattcattagtatgtattcacagtgaaaccatgatatttttgaagtcacaatctcaataaacaaggacacacgcgtttctgaagcgcacaaaactccctttgtttcgttttacactctgtcggagtttgtatttaaactatttcaatttgaataactaattaacgccctggatgaattttgagaggaagtcggtgggcttgggatcctgcgattctttccagtagcgcatgatatggcccttctgcttccagatctccacggattccttaagctccatttggccctgcgtaagatagtattatcacctgcagcatagctctcttatggatgcgtttaccttgatgaccagcatgtcgatcacccggatgtcggtcacattgcgatgcttgacgaactcctcgcgcagcttgtcccgacactgctccacggtcatggggatgtcgtagtccatgactgcaagcggacggatggcattacatggcgtcgggatacggatgcacactctgatgacataaccaggagcacttaccgatgtagggaatctggcggtaccaggccttgtacagattgagggcacgcttacgggcctcctcgcggtccacggacaggatggggcgcacctgctgtacggctcgcttcacggcttcacgtccggccatttgatttgtttttatttctttctgtttttcctacgaccaaattgctccaagcagaacagtgtgaccgcagttcactacgcacaaatggacaaaaccaaagtttggtaaaatgatttttatttaaaaatgttttctactcgaaaataatagatgttgctaaattcctataataaaactcatatcaaattatgatctttaatacccacattatattccgcaaatttgtaatggatttcctagcgcttcaaaagaaacaaatataaacttttttatggattaggatttgctgctcagctaaaattaatacactattttaaatttatatcattttgtcaacttgtactattgattctcttaagtaaaatgctgatactttgaactagttcctagcattcaagggcatttaatttcgagtactttaatttcttgccaataccaaacacacaacttactgaaaagattgcgatttattaaagtgtacaactcgctgccttttccttaaatcataggtttcttaaaataattcataagtccaggatcagcacaccaatcgataggatatgtaccgtcccgccgtctcagaggaacggatgatcttaaccacctggccgcgcttgagtccaaagtaccgggccacgggatcgcccgcctggatcctcatcaacatgttctccttcagtttgtaacggctgagcagctcctgcttctcctcgacggtcatgaccacgtgctccgggaccagttcgtgctccgtgatgttgatcagcagttcggattcgagaaactgttccaggatgtacttgggggccatatctacgagcgattgcttggcggagggcgtcatgccgccctgcaccacaacgatggcccggtggatgttctcttcctgcatgcgagtgcagtacgtcttgattgtcttgatgccgatcttcggctcctcgggaaagaagacgaacatctggtccgtgggatcgtcgttgtgggccaccaaaactatcaaatcggaacgagcaggtcgcttttcgctgggtttgtcgccgaacatttccttgaactgctcca

SEQ ID NO: 17141 - DNA, 458 bp, DROSOPHILA
acactgttctgcttggagcaatttggtcgtaggaaaaacagaaagaaataaaaacaaatcaaatggccggacgtgaagccgtgaagcgagccgtacagcaggtgcgccccatcctgtccgtggaccgcgaggaggcccgtaagcgtgccctcaatctgtacaaggcctggtaccgccagattccctacatcgtcatggactacgacatccccatgaccgtggagcagtgtcgggacaagctgcgcgaggagttcgtcaagcatcgcaatgtgaccgacatccgggtgatcgacatgctggtcatcaagggccaaatggagcttaaggaatccgtggagatctggaagcagaagggccatatcatgcgctactggaaagaatcgcaggatcccaagcccaccgacttcctctcaaaattcatccagggcgttaattagttattcaaattgaaatagttt

SEQ ID NO: 17142 - protein, 124 aa, DROSOPHILA
MAGREAVKRAVQQVRPILSVDREEARKRALNLYKAWYRQIPYIVMDYDIPMTVEQCRDKLREEFVKHRNVTDIRVIDMLVIKGQMELKESVEIWKQKGHIMRYWKESQDPKPTDFLSKFIQGVN

SEQ ID NO: 17143 - DNA, 3144 bp, DROSOPHILA
ttcacacaactgggttaatggctaatcatcgaaaatgtaggcgccttctgatgtacctacttggtatgggaatgggtttgggatctggtggagctgaccttgcccacgcagtgtgggtactgtgttatgcccttcgattcaactcgattcgattcgattcgggttttcacctttctaccgttatgcgacgatcactgggaagttgccactgcgccactatgtgcgtttgaattccgtgcgaatcgcgcggttaatcccactgataactgattcacgtagcgcgagcgacttgggcctttttcggcttctgttttggcgcttttatccgcggagacctccgaacacggccaaatgtaattgccaaatgaagatcactccaacaaccggccctgtactctgccgtgtggttgttgttgctgcagtcgccagtcgacacatggtgaatattcgaattcagattcggtcagctcagctgctcagtgctgcacagtgggaccgatcgatggtcagatattattattgtttttacaagcttgaagagtgtaaaacaaattttaagctaattcacaatttaaaaattatatacctagttatatatatcaattaatatattatataccaattatataataaattaaacatttgataaatatatcttaaaatacattgctgtacatttgttagttaatagaattataggaaacataataaatattttaatatactgtacagtgctcatactcgcgtttcagtttatattcgatagtcatcgattatttagtatcatacactttttaattttataatcataatatttattaaaatattctcatactttaaatttgcaaacattctatttactgaaaatgtcttcaatttattaaacatatcataacttttcgcgatatatttaactaaataaatatcgataattcccttttttacgcacgcatggcaaccctattgctcaagccgttgttgtttttctaattaagcgattattatttaaaaaaaggtacgcccacgccctagaaaccaaaacaatctggacattttaaaaggatatatccaaggttaacctttagaagtagctatcaattgaaaagcagaagaaaatcatacatttcgactgcgttttcattgaccaaaatatttgggcgttgacgctgtcacgcaagccaaagaaatttgagatcggagaagtttgttcattggtgtctcccggtgttttcccacagcaacatggtagtgctgagctcctgctggtcgcccataatttggtcggataatgtccggacgggaagctatgccgtggccggctatacggctgcgctatccgccgtaatgatcacgctgatttcgtatatgctagcaggcggggagtctgcgcagctctattccccgctctttgagacggatatacgttcgtcgatgcccgtggcaggtggcttctttatcatctacttcctgctaatcatcctgtcttcctatttggtctactacggtattaagatcaggtaagacgagctctggcttcctatatgtacggatatagtcatgcttgcatctgtttctcagcactcgaggatggctgctaccctggctgggtctaattggactagccattctcttccagtttagctggagcctttggcttattggaggctactatatttatgtgagtagcgattatcttttccattaactaaagctaatgaattcgtgttactctaccgccagctggagcaaaccttctcggcccttttgaacttcgtttgggtagcctacaatgtaagtgtttgaaattcaagggacagcaacaccaactcctgtatcattatgtttataaacccattttactcatccacttagatctattgctggctggtggtcttctcgcagtaccagatattcctggagatccagaatccgaacattgagctgctcatgccatgatggaagaacctccatacagaagctcgaataatctattagaatactttttgacttgacacgcaacaagaactccgtccatgcgcattttttacaataagaattccatacaattccacagatgcctaccaaatagttttatataaatttatatattttacacacatttatacacgatcaattatacttatgtgtaattcgaatgccttagtcttctaaacgacaattaaacaaatagattcgtaaaactactgctactggatacgggctccttggggccaagaaattattgtgggttttgaatatcaacgtttattaccataaattaagtttaggtgtactctaattatacgagtttttgtgtgtttacattgagaaagatattgtttgtacagaaactttaaatgaaaactgacgacctataaccatagaagcgagggatctaaactgggtgaaagaggggaaagtcgaaaagggatcgggtctaagaaagtcactaaatatacattaaggtaaatcttaggatcgaatattttacagagcctggtgttagacacagagcaatgggttggataggctggcctaatagactaggtcttctcctccttttccttgttgtagcgctccagttctttgaggaactgcgccttgggtttcattacatttggccgttctccgcggcagttggggcagaaccacttgccttttggttttagtaccagggagacgcacgaaaaatggaaccactcgatggggcacaggtcattgtcgcacaggatcatctcgccaaaggagatctgcaatagaaaacgtgattagtggcgaagcttttcgataggaaaagcactgcgaactcacctgattgcagacacagtaggtcggctcgtccggatcaatggtctccggcggcggcgtctcctctcgcgtactggcattggcatttgaagccccagaaccgcgtaccttgcgctttttcttcttgccggaattattgccaccaactacgccggctccgctggcaccaccacctccggctgctccactgctcgtggctgcagagccgctagccaaactgccagaagccgactgcagactggcctttcgtccctgtcccgctccactggcaccgcccaacgaggatttgcgctcgccactgccaccaccactgccactggcttcatttgccgagtt

SEQ ID NO: 17144 - DNA, 713 bp, DROSOPHILA
attatttaaaaaaagatggtagtgctgagctcctgctggtcgcccataatttggtcggataatgtccggacgggaagctatgccgtggccggctatacggctgcgctatccgccgtaatgatcacgctgatttcgtatatgctagcaggcggggagtctgcgcagctctattccccgctctttgagacggatatacgttcgtcgatgcccgtggcaggtggcttctttatcatctacttcctgctaatcatcctgtcttcctatttggtctactacggtattaagatcagcactcgaggatggctgctaccctggctgggtctaattggactagccattctcttccagtttagctggagcctttggcttattggaggctactatatttatctggagcaaaccttctcggcccttttgaacttcgtttgggtagcctacaatatctattgctggctggtggtcttctcgcagtaccagatattcctggagatccagaatccgaacattgagctgctcatgccatgatggaagaacctccatacagaagctcgaataatctattagaatactttttgacttgacacgcaacaagaactccgtccatgcgcattttttacaataagaattccatacaattccacagatgcctaccaaatagttttatataaatttatatattttacacacatttatacacgatcaattatacttat

SEQ ID NO: 17145 - protein, 169 aa, DROSOPHILA
MVVLSSCWSPIIWSDNVRTGSYAVAGYTAALSAVMITLISYMLAGGESAQLYSPLFETDIRSSMPVAGGFFIIYFLLIILSSYLVYYGIKISTRGWLLPWLGLIGLAILFQFSWSLWLIGGYYIYLEQTFSALLNFVWVAYNIYCWLVVFSQYQIFLEIQNPNIELLMP

SEQ ID NO: 17146 - DNA, 2723 bp, DROSOPHILA
tttacactctgtcggagtttgtatttaaactatttcaatttgaataactaattaacgccctggatgaattttgagaggaagtcggtgggcttgggatcctgcgattctttccagtagcgcatgatatggcccttctgcttccagatctccacggattccttaagctccatttggccctgcgtaagatagtattatcacctgcagcatagctctcttatggatgcgtttaccttgatgaccagcatgtcgatcacccggatgtcggtcacattgcgatgcttgacgaactcctcgcgcagcttgtcccgacactgctccacggtcatggggatgtcgtagtccatgactgcaagcggacggatggcattacatggcgtcgggatacggatgcacactctgatgacataaccaggagcacttaccgatgtagggaatctggcggtaccaggccttgtacagattgagggcacgcttacgggcctcctcgcggtccacggacaggatggggcgcacctgctgtacggctcgcttcacggcttcacgtccggccatttgatttgtttttatttctttctgtttttcctacgaccaaattgctccaagcagaacagtgtgaccgcagttcactacgcacaaatggacaaaaccaaagtttggtaaaatgatttttatttaaaaatgttttctactcgaaaataatagatgttgctaaattcctataataaaactcatatcaaattatgatctttaatacccacattatattccgcaaatttgtaatggatttcctagcgcttcaaaagaaacaaatataaacttttttatggattaggatttgctgctcagctaaaattaatacactattttaaatttatatcattttgtcaacttgtactattgattctcttaagtaaaatgctgatactttgaactagttcctagcattcaagggcatttaatttcgagtactttaatttcttgccaataccaaacacacaacttactgaaaagattgcgatttattaaagtgtacaactcgctgccttttccttaaatcataggtttcttaaaataattcataagtccaggatcagcacaccaatcgataggatatgtaccgtcccgccgtctcagaggaacggatgatcttaaccacctggccgcgcttgagtccaaagtaccgggccacgggatcgcccgcctggatcctcatcaacatgttctccttcagtttgtaacggctgagcagctcctgcttctcctcgacggtcatgaccacgtgctccgggaccagttcgtgctccgtgatgttgatcagcagttcggattcgagaaactgttccaggatgtacttgggggccatatctacgagcgattgcttggcggagggcgtcatgccgccctgcaccacaacgatggcccggtggatgttctcttcctgcatgcgagtgcagtacgtcttgattgtcttgatgccgatcttcggctcctcgggaaagaagacgaacatctggtccgtgggatcgtcgttgtgggccaccaaaactatcaaatcggaacgagcaggtcgcttttcgctgggtttgtcgccgaacatttccttgaactgctccaaggtctggtccaactcgtcttgggtcaccaggtagccccgatcgtggctcagctgcatgatggtcttgcgaatgcgccacagcttgtaggtttccgcttcgtcatccatggctatttccaaaaattaacaatttctaaattataaacagagcacgcggataatgtagtaagaccagtgtatgccgcttcataaaataccttacagcgcctgcagcataacaattaaaaataccaaagagcgtttgatggtcacatgtttagcgaatactcgaacctatgtataagagcgtaacagccgtcacttctgttccactgttcaagtacggagcaccctatacgatctgtacggagcaaccttgtatggagccccttttaacgcggcagcttgtaccttgtatgaggcgacgtgcagggggcgccctgtacgtttgtgcttttgaaatgagagccaaacttgatttgttggaaattatgttgaaaatataattcaaatagaattgaaatgatatttagtatgtacgtatattcttgatcaggataactaagcgatcgctggacagaattgaatccaacgattgattcacacaaaatttccattgtgacccttttttaagtgggtagaatttgtatttgtatttaataaataagaattaagatcttgaaagtttcattctggtttctgtctgcttagttataaaatagtttaacttaaaagatgtatttattggcttcggaattttgcagagtttcgggatgtgatctaatgcatatctgtctatgtcttgtggcattacatttataattattttcgacacccattgttaatgcaatcaaaatgtgttaagcatacatgtatgtatgtatatacatatgtgctccccagctcacgtttggtgaccccgcaatgaacccaactcactttccttccaatattttacgtgcaacattcaattaggacccagacgggcaaataatatgctgcggtggcatgccgctcttcttatcctttgtctgcgtgccgttcactaaaaatgccgttaatatttcgcagcccgcttttcctcgcattttccaccatcctatttcccggtgccgagtgcaattatttg

SEQ ID NO: 17147 - DNA, 723 bp, DROSOPHILA
atggatgacgaagcggaaacctacaagctgtggcgcattcgcaagaccatcatgcagctgagccacgatcggggctacctggtgacccaagacgagttggaccagaccttggagcagttcaaggaaatgttcggcgacaaacccagcgaaaagcgacctgctcgttccgatttgatagttttggtggcccacaacgacgatcccacggaccagatgttcgtcttctttcccgaggagccgaagatcggcatcaagacaatcaagacgtactgcactcgcatgcaggaagagaacatccaccgggccatcgttgtggtgcagggcggcatgacgccctccgccaagcaatcgctcgtagatatggcccccaagtacatcctggaacagtttctcgaatccgaactgctgatcaacatcacggagcacgaactggtcccggagcacgtggtcatgaccgtcgaggagaagcaggagctgctcagccgttacaaactgaaggagaacatgttgatgaggatccaggcgggcgatcccgtggcccggtactttggactcaagcgcggccaggtggttaagatcatccgttcctctgagacggcgggacggtacatatcctatcgattggtgtgctgatcctggacttatgaattattttaagaaacctatgatttaaggaaaaggcagcgagttgtacactttaataaatcgcaatcttttcagtaa

SEQ ID NO: 17148 - protein, 210 aa, DROSOPHILA
MDDEAETYKLWRIRKTIMQLSHDRGYLVTQDELDQTLEQFKEMFGDKPSEKRPARSDLIVLVAHNDDPTDQMFVFFPEEPKIGIKTIKTYCTRMQEENIHRAIVVVQGGMTPSAKQSLVDMAPKYILEQFLESELLINITEHELVPEHVVMTVEEKQELLSRYKLKENMLMRIQAGDPVARYFGLKRGQVVKIIRSSETAGRYISYRLVC

SEQ ID NO: 17149 - DNA, 4187 bp, DROSOPHILA
tcatcccgtggacgaggcgtctcccgagtttaatgaacctgcccccataacggagaaagaaaacaccatggtccgtctccaagccgagctgggggaattcccacggccatgcaacctctggtcaatccgctccaaagtactccaggtaaacgccattgaggtaggggtaaatttgaatgcaaaccgacagcggcagtccatcattttcgcaagcagataatgatatacatttcggaagcaatgcatctgaactttaccataatttcgagtgcattattattggcccgctctgggcagttgaatgcaaagttgcagatacattttacgttgcatcatcatcatcgacgtcgaccacctgttgtccttaaagcgataagtattaagtgatttctggacagccgctcgcgagttttccttttttttcccccatttatttattaatacaattttcgtgcgcttgcgtgcgtctgcaactgaggcaagtgcatttacataacaattggcctttgaattcaaattggcagcgggctttggcccctccaacgaatcgggctatacccagactgaggctgaggctgcgggactgcattaaaatctctttaccgccatttaaaataatttacgatcttatgcaaatcgccgctttcgttgcactagcccccaaacttgccaccgtgactcgacataatgctcgttggccagaaattaaacgcacacatcgattattcacgcccattgtgcgccacttaacaataacttaaaagtggaagagcgccacaggtgtcatacgcataagacaagctcacacttgtggataatggattgatagctttttgaatctcaaaggattaataaagtaaatgaaagagttaacttcattttgcaagaacgctcttataatatagttaagtaaacacagcactaaatgttccatgggtcatggagagtaaaaagcacgggtgatttggcgaagctgttggacacgttttgatgccgttgattaaatattggaagctatttgatccttatccaaatcggagaactcaattaactccccaagtcgtttgagcaattgtttacaggagtcccgttccgcaatgtctttcgtcttagccaactggctaaccaactccaaaatgctggtcaaaaagcttttaaattcctcttcgtactcgaccacttcctgctcgagttctttggtacttttctctcctatcgaggattccacaaagtcacaaaagttgagacacacatgaccgagtgtgtatagagatttcacaaacgtgttggcagtgggtagtaaccccagacgcaggcattcttctacggtgctctccaatttgtttagtacctcgtcgatacattttgccttgtccaccgttaaggtcaaagattgccatcggggttcggtgatgtcctggatgatgtggttttccagacttagcatacacattagcatgcggtggcgaagttttccagatcgattggttagctggagacccgtaccctcacaaggactttgccaaaggactgtcaaatgatgtttcacatagtgcaaaaaaaacaggacacgctgtaacatctgcaattgctctaggagctccgggtagataataaagcttagtggccattttgtttcatagccaagagctaatgcctcgtagccgtagagattcaggacctccggaggatcctgctcgctgcagctctccttctcctcctcttcttcatcttctacagctctctgtgctttatgttgcctacccaatagtgtggctacatcgcaaaccttaagctgacagcgaacattatccttaatgaaatcattggacttatgcagggtctctgctagaagagtctgtagcttctcgggaattaacctttccacattgtactttaggtactcatggcatttgtgcagaaaagtttcggagaagccttcctcctgcagcaggaaataggacttcaaattgcgaatgtgtaaaggcaaattgtgctcctccaccaaaaccttgagaaacttatgtgctggcagctcatagcttgttttaatgatctcctcatgtcccaaatcgccttgactataagctagtggccgctgtagcagcttcaatgaaacattgcactgcctcaaaatgtttaggtactttccggccagaaaaatatcatccgcctgggaaagcaagaaaccgggcaaacggtctggcaaaaggcggtaccgttccgcccagtaggcgtggcaacatttctccggcgccaaaagagtactgctcattgtactcgagggctccgtgtcctccacaaaaaactcatgctgcgtatcgaatagaacacccttttgcatccaaagctgaacaattttcatgtaagctcgactagtcgaagtcaaaattttgttcactcgttcctttagatctatatcagtgtccttcagatcccggtagaactggtccagcaatgttaggacctgggcgctggtcaaattgccacgggcactgctggccatgttggaaaaagtcttcaaaataggcaaccaaggacgcacctgtcgcaccagatccttgagatccaacttcttgtcctgcaaatccgtttccaacttggactgtagatcataatagtcctgcagttgatcacttaaggcagtggctaaggtcagtcgtgttcttccgcagttaggcgacatattggtctcctctatatagctctgtacactaatataataacctatcaggggtaatgtttcattggccaaagccctaaaagccccagtgaaggtctttttcaatcgaaagcgaatcttggctatatccactgcagacatttcggaaatctgatcgatctgaatatcaggctttacatatgcagatggaacacccgagaaggcatagattagatccctcatcagcaactgttcctgacaaggcaaactcatcttggccaaattttcgttggcgagaaagtaacccccaacgctctcgaagatccaggactcctgccgtggcagacttgaggacgagctcgtattgcaattatgaccgctgttttcgcttcctgatggacgcattttttcgtctacggattcctcacggtcgtgaattttcctcatctgccgctccagctcgtccttactgaggtgaaagcgcactttgttcgcgaagtcactttccgatttgtcggagttcatggtgaataagaaaatatatcaagaacagagatcgatttcgaagcttaaaattatttaagtgttctctgaatgattataataactaaggtatgttggatagattgaaattaaataattaaatatatgtaaagttagtagagtttttggttgttataacaataggtgctagtgctgagtacacctaacttctgctagttctgatttccatttctgcttattatcaaacttaactctagccatttgtgaaaggtggttactttcggtgatatccgctgaatcgtcgaggtaaatcaacttggttttgaatctggatccccatcgatcatcgtgcccagcggcgacatcttcgcctctggtttcgtcgaagtttggagccacaggtgcatttcaagcccatacttcaacgattcaagttgagctgggcgatccgacgcccagttgtcaatcaagcggagcagcagaaccaactgacgaacgtgctgagaattttccatcaatttctacgcgatgggaacttcgaactttctatgtgcttgtatccaaaatatccgcacacagtgagaaattttttttttggtacatattattagggtgcttaaacaaatttgtgaaatcttaaaactatgaattggatttaatgaaaatgatttgcagtgagtgaattatgtatgtgaatatgtgtattgtttattatattgataaaaatcaatttttcctctgcatgtgaaacacttgaaagtatcgcacaggcaacgagataaccatgagaacactttatatatgggcctttgtcgcgtgagtgccacttgtcgtgtttttgttgctaccgctgtagctgcagttgctgttgcacatgttgttgttatagttgttgttattgtctgtgccccctttttgttgctgcgctcgttttctcgctgttctcattctaaacaatgcaaatgcagcgtcagcggctctgccagcaacattagcataaataaataaataaccgtactgg

SEQ ID NO: 17150 - DNA, 2082 bp, DROSOPHILA
atgaactccgacaaatcggaaagtgacttcgcgaacaaagtgcgctttcacctcagtaaggacgagctggagcggcagatgaggaaaattcacgaccgtgaggaatccgtagacgaaaaaatgcgtccatcaggaagcgaaaacagcggtcataattgcaatacgagctcgtcctcaagtctgccacggcaggagtcctggatcttcgagagcgttgggggttactttctcgccaacgaaaatttggccaagatgagtttgccttgtcaggaacagttgctgatgagggatctaatctatgccttctcgggtgttccatctgcatatgtaaagcctgatattcagatcgatcagatttccgaaatgtctgcagtggatatagccaagattcgctttcgattgaaaaagaccttcactggggcttttagggctttggccaatgaaacattacccctgataggttattatattagtgtacagagctatatagaggagaccaatatgtcgcctaactgcggaagaacacgactgaccttagccactgccttaagtgatcaactgcaggactattatgatctacagtccaagttggaaacggatttgcaggacaagaagttggatctcaaggatctggtgcgacaggtgcgtccttggttgcctattttgaagactttttccaacatggccagcagtgcccgtggcaatttgaccagcgcccaggtcctaacattgctggaccagttctaccgggatctgaaggacactgatatagatctaaaggaacgagacacggagccctcgagtacaatgagcagtactcttttggcgccggagaaatgttgccacgcctactgggcggaacggtaccgccttttgccagaccgtttgcccggtttcttgctttcccaggcggatgatatttttctggccggaaagtacctaaacattttgaggcagtgcaatgtttcattgaagctgctacagcggccactagcttatagtcaaggcgatttgggacatgaggagatcattaaaacaagctatgagctgccagcacataagtttctcaaggttttggtggaggagcacaatttgcctttacacattcgcaatttgaagtcctatttcctgctgcaggaggaaggcttctccgaaacttttctgcacaaatgccatgagtacctaaagtacaatgtggaaaggttaattcccgagaagctacagactcttctagcagagaccctgcataagtccaatgatttcattaaggataatgttcgctgtcagcttaaggtttgcgatgtagccacactattgggtaggcaacataaagcacagagagctgtagaagatgaagaagaggaggagaaggagagctgcagcgagcaggatcctccggaggtcctgaatctctacggctacgaggcattagctcttggctatgaaacaaaatggccactaagctttattatctacccggagctcctagagcaattgcagatgttacagcgtgtcctgttttttttgcactatgtgaaacatcatttgacagtcctttggcaaagtccttgtgagggtacgggtctccagctaaccaatcgatctggaaaacttcgccaccgcatgctaatgtgtatgctaagtctggaaaaccacatcatccaggacatcaccgaaccccgatggcaatctttgaccttaacggtggacaaggcaaaatgtatcgacgaggtactaaacaaattggagagcaccgtagaagaatgcctgcgtctggggttactacccactgccaacacgtttgtgaaatctctatacacactcggtcatgtgtgtctcaacttttgtgactttgtggaatcctcgataggagagaaaagtaccaaagaactcgagcaggaagtggtcgagtacgaagaggaatttaaaagctttttgaccagcattttggagttggttagccagttggctaagacgaaagacattgcggaacgggactcctgtaaacaattgctcaaacgacttggggagttaattgagttctccgatttggataaggatcaaatagcttccaatatttaa

SEQ ID NO: 17151 - protein, 693 aa, DROSOPHILA
MNSDKSESDFANKVRFHLSKDELERQMRKIHDREESVDEKMRPSGSENSGHNCNTSSSSSLPRQESWIFESVGGYFLANENLAKMSLPCQEQLLMRDLIYAFSGVPSAYVKPDIQIDQISEMSAVDIAKIRFRLKKTFTGAFRALANETLPLIGYYISVQSYIEETNMSPNCGRTRLTLATALSDQLQDYYDLQSKLETDLQDKKLDLKDLVRQVRPWLPILKTFSNMASSARGNLTSAQVLTLLDQFYRDLKDTDIDLKERDTEPSSTMSSTLLAPEKCCHAYWAERYRLLPDRLPGFLLSQADDIFLAGKYLNILRQCNVSLKLLQRPLAYSQGDLGHEEIIKTSYELPAHKFLKVLVEEHNLPLHIRNLKSYFLLQEEGFSETFLHKCHEYLKYNVERLIPEKLQTLLAETLHKSNDFIKDNVRCQLKVCDVATLLGRQHKAQRAVEDEEEEEKESCSEQDPPEVLNLYGYEALALGYETKWPLSFIIYPELLEQLQMLQRVLFFLHYVKHHLTVLWQSPCEGTGLQLTNRSGKLRHRMLMCMLSLENHIIQDITEPRWQSLTLTVDKAKCIDEVLNKLESTVEECLRLGLLPTANTFVKSLYTLGHVCLNFCDFVESSIGEKSTKELEQEVVEYEEEFKSFLTSILELVSQLAKTKDIAERDSCKQLLKRLGELIEFSDLDKDQIASNI

SEQ ID NO: 17152 - DNA, 3514 bp, DROSOPHILA
tgccgtgcaatcttgattactgtcagtggcagcagttgtatttaaaattggctaacaagttggcttccctggccggcaaaagaatcccggcgatgctcgtttactgccacttttctctactctcacggggggtaaacatatttctggtgtcctttttagtcctgctgggccgctttaagctcggattgcacttaagagatattcttctatgcgtgtcacctttttgttttctcttatattgcgctttacttaactaaaagtgaaggtgagtaataatgggttttataattgcaacaatgctatggcatgctatgctaaaagcatagcattgttacatttttctattggatatcaacatgtgaaagagtatttaaaaaccttgttcagctgctcacattttccaagctacttttcatttggttttgggcagccgccgtttctttgttgcctttcccccattttccgtattccttctgatccaccattctccattccccacccacttccatctgcgaattttcgcaatgatctgtccgcaacgtccatgttgccatttattttgcaccccaaaatctacccaccacacaaatgttagcctgtgcctgctgcttttataccccctacttgtagagtaaaagggtatactagattcgtcgaatggtatgtaacaggtacaaggatacatttccaaccctataatggaaatgtgtcttaatcaagatcactcactagccgagtctatctggctatgtgcgtttatcagaaggatgtctgtccgtatgaacgccttgatctcaaaacctatatttgcaattccaattctcctttcttcaattaccttacgagaggtcaaagaactttaagttctctggaagctcgaggtcttccggggtgtccatgaccaaaatcttacctatttcaatttcaaaatttttaaatatcttctaagcactcccattagctgagtaacgggtatctgatagtcgaggaaatcgactatagcgttctctactgttgtatttcgaattctttgtgtacatttgtttggcaataatttcaagttcattgggatactgcccattttggcgtgattgcctgtgggccatcatcattaaaatacatgcaattagggcttaacgaaatggccaacgaagtaaacgtttttcctgtcgcgtatggcaaaaacaaaggggcggtcggccttgaagaacttgcgatcgggattcttcttaaggacttcgggttggacctctgatagtaattgaatatatcagaatatatcagaagtaaaataaaataaggcatttcggtttcctcacctgcttctggtgctacttcgcacccaaattcagtaacatttaaaaacactttgtgtctagcctccgaaatcttttgtggtgttttcatttcgaaaagatcgctcaaatccgcttgtccagcatcaaaaacactattaatacccatcttaaataaacatagaatgtttggaggtgtgcttcaaagtaattacatagtaacctaccttttgtagtggaaccttaagatcaacagtgcactcgatcctgaattttggaatggttacatccacttccttcattagacttttggcggctacctcgttcatgtccagttgaccaagtttttcctccaattcgggcaagccatcaatagcagttggtaagataatcatcatggtcaaattggatctttcaaacggcaattgcaggatctgtgactttagtttcttggactccccatagcggaactgaccaatttgcctcatcattgaaacttccattcgctgccgaggatttatccagaagtcatcgatctgggtaagttgctgggggaatatcttgttccatttggctcggaagaacagtgagtttacaaggattacactggaatcggaattgaaaacctcgggcgtaaacagatttcgtacagtgtaaaacgtgtgtttttctagccacttgttaacttttttgacagaatcttccgggttcaagtagttaagagaataagcctcagcattgaagaactccaaggccatgtcattaaagtcagtccggattttctcctcttcattgacgtacaatcgtgtgaccaatcgcagcgcaactcctttttttgcacaggagcactcatcggtccaggattccgcatgttgtttggccacttccgatttatttgatacacccaatatcaatttggagcgcagttcatctgcactcttcccgccggcccccataaacaccaaggtcatggcactgcgggcaccagccggagataccatcatattcacgggcggaacttcatcgttcagggcccggaacagattccgggcgaagactatgggactggcactcagcgatggtgccgtagtgcccccggaggccattgggatcagacagatgatcagaaatactgtgcagaaagcaggaaaaggcacttgtgaattttaaaaaatataactaactctagattacaaaataacttaccccattcgcttggcatgttgcgatccaactaaagctcattgatgctctgtaaagaattgaacaatggattgtgcgggctgagtcaccaacttgttcgagatcatctctagagattgagtcgcatctaaaccggttcctgtaggtcagcagttaatcgaaaatatgaaagcccttcatttcatgattcgttacattttatttttaattttatttctctgtcacaaatgctttcaaatgttaatattctctattgattcatataatttagtactcttggttttataaagattgctcaactttaatttaagcactctgctagtaaaattaaacaatttgttttggatatcagtaatatggttatggaattgtttattgttgattgtggacgctgtcattgatgtcaatagcttttgttatttcgttattgtttagcaagttttgttgtaccgattcgcatcgctgccaatttttttatctctactggaaaatattttcgcagccctcgagatgcggagtgtagaattggtaggcgatggtggaaaatcggcgggaaatagggggaaaatgcattggggcttggcattgttatttgcatgccacgacagcaagtcaataatgtcaatgtattggcagttgccttggcggttcacccaccggccatctctttctattggcagctgtgtatgcttaaccctctctttctaataacccaactccatccccttctttgtctgcatatgtgtgagttggtgcctgtgttgatgcgggagtgacttaaatgatgtctacacattcctagttgacagtgaatgtgaatgtgaatggcgcccacccttttgtacccatactgcccatctctctcggcattgttctacccatctctttctcataaagagactgcagttatgcattgctgtgcacagatttcgcgcttgattgctctgcttatgcgcctgatgcgttttgtatttatatttcaatttcatttcgttcaccttttgacgtcacgcttt

SEQ ID NO: 17153 - DNA, 1314 bp, DROSOPHILA
ccaagcgaatgggtatttctgatcatctgtctgatcccaatggcctccgggggcactacggcaccatcgctgagtgccagtcccatagtcttcgcccggaatctgttccgggccctgaacgatgaagttccgcccgtgaatatgatggtatctccggctggtgcccgcagtgccatgaccttggtgtttatgggggccggcgggaagagtgcagatgaactgcgctccaaattgatattgggtgtatcaaataaatcggaagtggccaaacaacatgcggaatcctggaccgatgagtgctcctgtgcaaaaaaaggagttgcgctgcgattggtcacacgattgtacgtcaatgaagaggagaaaatccggactgactttaatgacatggccttggagttcttcaatgctgaggcttattctcttaactacttgaacccggaagattctgtcaaaaaagttaacaagtggctagaaaaacacacgttttacactgtacgaaatctgtttacgcccgaggttttcaattccgattccagtgtaatccttgtaaactcactgttcttccgagccaaatggaacaagatattcccccagcaacttacccagatcgatgacttctggataaatcctcggcagcgaatggaagtttcaatgatgaggcaaattggtcagttccgctatggggagtccaagaaactaaagtcacagatcctgcaattgccgtttgaaagatccaatttgaccatgatgattatcttaccaactgctattgatggcttgcccgaattggaggaaaaacttggtcaactggacatgaacgaggtagccgccaaaagtctaatgaaggaagtggatgtaaccattccaaaattcaggatcgagtgcactgttgatcttaaggttccactacaaaagatgggtattaatagtgtttttgatgctggacaagcggatttgagcgatcttttcgaaatgaaaacaccacaaaagatttcggaggctagacacaaagtgtttttaaatgttactgaatttgggtgcgaagtagcaccagaagcagaggtccaacccgaagtccttaagaagaatcccgatcgcaagttcttcaaggccgaccgcccctttgtttttgccatacgcgacaggaaaaacgtttacttcgttggccatttcgttaagccctaattgcatgtattttaatgatgatggcccacaggcaatcacgccaaaatgggcagtatcccaatgaacttgaaattattgccaaacaaatgtacacaaagaattcgaaatacaacagtagagaacgct

SEQ ID NO: 17154 - protein, 382 aa, DROSOPHILA
MASGGTTAPSLSASPIVFARNLFRALNDEVPPVNMMVSPAGARSAMTLVFMGAGGKSADELRSKLILGVSNKSEVAKQHAESWTDECSCAKKGVALRLVTRLYVNEEEKIRTDFNDMALEFFNAEAYSLNYLNPEDSVKKVNKWLEKHTFYTVRNLFTPEVFNSDSSVILVNSLFFRAKWNKIFPQQLTQIDDFWINPRQRMEVSMMRQIGQFRYGESKKLKSQILQLPFERSNLTMMIILPTAIDGLPELEEKLGQLDMNEVAAKSLMKEVDVTIPKFRIECTVDLKVPLQKMGINSVFDAGQADLSDLFEMKTPQKISEARHKVFLNVTEFGCEVAPEAEVQPEVLKKNPDRKFFKADRPFVFAIRDRKNVYFVGHFVKP

SEQ ID NO: 17155 - DNA, 8100 bp, DROSOPHILA
tcttatttaaattgttgccaatttgggcgcgtcaatttggccatgtgtcgtgtagcaacagcaacaccatcctcgtaggtgactaattaaaatacgactcggatttgcgcacgacaattaattatttatggtttaagtggggtttaaaaatgtcatgaatatttaaagagccccgctgattgataattgcttgcctaattacataatcgaatggttgattaaaaaggtataattacaataaaacgacaggtggcggatgttcgggaattattttgatgatttgactatttgattaaactcacaccctacagaaatgaaaataaattttaggttatatagttttctagttgtatattataaaagatccgtttaatacaacatttagaaggcagcaagtttttatttactattatcactctacaagtaaaaaattgttcataaaaatcagttaggcgtaacggatatcagatagttaatagatattgtacataaatgcactactaaattacataaacattatattttctaagttacttattttagctaaaaatatattgtattttctatcgccacaacgaaaattcacatttattttcctccctgtcattgcagtcacagcaaatcagtgtcaatcaaagtgtgggaaatcgacacgaatttccacaaatatgcgccggcaaatagaaacgtcggacgttataatgagccatatcagcggacaaatattacccactggaatgggaaatgggaaaaacaatgagcagcctcatcatcacgatcatcatcatcatcagcagcagcagcaacagcagcagcacttgagtaaatagaaaatcagtgttcagaatcaatacaaaatcaatataaatagtgcggggcgatagacagaaattgattgtcaacattattcgctgtcgtgctgagcaataaaaacccgactagcaacgacaaaagccatcggagcctcgaaagctaaacaaagctcagtctaccaacgaggatgggtggcaagcaccagggatcgggagcaggagcctcctccggaggcggcagcctcaactccagcctctgcaattccgtaatgacgaacgccacaacggcgagcagcagcctcacgcaacagcagcagcagctccaggccaagtacatcaaatcgaagcgccaccagagccgctacaccagcctccagcactccggccacgattccggcagctatctgcatctgaactcgctatggtcgatctggtacggagtgatgctcaccctgttccagggatacttggccatgcacggagcgtacaggttcttgggtaagttttaagttctgtttcaccgcaagctgaaaggcgatagatagatggcttaagaatttctaaacatttttaatttatttctcattctgtttgactaaacaatctcacttgaaaatgctgaatcatgtttatttcaaaatgtactttaaatatttataaagtactagatatgtatgtggttgcatccaaatgtcaaaattccaacatagctacggtgtttcctaaatattttcaagaaatcatttcctttgtgtttgcttgtcattttctgctatcagcaaaagaaaaacttatttaaagatactataatatatatttacctctgcaggatgctctttgataccctggaaaatcgagcctgtggccgaactcaatctgcagattgtcctttctggagtggtgttcatcctgctgccggtcttttttacctctgccgtatttaaggtgagtggttggcttatgaggaggtggtgcgcttttaaccgggatcatgctcctgcgataattaactgtgtatggcagtgttctcttactgccagtctgtgtactcggttgtactcaataattaaatttttttgttgtctctgccgctgcagtggatccatttgccagtatgccgcggctctttgggtttttgtgaattatttttagtggcattattcacgttattaaatttatttgcaaacaaaaacagcagcggcagcatcggcagaccaggagaagcatacgttgtggctccttttcactggatccgcaaaatggctgacaacacaggacgatctcacacacacattccaaacaaacattccattggtgtgtctgtgtgtcctctgtgtgcgagcccccctttcacccctttcccagtgtctgtgcttttatcagcataataaatgcaattatggttttccctttctatttccctttggccaagctgcacatatagttcccatagtttagttagtgttttatttatctcatatttattaagtgtgcgggcagacgatgatggcacaagctcgataggaaaatacaatcaccgacaaacggcatttactctaccaccgtttactccttttgcttcgtgtttccgataaaagccacttaaaatgaaagacagaaatggtgggagacatggggtggtaaagaaagtggtgtctgcactggaaaagtaatttttctttagcgaaacaatacttttttactctagaaatcaaacaaagtaccactatttttcttgtttgcaaacttgtgtcgacttcaactaaatttcctgaaggaaatactctttttaaactgaaactaatgggaattattgcatataatagtattatattagttagttatttgagtagcattttccattttttcttgattcctgccacttttcgcttcgtgtggcgttggagctcctgtcattccaggtccccgtcctcatatatgtacccctttcacccactcaaactgaaagttttcacaaataattggcttgtttttaaaacaagcgaaatggaaggaagctgccggcatatggagtgggaaattgagggtggagtggactgatgtccatagttcgccacagactgtccattggttgtgacagcagactgaccgtagatcctatcacaggaagtcggccagctgcatgtggcgtcacttgctctccactatgcatcatcccctttcagtccccaaatacataatgccattaagtatgaaacttacagcccagaagggttggatccttctggagcaggagcatcagtttggtaccggaaatactgttggttaactaggcttgtgttggccattctgccttacagtcattttaaaaaatatattaagatattttctttagaaacccctttaaattctgaataaaattataaattttcaaattctgtttccgtctaatacttaaaaaaaaaagcaaaattgctatgtgactctaaatatttatttatttaaattgacaaagaaagaaaatccggttcaaagcttttcaatttcccattgatttcggtattaatattcatggtgccgtcacgaaaatcactgtgtgggactttccccgccataaaagagtatacaaattgtatgcaaatattccttttcaccgctggccagacagccacaaaagcggcagaacagcatcgacaacaaaaacacaaccaacatcatcagaagccgccaaaaaatgcagccgggcaaaagctgcctatcagtcagcgaccagacagagggcgatgaaaaccaaggaaaatggatggaaagtgggtggaaaatggatgaagggtggggtggaggtagaggtgcaacacaccgaaaaaccaaaaaccgccaacgagctgaatgacaaaggcagggaaaaacacagacagccgtggggaaagggcttcatcacacgtcgccgaacgaacgtttaataaaaggcaacaacaaacgacaacgaacagaaattggttgcaaactaaaatcccaacattgaccattgaggcgtggctatcaggacactggcaggaaccaggactcggagtcccgaaatcaggacgggcgacaggaacagggccagaagttcatagttttgcttagttttttgtttttttttgtttttgccatctgaccaacaaaacaacagacccacagaccagtcacaattacgttcaactcctacgggtacgagtatgtgtcgagcgataagacttgaggcaattggaaagtgggtaaagcggtggaaagccgggcaaattggttgaagcgcggggcaaaggagcaggagctgctggcaaactgtcacggccataacaacgagatgcgaaaactttgcgactttcatatttgcacagcattcgaaattaaacgaatgaataaaaccactgggtggcggaattgacggaatagaccgcacaccgtatgtggcaagtgcccctaacgaaatggctgatcaaagtggatggggagatttcaatgccggaaaaactaagcatatactcagtttatggcacatgtttatgagaatcgttaaagtgatcctaaaaagttggctaaaattaaaactaaagttatacatctgttgatgatgtatgaactattcaattcagatattataaaaccagtttccctctgcacctggatttctaattaatccccgccacgacacttaaagcatatttacgcttttcccacatctaagacgttaatgaacgagtaatgagtaatcgcagtgacacgatttagagatgatttgcctgcggggtaggagtcgcaaaatgttggcacatttaaatgtattatgcgcctggcactcggcaattcccgcaagcccgccagcacttggaatgcacttcgctttttgcaaattgcaatcattgttgctcctcctcggaagcaaaccaaaccaaaccagaccaaactgacgagacaaaaccaacgaaaccggagcgcagaaaaacaaagcgaacgagtcggtttccatttgctgttcgaggtgcttttggctcagatcctgattcagatccagctccttcatcattctgatgtctgcttgtttttaatttaaaagcccgaacgttcgcctttattttttatgtacatatacacgtgattttaatgctcgttttttttttttgtttttgtggctcgtggaaataaatgtagagggagcgtgggaatatatactttatgtgtggaaaaataatagatgcatatatattgcatggttgcgcgtatataaatatttcatttcgccatttgtcacgtgcaacgtttcctttatttgttgctcttgtttatgcgccaacgcgtcgtatgcgcaatgccttggtttgcctcactctgtcgctgaaatcgcgaagtgttcgcattttgagcgcataaaaaatgcattaaaaacccaaacacaaaagcactttttgtgcgcatttttgtttctgctctacacatgttcagtttgtagtagtttttttatttttattagtgaatagattttttaataatggcccgggccccagggatgtgtacaccaaattgtcggacatgcagttggactggtgtgcggtcaaccaaggatgtcgtcccttttggccagtcgcctgttgcaggcaattatgaaatgcgaaatgccattccatttgataaattcactgttgagtaatttattcggtgaatatggtaggtgccactcgctttgagaaaatttgatatcccatatcgaataatttgcataaattaggttgactgtgtaagtttagacagccggacattcaattcaaatcatatacatatcgcattactttcatgaaattagtaatatggctttaatccaaatactaattgattgtcggtctaagtgtgtttattatttgttatgaatcacggcaatgaaaaagcgacagtgtaaaatatcagtggatttattaataagtccgtgacaagaaataaatcacattgaccatatattaatactgtttccctattttttaccctttgcctattgatttcaatttttcaacgcaccaaagtatacatgtgcgccaaataataaatattttcttggtcaactgaatctctctttcaataaatggaaaaattactacttttttttaagtacaatcaatgcataaaagcttgttagcccgcttaaaattgttttattggtgtaataatacagaattcttgtattcatatttataaagtaccatagaatttcgaatttaagctttgctttctgtatttttaacttatatctttcggtacgccgaatgcgctttttgctagcatttgtgttttactaaataactccagcgcaaataagagaaattgaaattgcatatgcatgcacatttcgcagaaagtggagtgagtctagtgaaattttcaatttccgcccaagagggaaaagcgaaagcgaggttgaatcaataagcattcattgccaagtccttggctctgcttagttaaatccacccaactggcagatcgtttgcatatgttaactatatactccatttcgcctattccagtccaatgagcttgtcgaaaaccaaattatttgtagtgcatttcattttaataatttggcattttgtgtggactactcgacaggtcggcaacttggcaaacgacggaattaaattggccacaggtgccagggagcggcgctgtaccttatcgccgcacgatggcctggaggaggaatcacgtggcggcacccttcgagccctttggacacacggcggacccacggcggccttcgttcacatcgtgattgcactctgcctgctgctgccgcgtttgctgctcgaggctcgcatcattgagaacggattgctgccaaaaggtgagtttaattaaccaacaggattcgcgttgaatgggcgaaatcagaaacggatggcgctcataagtaggcaacagatcagcggggcaatatggggctgccggaagtgtacgccatgttgctttatttgcagctgcgcatttccggtgcacgtcttcctctgagtcaaatattaaatttcatttttgtctgtatgaatatgattatcgaacttggtttgtttttcgaaatcgatccacgctttacactttcatccaaattatctttaccgaaatttcggtttcatttcacaaatcaacagttcggcacttttaagcttaatctaactacttgaaacaatctttgtatagctaataatactaattatcttgttgccatctgtatacattctcttcaatggcaaaacccatagagtagtaaaactttcgatccccttagagctacttttgtagctacttttttatcgcatgtctattatgcacttcccgcggaaaaggatattctggggggggggggggggcaatggggcaggagaataacccatgcacaatgttgccgagcacgaatcgcatttatccccgctttcattgttgtcaagcatacgccacgttgtacattgtcatattgatggtgcgatgacactggtgctgtcgctgatgacaactattaaaatgaacatgagtggaggcagtttttcatggcaagaggatgggaatatgggtgggccttttatcaatcataattttcattgtcgatgcaatcaatttacaattgcgtttgccattccgtgttttaattcaatttattgtccttaaaacgaactgaaattggctgtaatttccattgttctcgggggaaaatcgcggagcagggtaaatgagcaggccaatttaaattcgctggcatatgtgtgggccaggacgaaactgtttaaccaagaagtttaggatgctctgaaggacgcttaacaaagtgaacttaggggaatatccggaggaagctaaacaaaaaattccgaggagctgctggagcagcagcttcaaaggcaatcgctggggaaatctgctggccaaacatatacagcccgaccgctcggcaaacaaaaacacaaacgaacgagcgagcacacaggctaacaaccgcaggagcaaacaccactcacacacacaaacacacagacaagcggagaagggcggggggaacaggttgacagggttggcaggggaggacgttattatggcctgcaataagccatgttaataacaaggcagcagcaatggcgacggcatcgctgctgaaacgagtcaggcgacccaaaactgtgcaaatgttggccaactgtgagcaggacaccagtcgaatgagtcgagtccgttgcatcgacgggctctgtttgcataccacatcctgggagctccacgtgtgctggcgtctctgtgtaccgttggatcg

SEQ ID NO: 17156 - DNA, 675 bp, DROSOPHILA
atgggtggcaagcaccagggatcgggagcaggagcctcctccggaggcggcagcctcaactccagcctctgcaattccgtaatgacgaacgccacaacggcgagcagcagcctcacgcaacagcagcagcagctccaggccaagtacatcaaatcgaagcgccaccagagccgctacaccagcctccagcactccggccacgattccggcagctatctgcatctgaactcgctatggtcgatctggtacggagtgatgctcaccctgttccagggatacttggccatgcacggagcgtacaggttcttgggatgctctttgataccctggaaaatcgagcctgtggccgaactcaatctgcagattgtcctttctggagtggtgttcatcctgctgccggtcttttttacctctgccgtatttaaggtcggcaacttggcaaacgacggaattaaattggccacaggtgccagggagcggcgctgtaccttatcgccgcacgatggcctggaggaggaatcacgtggcggcacccttcgagccctttggacacacggcggacccacggcggccttcgttcacatcgtgattgcactctgcctgctgctgccgcgtttgctgctcgaggctcgcatcattgagaacggattgctgccaaaagagctacttttgtag

SEQ ID NO: 17157 - protein, 224 aa, DROSOPHILA
MGGKHQGSGAGASSGGGSLNSSLCNSVMTNATTASSSLTQQQQQLQAKYIKSKRHQSRYTSLQHSGHDSGSYLHLNSLWSIWYGVMLTLFQGYLAMHGAYRFLGCSLIPWKIEPVAELNLQIVLSGVVFILLPVFFTSAVFKVGNLANDGIKLATGARERRCTLSPHDGLEEESRGGTLRALWTHGGPTAAFVHIVIALCLLLPRLLLEARIIENGLLPKELLL

SEQ ID NO: 17158 - DNA, 4261 bp, DROSOPHILA
atacatacatgcatacaactagtttaatgtacacaatcaacattcatgttaaattacgactacgcagaacctgagttcatcgcttcacgtcactccaattatgcatcaaaatgcatctaaatagcattaggctgagaattgagaacagagaacgtttgtgaaaaccaattgtgtttgtatgtgtaacaaaatgaaattgctagataattatagtttattcgtacatgtaatttaatgtaatgtaataccatggcccttatttatgtttgctacgatgcaacaaaatccaccaagtcagcagtcaatcggtacttaaagtcggtacttacaacgtttataccccctaacacagccccctatatacatacatacttaggtgcacacggaaggggcatctacatcggcatttacatgatattgttgtaataaaccaaaccgaaatgtgaacagaatttttaattgtactaaactaaacaccgttttgtattcgtattcgtaattgtatatccgtaattgtatttcgcgtactcgttaatggttaatggttaagagcgcccaatcctaatctaatccaaagtcatttgtatcaacggcctttacttctcgtttactttatacatctaccagggagtttataaagatatagaaagttattgaatgagatgcaacgaaaacaattaccactgtacttattgaatattgcaattgcctaagcaccccactaaatgcatgggaagagaagacaactatttatgtaatcactaagcgtacttactgtccacattcatttacttgttgttgaataaaaattaccttttaccaaatgccatgcattttgaaaaacgaactttcaattgcgcgcgccaaatgctcgacgactgcgatcgatagcagcgcggacgatgacgataacgataagtgatagccaagtggctcgacaacgatcgtttcggtttcggccacttttgtttatgaccaacaaacagtttccagtcagcaggcaagcccaaaggtttgctcacaaaaaagtgccaaattttcctggtaagcatcgaacgatatagatattacgactttcgggcttctagatagacaggtgccatttattggtcgagtgtttacaagtttaaaatggccaggccaaaatgccaaaaaaaaatcgtgtgtgttgacgtgcatgtcgaaatagacgcggaaaccagttcgcggtaattgttttgatgctgtgttgtaatctgtaagaccgcccagcgaaaacattagcacattgagccatgtttccctttgttgagattgctgccgtatattgtatcttgtaagttgctgttgctttggccgatggccatgttgctgctgcaaatgtggctgttgcagatgttgctgctgtcaccattagtatcttattatttttaatgtctttttgagtctgctcaacggccttagttactggacggggtctaataaattcattcaaaacaaaagttgaccgtggccaagtaacacactaaggggaagtagaaatcgaaagctatagagcgacaatgatttatatacgaattttcatcagatttcctctacaacggaaactagctgctcactatatcttcaatatatccgtctaaatgtgcgaacagcattcaaactttgcttatattataaattataaagttaacagtcatttttggcactttaaaagtgcgaatgccattaatacgaacagaattaaggtcgcgttgcattagaaggtaaccgaaaataatgatttaattagtaagtttatttatttttactaagctctaggccattaagaaataattgttacttaattacagctttgaaagttattttcagattttattttaaattaataaaaagtatttgctgtaatcaaggaatatatgtagctctatatactataagatacaaactagtaagttggttactcatatttacatttatgcaaataaatagtagttaaaacccattttgataaggtgaaagccagtttatattacacagactataaaaagcaaataattgaagtaatcatgggaatttggattacacaaactaactataactataagtaaacatataggtaatataaaagtggccgcctttattagcgccgcggagcgtcacgtaagccgagcatttgaaaaaccgccgagtcacttggaaacctgctccgctgaccctcgaagaaggtcgccggctggtgatgagccagtttatgtgtgtgatgtccaagtggccgggctggtccaagtggggccgccgaccataaaagccactctcacggaaactccacttaaccacttaagccagcccagctaacctgcagtcggtctcgttgcagttaaaccaaaaaccagtgtactttgaccctggacgcaatgggcaacaaaagcggggaagtgctgctcgtaaccggcggcagtggctttttgggtcagcacctcatcaagcaattgctggagcggaaggaggagctgggcatcaaagagatccgctcactggatatagtgccctacaaaaacaacattggccacgaggagacctccctgctgcgcacctatgtggccgatatcggtggcgatctgaaggcactcagtcccatcttcaacggagtggacggggtcttccactgcgccgcctcggtgaaaatcgagtatccgccgaactacgaggaactggagcgcgtaaatgtgaacggtgagtgagcgaataaagtacctcgtaagataggtaattccaggcaactaaactgggcttggaataaacattgatttgatcttaatttcgagtttatttcttcgctttgttaggcaccctggccgtagtagacctctgcattcaaaacaatgtgaagcgcctggtgtacacaagctgcacatccgtctgttttgtgcccttcaagggtcggagtaccttctcggcggtgattaactcgacggaatccaagacagacactcccacgctggacagttccactttgtgggagcaggataatcagttcctgatacccggatacgcctcgagcaagcttagggcagagaacatagtgctcaactcgaatggagcgccactgcataaccagaagggtaagtttggccgattacttagcattgacttatttaaagacatttaaatatattaacatttgtaatcctctgcagaatatctggccaccagcgccatgcgtgcccctttgacctatggcgagtgtgactcgcacttcatcacggagattttcgacttcctttcgactaggggatgggtgttcccaaggatcgcgggcgtgggcggaaagcagcagttggtctacgccgggaatgtggcctggggtcacatctgcgcctataaggccctcaaggtgtccgataaggcggtgaatggactgcccgtctttgtcaccgatgatacgggcatcaatgatgtctctcgttttgtccagaagatggccgtgctgggcgagcggtttaaggtgaagaccagctggtggtatgtgccgcacttcctgttcttctttctggccttcttgctggaggtggtagtgcgggtggcctatccatacaccaagtaccgtctgcggtactcactgcgcgccatcgcctcctacacgtcctcgatgctgatgtacaatcgtctaagggcctccatccacatggactacatgccactcttcgatccggatgcgagtgccgagcggagcgcaaagtggtatgccacgtggtgggaccaacggcagcaggcccagaagctcaagaagtccagctgagtggagctaatcccctattacgatagcatactcctcgatatcctgagtggatttgtgtttactgccctctttgatgtcctgtaaatatcttgttaaataaaatggttgttgtttgtattacgaagtcgtggtttagttttgcaaaagaaaacaagaaatgaagctagcatcggcaagtcaaagttaatgtacccttgcagaaaaaaataatttattttctattagtttaaataatttttccgactaatcccatatggtatataatattccttaagttttttcataacttaccgtcttaatcttgaccctttacatttttaaaactttccgtataaaagaagaccagtaaaaaaacaattagcgtatgtttttgaacaatgttcatattggtttatttatcattatgaattaatttatttatttctcagttatttcattataatttttattttatatatctattgatatatatatatatat

SEQ ID NO: 17159 - DNA, 1278 bp, DROSOPHILA
gcaagcccaaaggtttgctcacaaaaaagtgccaaattttcctgttaaaccaaaaaccagtgtactttgaccctggacgcaatgggcaacaaaagcggggaagtgctgctcgtaaccggcggcagtggctttttgggtcagcacctcatcaagcaattgctggagcggaaggaggagctgggcatcaaagagatccgctcactggatatagtgccctacaaaaacaacattggccacgaggagacctccctgctgcgcacctatgtggccgatatcggtggcgatctgaaggcactcagtcccatcttcaacggagtggacggggtcttccactgcgccgcctcggtgaaaatcgagtatccgccgaactacgaggaactggagcgcgtaaatgtgaacggcaccctggccgtagtagacctctgcattcaaaacaatgtgaagcgcctggtgtacacaagctgcacatccgtctgttttgtgcccttcaagggtcggagtaccttctcggcggtgattaactcgacggaatccaagacagacactcccacgctggacagttccactttgtgggagcaggataatcagttcctgatacccggatacgcctcgagcaagcttagggcagagaacatagtgctcaactcgaatggagcgccactgcataaccagaaggaatatctggccaccagcgccatgcgtgcccctttgacctatggcgagtgtgactcgcacttcatcacggagattttcgacttcctttcgactaggggatgggtgttcccaaggatcgcgggcgtgggcggaaagcagcagttggtctacgccgggaatgtggcctggggtcacatctgcgcctataaggccctcaaggtgtccgataaggcggtgaatggactgcccgtctttgtcaccgatgatacgggcatcaatgatgtctctcgttttgtccagaagatggccgtgctgggcgagcggtttaaggtgaagaccagctggtggtatgtgccgcacttcctgttcttctttctggccttcttgctggaggtggtagtgcgggtggcctatccatacaccaagtaccgtctgcggtactcactgcgcgccatcgcctcctacacgtcctcgatgctgatgtacaatcgtctaagggcctccatccacatggactacatgccactcttcgatccggatgcgagtgccgagcggagcgcaaagtggtatgccacgtggtgggaccaacggcagcaggcccagaagctcaagaagtccagctga

SEQ ID NO: 17160 - protein, 398 aa, DROSOPHILA
MGNKSGEVLLVTGGSGFLGQHLIKQLLERKEELGIKEIRSLDIVPYKNNIGHEETSLLRTYVADIGGDLKALSPIFNGVDGVFHCAASVKIEYPPNYEELERVNVNGTLAVVDLCIQNNVKRLVYTSCTSVCFVPFKGRSTFSAVINSTESKTDTPTLDSSTLWEQDNQFLIPGYASSKLRAENIVLNSNGAPLHNQKEYLATSAMRAPLTYGECDSHFITEIFDFLSTRGWVFPRIAGVGGKQQLVYAGNVAWGHICAYKALKVSDKAVNGLPVFVTDDTGINDVSRFVQKMAVLGERFKVKTSWWYVPHFLFFFLAFLLEVVVRVAYPYTKYRLRYSLRAIASYTSSMLMYNRLRASIHMDYMPLFDPDASAERSAKWYATWWDQRQQAQKLKKSS

SEQ ID NO: 17161 - DNA, 4045 bp, DROSOPHILA
gcggcagaaaccagacgccgacgtcagctggctgtgacgtgagtcacaacaatgggcccaccaattagcacttgactttgaatcaaatcaagccaaaatcggtcgcaaacatgataacgaaaagcacaattggccgaaccgaatgggcaaacaaatcgcgtgtaattcgcgactaactaactcgaatgtttatctgttttcttttcgcctcgaagtaccacgaacaactggtcgttccagccactccatcgccagcggagcaccagcggatatcctcagcatgtcctcaacacggtgccggaaaccgccgtgctcaccacgcccccgcccacgagaaaacgtaagttaagcttatcgcattgccatttgaatttggcgcccaggcaagcagtgctcttcgaagttagcagagattagtgaacgggaggagtattattagggtatattgtggtttagctagatataaatcttgttaggaatttaaatgatggaattctttttgttattactgcactttcagtcatcatcgtttaatttttgctaattttcgctctttttcaacatttaaatgatataacagcgataagctaacagctcactgttacgccaagcagtacttcaagcagtgtacccaaggctgttgactgaatgcttttgtttttataaaaatactattttagcaattttatattagacttaaacttgatttcgaaacaacgcggtttttttaagaactttagttaagaaattattgttttcgcactttgtggtttattgtgattgtaagtgagcacttagagaagcatatgataacccaaatatttgagctcgatgacaatatccgcttagaacaattgttctcaacagacgatcaataaattttgaataacgcgcccatggcgaccagtttagtattaaagcggtatttttgtaggattttgcgctgtttgcgcgcctgctgcgcacctggcaaccctgccgttcaattaaacaacaacaactgaaataaaaacaaaattacagcgctcacaatacaaattgctggcgttgctgcagcggaaagcggacataagcgcagattcttagcagcgcggaaaaagccgaaaagcgcgatgaaaatgctcgcggacacggagcgtgaggaagccctcaacctggtgagttttccgatcgttaaaaatgcgctgctagttgcgagtccatgacaacggcatcgcagcagcagcagcaacaaaaacaataacaagcgttgccaaaaaaagcagcatagaaaacgattaattggtcccctttatgttgactaattgattatcgattgccgccgctgccccgttcttcctgcttttccgaccgactttccaccgcccccgcacatcgcctttattgatttgtacacggaacgtgctttgtttgatggcgctatcgcaaaaaatacaaacccaccaaccgactgacatacctacataatctccggctggcgggaccacgaaacacaatatacgaaatgcggaacacaaaatatgcaaacccaacccactatacaatccacttcaccgcccgtagcaaatcgagttcgagtgggtgctgcgccaagaagtacacgcgatactgaagcaattaaggagcattctggtggtgagtagccgatcggattcgttgtcctgaatgttgttccctttaaccacaccgcacgttgtgttcgcaggagtgcgctcatcgatttccggtgcccctttacgagaacgagggaaagaagactgagaagttcatactcaccgtgtcgcccgatcagctgaaggccgtgctgaccctaacgggcgatgccatcacccaggctgtaagtgccagtagctgccctcataacgtagtggaaaggtgccgccactgtaggtcccagcagcaatcaccaacttaaagaaatgccaaagattgtagacgcctcaaagtgtggtggggaaatccctcacgcagttatctagttccctttcttaaagatgattcagtcttagaatatattagcatatgtgtgaaaagcccccagaggttactgaaaacttccgtttgctattctcaaaatacaatttatctcaaaagatataaattttacattttatattccttattaaatcctttgccaccgctttactatagaatttttaaatcaaaaaaagttttcaagtcttactcaactacgctcttctgatttataatgttctactacgtactgctacgcccagtaaaatcatgttaatcatttaagaatacatttattttccttatctgttgctgaaacgacatgtgtacctttccactataaatatgcgtatttgttcaattaatctgatgacttaactacacaagtgaaaactttccgatcatgtaccgacgacccaagtatgctaaatcaaaatttccttttgcaggacattagctttaagctgtgcaaggcaccgagccaaacgcaacgtacctccattacacatgactctccctggaagttgcagcaggtccaggatgcggccaatcatctgcagaccgccatcaaccacatagacgatgtcgacgactcttatcacttcaagtgagtcacgttttgttttgcatgggatctgcgctccgaggttatatttatacacttacatataaactctacacagaacctccgacgaagtgctgcatgtgataggcaacattctggatgccctgcagcggggcagaaacagtttgctggtgcccaaaaagaagcccatcgatgagctgatcaaagggcgcaatatgaagtcgctggtgcccaatctgcccgaggatttggccgttagcttctacctgcagagccacaagctgatcattgccgtctaccagctgctgaacaaccagggcacaatgcgcttcgattcccgccaagcggaggcctctgtccagtggcttaacgacgtgctactgctgctgatgaatggccagaaactgtgccagcaattaaaagacaaggtaagtcgtgaagcaccggaagtgagcaaaagaacacacaaagaaacaaagtggtagggacaaaaacaaggtcagtcgcgagtggaagacaagcatagaagtttttaattgaattaaattaaattgtcttagaacgctttttcaaaatataccatatcatattttaattgtttcattttgaaatagatttcttcatcagcagtatggtatgtttatggtcagtttttatttagaaattatgggtattatatcatgttcgccccccgcactcaccgaaaagcagaatacttgttctcagcgggttagaagtatacacagaaatagtcaattatttcctacagatataacaaatgtatctttgttgtctacactgaaagaaaaggcgtgttttcaaataaattcgcagttatgtcagggctttctttagcatgatgagattaagttgttctggaactttaatggtgtgtgcttggctaaatctatatagtattaattcaatacgattttattgatcataaatcattttttcgctcggtataacctagagaaatgtaataggcacgatatttcgactgagcagatcgaaatggttctataattcataggccagaatagctgaagtcttcagcaattactaagcacccaaacgattatatccacacgaaacacacccacccaaaagtaagctattttcggaactagccggcactgataaggcgtctgctcttgaactgatatcacagcgattcccaacggcggagcacatgtgcgaagagccacggatgctgtcccatttttccgcacccacaagatgccgccaagttttatttggttgctggccaagtgccagggccacgctgcagttcttgactgtgacgcaagtcggcaattaaagtggccaatatggggattggcacgagtatggccaatgtgagggaacgggttccgatgcgctgggtcctcgaatgaattgtgggtgtatttttaattcaatatttctactctttcgcagatatctgtgttttcggtgtacaaagatttcacagttggctcgcgt

SEQ ID NO: 17162 - DNA, 907 bp, DROSOPHILA
ctgaaataaaaacaaaattacagcgctcacaatacaaattgctggcgttgctgcagcggaaagcggacataagcgcagattcttagcagcgcggaaaaagccgaaaagcgcgatgaaaatgctcgcggacacggagcgtgaggaagccctcaacctgcaaatcgagttcgagtgggtgctgcgccaagaagtacacgcgatactgaagcaattaaggagcattctggtggagtgcgctcatcgatttccggtgcccctttacgagaacgagggaaagaagactgagaagttcatactcaccgtgtcgcccgatcagctgaaggccgtgctgaccctaacgggcgatgccatcacccaggctgacattagctttaagctgtgcaaggcaccgagccaaacgcaacgtacctccattacacatgactctccctggaagttgcagcaggtccaggatgcggccaatcatctgcagaccgccatcaaccacatagacgatgtcgacgactcttatcacttcaaaacctccgacgaagtgctgcatgtgataggcaacattctggatgccctgcagcggggcagaaacagtttgctggtgcccaaaaagaagcccatcgatgagctgatcaaagggcgcaatatgaagtcgctggtgcccaatctgcccgaggatttggccgttagcttctacctgcagagccacaagctgatcattgccgtctaccagctgctgaacaaccagggcacaatgcgcttcgattcccgccaagcggaggcctctgtccagtggcttaacgacgtgctactgctgctgatgaatggccagaaactgtgccagcaattaaaagacaaggtaagtcgtgaagcaccggaagtgagcaaaagaacacacaaagaaacaaagtggtag

SEQ ID NO: 17163 - protein, 264 aa, DROSOPHILA
MKMLADTEREEALNLQIEFEWVLRQEVHAILKQLRSILVECAHRFPVPLYENEGKKTEKFILTVSPDQLKAVLTLTGDAITQADISFKLCKAPSQTQRTSITHDSPWKLQQVQDAANHLQTAINHIDDVDDSYHFKTSDEVLHVIGNILDALQRGRNSLLVPKKKPIDELIKGRNMKSLVPNLPEDLAVSFYLQSHKLIIAVYQLLNNQGTMRFDSRQAEASVQWLNDVLLLLMNGQKLCQQLKDKVSREAPEVSKRTHKETKW

SEQ ID NO: 17164 - DNA, 2389 bp, DROSOPHILA
cgactgcggcgtatgctgcggctgtacctgactgggatgcgccaagtggggatgctgcctcatcaggccatcgagttcaccctgtaataaaacaattttacgtgttaataccatagtgaattatactaatatcctctgtctgtatgatttagtgagtttattttcggagcactcacctgatagtatctggggtcatcatcgggataggcgccacctgatctgggctgttgctgctgctgcatgccgtatccctgctgtgcctgctgcggattcatcggctgcatccgagctcgctgctgctgctgatggtgctgcatctgctggccaggactcataacgggatccattccactgtcggacgcggagaggcgacgattcgtgggctgctcctgctgcgagtactgacgcctcagcatgctgcccgcccgctgcatcggtaggttctccttctcggcggcactccgcgtcctctccagcttaggccgcttatccgtggtgtcgtgcggatccacgatgggatgctgcgagatgtcctgtcggatacaataaaaccttcaagtaggaaacttgtccatggcgggcacatctactcacgctgctcccatccggctcgatgcgtcggatgaaaccatcttgttgtgccgccgtcttgttgatccactggccagtcttggagagcagctcctgcttcttgcgacacagtatgcacacccaaatgacctggaatgtgggaaggacattagaattacattaaggcacaattaagaagcatgatgtctttgtatcatattaaaaatttaaggccatgtacagggaggacaactaatattcttgaatttatttatatctaaaaattatagccgagatgaaagggaaacattgaacttcacatgaaattcctttttttaacgtaccattttctgatacatcttaaagtttaggtcaatctagtctacccaggtgcttcaatcatttgaacacacatacacaactccagcactctccggggaatttacacgtgcacttgcaacgctttcaaatttgcgaccaggctttgccatggacgagttactaaatctgggtctcaacggcatacagtttgaactggaggaatctgcggcggatagcgacgaggacagtgaaggaggaggagcactgggcggttctgataccacattgctgtactattttagaagattgtaccatgttctcagtgggaatatcttcatgaccacctacgtggagcgcgggcagagagaatactttgcaggattcagcaacgtggaattggtggctccgttccagggtgaacgacagagccagcggtaccgctggatccacctgtcgctcatcttccgcgccttcagatccaagacagagtcctggtgaagataccccaccgtgtcacagccaaattgaaattccatttggcatttgttccgagttgttggcccatctagtttcattttgcgtcctggctttcgcttctgacccaccccaaagtccacaactctgcccttttcggttcccctgtgtaagtgggtgtgtgtgtgtttgtgtgtgacattttggcagcagttcaacggaaaaacgtttggcagcacggccagaaaatgataagcctggccagcgagaaagaaaagcgggtggaaacaaccgaggaatcggttcactgagtaaaataaaaattggaaaaagtgtaattgaaatgcaatgcacgagaggagcgaagggttgccatggtggatttcaaggaagcaattcggaagagactttcttcaatgccaccataaggtttcctgccatcaaggctgcgggttaaggtgccacgaaataatcgtaaccatctagttatgttcttagcatttaatttatacagctaagaatataagaaaagaaaaaagaatgtacgctctttaaaggatccttgactaaatgttcagttcttgcatggaatttagtatattctgaatctaagaacgtcatctcatatccttgaccagaggcgtcgtatgaaactggaaattatttctaaattataagtgtcgaatcgagaggcgccaggatggagagaagggcacaagtgtcctggctccataccacggctcacccactcgatcccgcccatcgcccaattatccagcggactacaaggcgacaaggagcagttattcatgaggacaacgcgtcactggggacagcagttggcaacaagcggcggtggcctatggcgatgccactcaatcccattcaatgtcgatgtggcaatggggcgtatgagtgatggctgcttagccaagcgggagccgggtcgccagtaatattggcaccagcgttgtgctatttgtcaatgggcggaaaataagtccgacaccctttacgaaaaaag

SEQ ID NO: 17165 - DNA, 389 bp, DROSOPHILA
tctccggggaatttacacgtgcacttgcaacgctttcaaatttgcgaccaggctttgccatggacgagttactaaatctgggtctcaacggcatacagtttgaactggaggaatctgcggcggatagcgacgaggacagtgaaggaggaggagcactgggcggttctgataccacattgctgtactattttagaagattgtaccatgttctcagtgggaatatcttcatgaccacctacgtggagcgcgggcagagagaatactttgcaggattcagcaacgtggaattggtggctccgttccagggtgaacgacagagccagcggtaccgctggatccacctgtcgctcatcttccgcgccttcagatccaagacagagtcctggtga

SEQ ID NO: 17166 - protein, 109 aa, DROSOPHILA
MDELLNLGLNGIQFELEESAADSDEDSEGGGALGGSDTTLLYYFRRLYHVLSGNIFMTTYVERGQREYFAGFSNVELVAPFQGERQSQRYRWIHLSLIFRAFRSKTESW

SEQ ID NO: 17167 - DNA, 18028 bp, DROSOPHILA
acgttagttgtttcgcgtttgccttcagttgaatatttgtactttttatttcgttttaattcggggggatcgaagcagaagttatagcctgatatgggttcagttagttaatatgtgttgttcagtggatagaggttagaagtggactgggtgggcatatatgtataggtggagggttctggatttctcttaagctttagtcaaaaaacaatagggtcttgagtagtgttacgaacgatattgattaggttacacacataatacatacatatatcacatataggtatgtgtgtggtgtatatatgcttagttggttagttcagttaatcagtagttcagttacagatggctagctgtctaagttacacgatagtattttctgtcacatttaaaaagcagatattgcctcgggtttcgcttgatgactatacatgttggctttggttttatggttcttctttgttacttttcagttaaatataacggcagtttttctatacttttttagtaatgcgtgtgtgtgtgtgtgtctgtttcggtgactgcatgctttgtagatcgtaaatctttgctgtctatttcttttagctcttcaaagggacattcctcaatatggacttgcttcactgtgcttggcttcattgttcgtcctttggatggaagttccgaagccttttcactgtattatacttgctaaaatataatggcttgtgagctttgtgattttattgcattatttacagtttccatttgctcttacagcttgatcgcggtgttatttagcttcggttgttgcaaatttaaattaaattctgccatcacttcttcgatgtttatgctgtcgctttaatgtcccttctgttatgtagtgttatttgtcaatgtttattagttcttggacttttggtttatgccttactatacggatttattcgtactctcttaccgttcatttcttgccttttgttatttctggatttgaattttttgtttttgttttagtgttgtttatcattaaatgtataatttaattaaattaatttagattttaatttagattttaatttaatttagcaatagattaaatttgtttttgttatttgttctacttaaattaaatataaacagcttttgtagtcgtttctggcatccaacgtaactcctgtcaaggccaaatttataccacgcaacgtcttttgcactgattcattcgtcatacatatatacatatagatcaaacatatggtaatacatacatggggatcgagacgtaggcaaaggtttaggtttaggattaggtttatacgtaaacataggcaaacatgtgtatcgcgtaggtagaggagcgcgccacgtgaagagaaaagagagaaaaagttatgttctaatcaaatcgtaattcaattcagttcaatttatttgttcggatgttcgcactgcacagagaaaatagtttatgggttttcaaaaataaatttgaagttaatacatatattgttcgcgatagttaatggagatcttttaatttgggatcctttaaaaacgcagtagattgactaagtatgcgaatgaaattaaatatttaaattcaattttgctttgacatttgtgttaacgtgcattattttccactcactttgaagcaaacgaaactgtttccgctgtggcgcatctgtggctgccagtgcgaacgatccgttttggaattttgcatattgcttttcgcattttgcaacacttaaacctagttacgctctacgagtcagggtgcacgggttccgttgatgttgggtagttggtgtttgggttggggtctgagaagtgagtgtgccgtagcaatatatagctaggtagtgtgacaaagatggaagttgttgggggttggttgtggtggtggtggtggtggtagtgatgggtaggggggtcgggtctgtgcagcaagcgagtggcgttttccaacacttacccagtagtcaaacgtcggtctcgatactaacggccagggcattattgtgcctcatggtgagaccgctactgccgctgccgctcgtcgccgctgctgcacttgcgtttattgtgtgggactgttgctgttgcagctgctgctgcgtctgttgctgctgctgcttgaagccgttttgctgctgctgctgctgctgttgctgctgttggtacagttgcgtctgcgtcagctgctgcagtgggtgctgcagttgtttgtcgatcgacatcgacagtgaggatgctaccggttgttgctgctgctgctgggctcccaaaaatggagccaccgcactgcgtccaggatgtgtttctgtcaatcccggcgtggactcgacaccatcgtccaaatccatcatatccgatgaggactcagacaatgatgatttcttcatgtgttgacctacttggtggtttgtatgcatttgtttagtgtgttttgtcgcagtgtatatcacgcgttggcagacagagcgtgttttatgcgtgttttatgcgtgtgtgtgtgtgtgtgtgtgtagatatgacgtgtgtacgtgagtttgatttgaggggattcacacaatgccagggatgcaggagcggattttttttattggatggatgggttcgagttcgatttgaatttggtttggttttcgggttatcgggttaacgggtattaattgaggaattatttgtgtggaggtcgcgtttcgatattcgaattggccatacaattgacggaataaagagagaaacaaaaagaagagagagagaagagagaaagaggagatcacacatacagttgtaatgcatcggttacagtaatgttttttgctgtagtactcgcttacacacaaaacacacacagtacgtgcacgttggttgtggcaccgctgtcaatactgcggtataccgctgccccaccgacagggttgccacccaccggcgctgcagcacgccacccaccagcccaccagccaattaggtgttgcctcggaggggtggtgggtgttcggcagtgcacagagaaaaaacataacatctgtttcatattgtcatctcgactttttcaatcatgcaaataccttaagctatggcaatcatctgtggcatatcattgtgaaaagattacattgtggatgtttattgaggggggagtggaaaaaattctcattttgtaatgcttccagctcaatcgaaaggttaacaacttacaactttaacattcaacgctttgtagttatttaaacaggtgctatggacatgataaggtcataagatctttggatatagcataataaatcgtacctcttatatttcagtattggtgtgggttattattttctgagtgatatggttaaacttaagtatatgcaaaaaaaaaaaaaaagattggggcattgaaatctccattccataaagattcaataatcaatgatatgcctcagatcaaaggtgactgtgtggaaatcgatgaccgatttgtggtgatattttttctctgtgtgacagcgtgtctggctcgaaagcagtgccggtgcccatccgctcgagatccatccgcttggtggtgccaatcggtaggatggatggtgggttttcggattcggatttgactttctcggtggttcctttttggggcacacggcactgacttcggcttcagcatcggcatccacaattcgtttctttcttcgtaaatgtttctatttttattcgacgggttctactttttgttgttctacttgaatttgtggttgggttttggtggttctgtcggtagtgggtggttcgtattttgggtggcttgttgcgagtttttcatatatatgtatatatatttttttatttttcttggtggacggtgggtttgtttgggtaaatgcgaatcgagtacaaggtgggggtggaatggttgggtttcgagccaaggccacaacgcatatgtatatcataggtggcacaaagcgatagagattgtgagacggggggggggtggcttcggttcggagtggggttgtgcacacacagtgttgaacttacctaatgtacctggcaaatatggacaactagtaacgtgattaaagttctggctctgcatctcctcctgatccgtttcgcggtgatagaagtagttgaaattgctgacgatgaccggcaccggcagtgcgatggtcagcacgccagcaatggcacaaagtgatcccacaatcttgccccaaacgccgacgggtctgtaccatcaatcaatcaatcgttcaatcattcaataaatcaatcaatcaatcaatcggttgtttcacatagttcaaaatttttcaattcattttttttcaatttcgaattcgatttcaatcgatagtcgtgatcgtgtgtcaaacgataaacgatacaattacaatgcaatttttgattggcaatcatttgcacatacaaattttcccggcgttttagggttgcatttattattttgattattgttataagatttttatggtaagaaattggtgcaatttgttgttgttgttggttgttggggatatttgtttttatttttttttttggttttgattaacaattgatatatattttatttgaattgagaattttggagttggttggtggttttttttttttgtaattgatttttggtatttgtttgtttggatggaagcgagcgatgttaacgaacgaacgatataaataaaatgaaaatacaaatatataagaaatgtaaagtaaaactctcgttttttcttagaatttcttttgcgttgggttcttttgttttatcatatatacggtatgcattggcaaaattatacggcattacgcattatatagatacagatacaggtatagatatcgataggtatacgcttatataagtaaatatttagagagaggagggcttgagtaggcattagtctagcagagaacgttcaaatcaaatcaaagtggcgcaaagagtacgaaagtcgaaagaagaaggcacaacacttagaacaacgggtgtgttaagcgtttatatgtatatttgggtatatatggtattttctgtacagtttattttttgtcttcatttctgtttgcagtttttgaggcggcttgttcgtgtgctaatatacagacataattattgcataagtgcgagcaactggctcaggtgttagagtgtgtgtgcgtgggagggggcctggtgcatgtgtgtgggtgtggcgaaaactttttcctcctgtgaaagttggaaagtggaaaaatgaggagggggattttttttcggtggggttcctggtatcttggtatcataggcaataggatttggcaggcgactgggctttgttgctcattaggcggctgtagctaaactttagtgtctgtgtgtgtgtgtgtgtggatgagggcgcctagttgtgggtgtgtgtgttgtgtaagtgggtaagtgtgtttatcgggcacatgcagcatgctcgtcctcttctccttcatcctttatttttttctccagctttattgtgttcgttgtaatggtattagggggttaagctcgataaactgtttggccagcaaatgaagttatcgttatcgctcggtgggcgtggttccatcacccagtgtttgcttgtgtgtgtgttcgtatagttcttgttttagtgttagatgatggtgattatggacggcactgtactatgaagttacagtgaccggtatgagaatagaatcgagttgaacttatgatgacttgtttcggtatatttcgatgttattccgttatttttgtgaactaaacaacgacacaacgttacataggtaatttgcgataaggaaattaaaagcgatatacttaagattggcgcaaaaaaacaagaactgctaaaagactgatggtggaatcacaatgtaatggcaacggaacacgcgagagagcgagatggagggtgagctagtgcgagcgagaaagaaagactgatgccaactgaaaaacgttaaacgatacaaaacggaaatgaatttaacacaagagttgaaagacaaagacaaatacaaatacgaatagaagtcgttatagacaaatacgtatacaaacaaacagctcagcgagtcaaagtaagagacaacaacgtttatgtttggttttgcatattattaattgggagataaggaactcaaagggttaacaagaagtacattagttttggatacatttcggtaaatagctttagtgggtttagcgttttttttttttttgggcgggctttcaataatcactcataaaaacgcaagtaacgaaacagttgaaaattaaaattagaatagaataaagaggtggaacggagaaggaatggaacgcctagaaagaaggcgctcccaaggcgggaacgaaacgaaaacgaaacgataacggaaacgaaacgtaaaatcaaaactggagttatcgtaaacgtaatcataaaagttagaattgtatagatttgcatacgtcatgtcaccatatccaacggtggtcatggtaacgaccgcccaccaaaatgcatcgggtatggacttgaagaaggaattttcgcttccagcttccgcaaaataaaccgccgatgagaagagtacgacgcctaaaaaaattgatgggagaaacattgctttgcattggtaatatattcttttatgattttttgttggttttatttattcattttgattttcttttttttgtttttttttttgttgttttcaaaattaacatttaaccaaagagtgttttttgaaagtaagtcttttatgtctggatgcgtcggaagctcgtcaagttggtgtacgtatgtgatggttgggtattcgtgttccaaaatacatttcgcagccctggtacggcggcatttgattatgtttcagtgttaagattttagatttcggttcaacttaaaagagttttcatatattcacgtgagtttcctcgatcgatttgaccacaatccggcggtattcccaagcagaaaatcagggcttacctcgggggctcgcttttcaaaaacacttatggtttgtgggacagagaggaggatcaatgtaggatatcggtttctggtgagcctcccgttgttcgcactacttctatgtgcccagaaatatggtgatacttttgggggtcgaacaaacggcgatagtggaccatagatcgaatgtcttgaaaacgaaatttgactccattcctttattttatttatacgggactagtgggatgcggagtgggggatgtaggtacatactaaggacaaacataacgcaaaacagatgaaaacgtaaaagggaatggaaaatggacggcgacgcaaaacgtagaattgatcatgccacagaagaaacacataagaaaatcaaaataaaaatgagacaaaaaacacaatgggttggttggtggtggtaaggagtaaggaggagggttaaggtccataaaagcgagcgatcaccacaacatcacatttatggcatatttatattcacatcgttcttttttacacagatcgtattttggacggacataactgtacaccgggcacagcctgagcgcggaacgtatgggaatggaaccaccgttttgccagacttatttacattagcattaacgaaatgacgaaagcaacaaacatcaatgacacacataaagcgttagaaagacatatagttgagatatgggagagactgtacaacactcagttacaaacactcagacaaagaagagagacagacagagattaagaaagacagagagatagagagagagataagtgtagatatagaaggcgggatcgagagttgctggtgccgggaccacaccagtgtgtagctgaaacttgggctgtacctcatatcaccatatcccaccgtcgtcatggtcaccacagcccaccagaagccgtccggtatcgacttgaaaaaggaactgtcgctgccagcctccgcgaaataaaccgccgacgagaacaggaccacgcctgaattgcgatccgaatgcggatcgtttaaatatagagatcaatcgttaataacagtgcaattaaatgttattttctgcttgggaatcggttgggagatggtcggggttggaactttttcgggtcgcaggggctgatacgtatgtttatctgaatcccgtcagatttcaaggtggattggtcccctttttattagttcgttaaaacaactacaagatatacataagactgtgagtatgagttagtaaatgtttggggcttttcactttctcttggggttcagtgcacgacaaagaaaactatgtatatatataagtatgtaattaaaaatgttttagacatgtatgtattagtagttagaagtgtctatgtgggtgtgtttgcttgtgtgggtgtcacacgaaagttagcaaaatattacaaaggcggtaaccaaaaaattggcatgttcctcggctaaagccgaagtacacgaagtgcagagaccaggaatcgttgcctacatctctgcgctttcacaagtgtgggtgtgtgagagaaagaaagagagagagagagagagagtcagagagagagtgtgtgtgtgtgtgtgtgagagtgtgtgtattagttaagttagtacgactacttgatcggtggaaactagctatacagaaggttatttatttatagagaatattattacttcgttgatttttggtttgattagagttaatcatgaaactagctaagtactctgtacaatacaatatacatacgttacggttcataagtagcagtagtaggtaagtagtcatatcaattcaatacatatatatcaatatatcgatgtatatgtatatgcgtatagctaaatatgataaggctacactacggcaagacaaataatacggtatcggaaacggaaacaagtggaaagcaaccatcgaatgtctattagaaatatcgatatactatacacgtatatatcagttaaatatcgtatttagtgatcaacatctgcactgagtagtctgaaatttttgaaaagccaaagaaaacgtatctatcataacataacataacataacgtaacgaaacgtgacagacacagaactcaacgtaactgatatatacagaatatatatttatttagatatgcagatagttgagaatatttagttaacgatatattgatatagatgtgtctcatgttcatgtcggtttaaatatggtacactatagattatacatatggtatacttatgattagttaatacgttaattggtcaacagatacaacaacaaactataagctagaaattaccaactagaaattaggaactagaagctagaaactatagaactaaaagcaaaattcaaaccacggcacaatctgtggacatggacatcgaaacgacaacgttaatgatgagtacggtttacggattactgaaaacggtttacggattattgaatacggataacgtttacgattacggttactgaatacggtttacgaacaacttgaatgcgatagaacatgaacaacaatacaaaatatataaaattcacttcatacagatggttttaaatttcgcttgatctttctgtatgtataaggttgtaacatatatcgatcaccatttctagttgctatttatttcgtttggttggacaatttcaatgccaagaagtttgccaattttaaggcattttcaacgcagtttgggcacatacaaacaaagtggggaatcagaagacatggaagggatttcaggtgtcaatcaggtaagatagaaagtttagctattaagtcacataaagaagaaagaagacttgagaaagtacataagttagatctgcgcacaaaatgcttgaggtccttaaaattgccaacgacttgaacgcggcactgtggagaatcccgaaacgattcgatgctaaaaagattcgatcaatttcgcctccctggtctgccgttcgcactttgtcaaagtatatcaggagtaatagactaaaattcgagtacattgagagactttgctgctgtttatccaaaaagctagccaaaaccgaactcaaatttaaattgatatttgtaatacaaaacgcaaatgaagagaactcaacgaacgtatccaaagtgaacgatacttagggagcttttgttagcagatctgggtatagatcttaagatcgggatataagatccggtcgatcgggtcgctaacgtatcgctgctccattggtcgatagttcgtacctacttagcgctaggattagacgacactagataagttagatatacgtaatgggtgagttatacaagttatacacctaggtaatacggatacacgttctaagggcctcccactatgttatttatttatttatttagcgtgtgtgtgagagttttgggtatgtgtgtgtgactatataggtagtatgactagtttacgttactttagtttactttagattagcttgtttgttttatgtctaatctctatcgtttcggttattcataatggatgtttcgtatagtttgtttgggcggcggggcaaggtgtgtctgcatatacactatatctagatatgtatatacttgatataagcaagtactgggggctctcgtattttcggtataacttagtcttaggtctggcattttttggctttcgccgagtttcgtgaggcaaatcaaattgaaaatgataagttcataaaaagcataacacttttctgtatctgttgttttgtatatttgtggcttgtttggctgttgttgtctgtggcgcaatgaaatatttttcgcattttttttttgttttttgggctttaggattggacgtttatgatgagcggtaacataaatgtgctggcttgaggcagacgtaagcgtagatagttatatatatgtatcttttgtggttgttttaattcgcgatcgttggacgattccgctgtagttatatgtagttttagatctatttactgtaagtatatgtatcaggactttggggcagtgagaagtagttgaaaaaatatcttttgagggggcagggtagcgagggtaagtctgtctggatggtcgcagtcgttttgcagtatttctcttttgtttttgatgttgtttgaataaaactcgtaaatcgataagtaaatgtggtatgttgttttttttttttttgttgactgtatggaacttacctataaataagaaaaatataagtaaacctaattcccgcattgaggctttcagagttcgtcctaatatttgtaaacccttcgaatgcctagataacttaaatattcgaaatactcgaactaatcgtatcactcgtaatattgccaaggacatagcctgattcgatgacttgtcctaaaaattttatcgaaatatatatatatatatttataataggtggtatgcatatatatatgtgtgttggtatgtactgggtgtctatcttttagcatatttatatatatagatggatgttcatttacatagatcgatcgtatgtttgtatttagaggtgagtaagcggatgttggattgtgttagtatcggtaatatacaacaatgaacattttttatcgataaactagtagtttgggataagttggttggttgttaatgaattgagcattgcaacaaatgaaaaggtttgactgaaagttgtgtttgtgggtgtatttctttctttttttttttttggtttcggggcgggcaggcaaccccttctttatcatgtcaggcaactcataaatgatgatggcaacatttattactttaatcggttcaactgtatatgcatgtgtgtgtgtgtggtcgtgtgtgggtgattaatattgatatttttggtgtagttggcattgggcaaacagaaatctcatacctgtggactgactggcgcttttggaagatttaacgtatcctcctcttcggcaacgacagtcgctagtgttataaagtacggaatgatggcgattatgtcgataacattcatgacatccctgcagaaatttaatttgttcggacatgcgaggaacctgaacacacacaaaatcgatacaacgaccagcgattggtttggtttaaagattcacacagacagcgcgatagagaaaccgagagcaagagagagaaagagagagggagatttgtaagagagagagaagatttcagattgaaacagttgaattaaaccatgagtgtcaaacaaaagcaaagcaacagatagagaaatacaagtataatattcgtatttaaaatataaacaaattatagacagaacaggagataaccgaaaatcaatcaatatttgtacttaattggaaacatagctttttttcaacgaggatggatagagagatattgtattcgagttcaagttcaaactaatatttctctttcgttcgcttagcttataactaggtgtatgcataaatagacttttcatggaagagagctgcctacctgacagttagttcaaatgtaaaccaaataatacataacgtttctataaggaagaaaggatctgtgatgtcaggcacctcgtcttcctcgatttttgtgccatttgttgttgtattgaacacctgaaagtatgccacacagaaacacaggaaaaagaaaaggaaaggaaaatatggatttgtatcccttggaggtcctgaggtttcgcttgattcgtacgcaccttgtaatgcttaaattcgggtaatgtttctagacaaaatataacaattgatagcaatataacaaatacactaattatggctacaactctggcggcttgcgaactttctggatactcgaagagcagccagacttttctctgtttctcattatccggtaatggtctttcttcctctttaataaagccttcatcctctctgcaagtagaaaatatatttacgttttattgttagtaccaaacgagccatttaaccgtactattgatgatgtgagagtgtggttagggtgtgtgtttgagtgtgacgttcgttgagtatttttgttatattttaggcacagattttgtttattggttcgcaaatctaatcggaagcaggcaaaatgcttaaatcgcaagctaagcttgagtaaaaattaagaaataaagccgtaatagaagcgttgactcatttatggcattggcaataagcaaagaattgaaatagattaagttggcttcttcctgctggatccttgttcgtcctatcctcgcttgacattccgttttccatttccgcatcacgggtccggccacactgcccccccgtgccgtatcaacaaaattttaggctggtggtcaagggattaacattcactttcgcaatcgagctcggtccagagttcagtccatctagatctgggtcttttttgctttatacaatttgcttccagcttgccatcggtggagatgcttaagttctcagggaaagcggccaacaagctacttaataaattatacttaattttattattgcatgtatcgtcatataattatactattttatgagtcctaagccaaagctattcgattagaatacttcgatttattgacaatttattattgcattgtacaaaggctttccctttttgaaccgcacttccagccaacgcaatttgtatgtgtacatatgtatgtatgcatatattggtatgtttgtatttaagccaagtctaattctattctattgtctatgttaaatgtgcgtgtgtcggtctgtttgccgtgttgcatgcctcattacgctgattcgataaaaaatttgccgtgctaccaatatagaaataaaccgaaccaaattgttgtcctgtttatatttgatttgctttagtttttttgttcatattttgttagtttatttttggttgggattttgttttagtatttgttttggttttattggtaggggaatggtggaatttctagtgggcaacacgtgggcttacctgaatttattaattgcttgatcacctaattcataaaattttatttcttcactaaataccgtctaaagggacattgaccggtctccgtagtcggccacctgtggatgaacgtgatgggtgtatttgtatttgtttgtggtatggtgagttggtggcggtgtatgaataaagtaaagtattcattgtttgttgttcggcgacgacgagggtttatagagagagaaatagataaacattagccatgggttgcacaaaagttgcattagattttcgggcaggggggtactatttggcaccacttccaatgcttaccactctgataatagtataaaatcgcatcgaagctcggtcgactacggtcaaaaaaatattcatttctaagcgggtcaaagtaccgtaatctccgagctggatccccaagcagcgtgtccgggaattgatttaacgtacgtagttgtgtctcaaaccttaatccgcttacctggatcaaagtagcgttagaagtgggttaggttatgagtatctaatactcgcttgggttactcacatttataacgactctttcgcagaaatcatgatcgtgaggaatgggttcaaagtgttgcggtccgccaccaaagccatgaccagcccccccttcttcgtcttgactgctcaatttgggcaaagacctgcgaattaagaataaagtaggcgtaattaaagcataggatttaaagcgaggtgtgcaagactatttttactatttttactactatgattatttacaagtaatattcaaaacatttacctttgaagggattaaaggtacctctattatttgaaggatgacgaacatatcatctttagtgcgacatatgagttgcgtagataaagtccaaatttaattagacaccaattaacctaatgcaatataaatcccttaagtgtggagtttgagaagcgcggaggaaggccctccacatttttgattacctaaaataaggccaagagtaattactttgccattgcctagcccacagccattttatttacatttgactttctttttaactgaaagtcgcggcgactccatttttcaatgccttcgatctttaagctctccagtggcctggtctttaattacttatcggctcgaatcaatttccagatgctatgccattgaatattcaatggccatgcatattgcatggccggcggcagacggggattttcagactcactttctcgatatcaaattgcaattcgcaatttcgttggcaacccattttgtggatacgataacgagtgggtgggtagtagacccagaagatactcgtataccgtcctttccttttggcttaggccttgttcaaattaaattcattgcactcgaagtttatatagatatacacttgtatagttgtatgcgcgtactgggaacacaacacgcccacgccggcaatatacttatgtttacacttgtaattgaaattgtattacaatcgcatataaaaacgacccagcgagtggtcctaaccacaggaacaccatcatcatcatcatcgtcgtcgtcatcatcatcgaaccacttacacccaccgaaccacccatttgctggcagaatgcccaacattttccgcccttatcgctgatgttgctgacaatgtgcaattgttgctgctgttgcagctgcaattgttgctgctggcaagtttttggcgttgcatggcaggttgccgttgcctgctttctggcgccgtgccgtggcatttaattaagcgtgtaagtgcactggcccaccctcaataacccaaagcccgaaagccttgtcctcatctccatcgttatccaccacccacatcagttatcccctccactcgactgaaataatggcgagcgcctgcccgaacaaattgtttgtcggcataaatcttttccggttgcaactccatcttggcacagcggctggttattcatatttatggtcacacatgtggtcaacaaaataatggtattataaattctccttcatggcatatttgttcatgataaaataaagtaatttgtgtgcccggaaatcagatcaacacctatttgtaatttgaggcatttacaccaatttagtggggctatttagaatggcagcggtcgaaatagccttcatggcattactaattgtgtttaaataaatacatttcctttaaataggatctacacttaatagtatataatggaaattcagactcttaagtgtagcgattgagaagcgcagaggagggccctactttattttcatgacttattattcaataatctttagaataacaaccaggtcaacacctactttcaacttccatttcttcatgtaacccaattaactgcggtgaatgagaagcgcagagaagggcttcatttaatattttgactttacgacatgcagttattgaatttctatattctattcttttaagtggcacaatacccccttaactggcgtataaatagttaacatcgtaggcgttggcattcgattaacgtggtctataatttcgtaatgatacacagcttatgtacccttattttaaccgcaaattggcatattgtccggtgtgacgtcagcagctgttgcaggccgcaaaaaaaaaaagagagtgcacggtggaaaagaccggttcaaacgaaatgtcaacaaacaatttaggcccaggtgagctagctggtcttctgttctaagccgactttctgccatttaaacaatctctctacccatgtatagtgcagtacatggaagcaaatttcttgtttatctactatatgcaaatgtcggtgggaaatttatgcatacgtttaccctccgtctctgtctccctcttccactctctgtttgtctccgtctctgttgcacttgatggcgtgtatataggtcagcggcacagcctgatgcggctgtgacgtcattgtcgcctcttttctagatgccgccgttgtcgatgagtcggtgctctgctgcagcgacctatttacaagatacatacatatgtatccacaagtcgctacgtgagtcgagttgattcgagtagagtcgagtcgattgaagtcgagtctcacccacttccgcatcgttctgcaggtggattgcataagtcgaaaagctgcaaatgcaactgttactactactgaaacggaaacgaaaacggcgctaggtgaagttcaatgcaaagtcgcaaaatcgaagtgcaatttcgtcctggggatcgtggccccccctttttcgcccactggtatgtacatatgtgtgagtatcctggtatctggcatgtgcaaagtgtgtggttctgtgtgttggtgccagtttctctttgtccggtcaaggcaacgtcagcctcagtccttagaccttccaagaccccgagaccccgagacccccagaaccgacaaccgacaaccaacagccgacagccgagacccaacctccagttctccatttttgtggactatttttagaagcgtcaacaacggcatgctgaaatttatgaattaatgcgatggcgaaaggaaatttaaggcatgcacacgcacatgcacatgcacacatacatacctacacacacacacacacacacacacacaccgaaggagccttgaactgggggagtgcacttgcacccagttacccagtcggtcctcattgaggatttgcttatgcatgccgcacattccagctgcgcatctgcaagttaatcaagcattgggaccgcatctgcggattactttcgccacttaagcagcgccgaggagagccgtgcctctaatagggaaattaaatgagctgaatatattacgtttggcaatcatctgctttgaaaataaggaaaatggcttatcacatactttccatcacttaagcaagaccattaagaattgccaagaagggtgaataactacagtaacataaatatatcaataaagaagttaaaataagtgaaatcaattataaaataatcaaataaaaacgtatttccatcatcaatttgtacccacttagctgtggtagttgagaatcgccgagaagggcgcttttcttaaagaagtgccaggcgacctatatccaattagaaag

SEQ ID NO: 17168 - DNA, 2237 bp, DROSOPHILA
atgcggaagtgggtgagactcgacttcaatcgactcgactctactcgaatcaactcgactcacgtagcgacttgtggatacatatgtatgtatcttgtaaataggtcgctgcagcagagcaccgactcatcgacaacggcggcatctagaaaagaggcgacaatgacgtcacagccgcatcaggctgtgccgctgacctatatacacgccatcaagtgcaacagagacggagacaaacagagagtggaagagggagacagagacggagggtctttgcccaaattgagcagtcaagacgaagaagggggggctggtcatggctttggtggcggaccgcaacactttgaacccattcctcacgatcatgatttctgcgaaagagtcgttataaatgtaagcggattaaggtttgagacacaactacgtacgttaaatcaattcccggacacgctgcttggggatccagctcggagattacggtactttgacccgcttagaaatgaatatttttttgaccgtagtcgaccgagcttcgatgcgattttatactattatcagagtggtggccgactacggagaccggtcaatgtccctttagacggtatttagtgaagaaataaaattttatgaattaggtgatcaagcaattaataaattcagagaggatgaaggctttattaaagaggaagaaagaccattaccggataatgagaaacagagaaaagtctggctgctcttcgagtatccagaaagttcgcaagccgccagagttgtagccataattagtgtatttgttatattgctatcaattgttatattttgtctagaaacattacccgaatttaagcattacaaggtgttcaatacaacaacaaatggcacaaaaatcgaggaagacgaggtgcctgacatcacagatcctttcttccttatagaaacgttatgtattatttggtttacatttgaactaactgtcaggttcctcgcatgtccgaacaaattaaatttctgcagggatgtcatgaatgttatcgacataatcgccatcattccgtactttataacactagcgactgtcgttgccgaagaggaggatacgttaaatcttccaaaagcgccagtcagtccacaggacaagtcatcgaatcaggctatgtccttggcaatattacgagtgatacgattagttcgagtatttcgaatatttaagttatctaggcattcgaagggtttacaaatattaggacgaactctgaaagcctcaatgcgggaattaggtttacttatatttttcttatttataggcgtcgtactcttctcatcggcggtttattttgcggaagctggaagcgaaaattccttcttcaagtccatacccgatgcattttggtgggcggtcgttaccatgaccaccgttggatatggtgacatgacacccgtcggcgtttggggcaagattgtgggatcactttgtgccattgctggcgtgctgaccatcgcactgccggtgccggtcatcgtcagcaatttcaactacttctatcaccgcgaaacggatcaggaggagatgcagagccagaactttaatcacgttactagttgtccatatttgccaggtacattaggtcaacacatgaagaaatcatcattgtctgagtcctcatcggatatgatggatttggacgatggtgtcgagtccacgccgggattgacagaaacacatcctggacgcagtgcggtggctccatttttgggagcccagcagcagcagcaacaaccggtagcatcctcactgtcgatgtcgatcgacaaacaactgcagcacccactgcagcagctgacgcagacgcaactgtaccaacagcagcaacagcagcagcagcagcagcaaaacggcttcaagcagcagcagcaacagacgcagcagcagctgcaacagcaacagtcccacacaataaacgcaagtgcagcagcggcgacgagcggcagcggcagtagcggtctcaccatgaggcacaataatgccctggccgttatgcaaaagacgttgcgtggtataaatttggccttgacaggagttacgttggatgccagaaacgactacaaaagctgtttatatttaatttaagtagaacaaataacaaaaacaaatttaatctattgctaaattaaattaaaatctaaattaaaatctaaattaatttaattaaattatacatttaatgataaacaacact

SEQ ID NO: 17169 - protein, 202 aa, DROSOPHILA
MRKWVRLDFNRLDSTRINSTHVATCGYICMYLVNRSLQQSTDSSTTAASRKEATMTSQPHQAVPLTYIHAIKCNRDGDKQRVEEGDRDGGSLPKLSSQDEEGGAGHGFGGGPQHFEPIPHDHDFCERVVINVSGLRFETQLRTLNQFPDTLLGDPARRLRYFDPLRNEYFFDRSRPSFDAILYYYQSGGRLRRPVNVPLDGI

SEQ ID NO: 17170 - DNA, 7382 bp, DROSOPHILA
ctcgattccccaattcgatagacgagcaatcggaggcgtcatggcaaccagttcctaggagccccgattccggattcagccccaacaacgcagcagtcggcggagcaaacaataaacaataatcagacatcaaacatcaaggcgtaaccacagtagcaggcacttggttttcagttacattttgacttcacctcgcaccgactctctatctatttctatacactagacatccgaattggcctccgaaaattattagctttctcgagctaacccagtgacaatcctccggagcagcggcaggaccttagatggtatcgccgcgcaagctggcatcgtcctacggcccaagagtatcccaatcggaaccgaacaatctgatggcgtgggtagagtacacatcttcggcagtagccaccatctaaagtcttcccctccccccaaatccccttttctagagcgtcggcaaagagctgtgagagcctattctcggccagctcccgggagtcggccagcctgatctaccagcgcagcaagccgccaccgccccaacaacgtggcggcgtgaagggttccggcagtatgagctcccagaaccacagcgagatccatcagcgcgtcatgtccgcgaggaatctgcgcgccaagaccttccagaaccaactggccgatgcccaggcggagattgccaatctggcgcacgagaatcgcatgctgcgcacgcttcacaatcgccagtcatcggcgctgaataagtacgaggcccacaacgctgagctgcccaagttgctaagctcacatgccgaggagctgcgcatgtggcagaccaagtaccgcaaactgcaggctgcgaacaaggctctggagctaaagctcaagcagaaggaggaaatcatcctgacgctgagcgatcagaacaagcactacagtcagctcaacaaggataagtatgtatgattacttttatgctagtcgcaattaaattttcatttcttttgattgtttttttttttgttcaggaatctcgacgagcggcaaaagcttcaggagaagttaaaatccctggagcagcgtctggaggagaaggacaacgacatgaaactgatggcccgcaaggtgcagctggagtcgaagaacatccgccagcaactgctcaacgagcaaaggaagggcaaggaggtgatgctgaagctggagaaggccaagctggagatcagtggataccgcaagctggaggagtacactgtgggtattacaagcaattcctcaaagtcatcttttaacttttgagccttcagctcggcactgacaaggtgaatcccctgtcctccggtcgacgaaccaaactgagtggcgtcaccgatgagccggacaagatcgacaagttggagaagtcaatggagatgctggacaaggccatcgagaagaacaaccagagcgaattcacggccttgacggatgtgatggagtcggaatcgttctacgatttcgaaaaggacagtgccgaagacaagagtggacccaacactccacctagtcaaatcgaacgacaggtgggcgggcgcggcggtaagcttatcctgccgcccgccacgaaccatgctaagatgggacagaaagccaatcggtccactttgagccaagtgctctcggcccagggaaagatttcggtatcttctggaaaatctgctaaatcacgcattgccgttgcagtgccgaagatggaaagtgtccaggttagcaagcgtcgcgaaccggagaccgtgtccagactggcttccgccgaaaccaagcccaagcagaagcctctggagtacgagtacgaggacgactatgagccggctggcgaagatggtgatgacgacgcctacggcatgatgagcaagatgtgcgagggagaggaaccacaggacaacagcgaagagaatgccaacgaaagcagtctattgaaatactccgcatacatggataacaagagtagcgagggcgatcccctagaggaatcaatggaggagtacgacggaactgatggtcaacaatcgcagggcagcgacgatgaggtgactgttgcctttgtaattccgatccactagtagtacttaaatgttttctcaatctcaatcccaggacattagtgtacgtgctccgcgtctgaaggagaacatgtccagcctgcgcaagcagatctcgaatgatttcaaggagcgcgagagcttcctgaagacgttctgtcgccaggccagtaatagcaatatgcgcgacgattccgcgtcgaagaagaggaacagcatcgcgaccggagcggcggccagtagccacatgaccggcagtcgcaagaatgcccttttggccgctctaaagacgatcgacgacaacaagagccaggactagagtgcactgcaatagtttccacccatgtccagttcaagttagtccttaagcggtgttgagttatatatatatttttcaagctgaggcccgtgtgcccggcgcagctggagcagttgcatcagtggcttggcgaagatggatcgaatcaagcccttgatgcagttgctccagcgccggtcgcacagtcgttgattaaattttaatataaacatttctgtgtttggtatataattggaaggattgcccttatcacaaatccacattgtatctgatagtcgatgcgctcaattattaaaaacattttattttgttatatctacattttatacagcaaaatgcctaagaattgtccattgattactctcgagaataaaatcaggcagtctgctttcctcgcagcttgctgatggcccgcgataccttcttgcgcagctccttttgacgccgctcctgggaagccatcttctcccgcttcttttcgcggtagtttttgatgcgcttcttcatttccatgcgttcacgttgccgcttgtccttaaagttggtctcaatcatcttcatcatcttggacaccttctgctcgtacggtgagttaaccacggccacgcgctccagcgccgccttgggattctccggtcccagcttgggcttgtccttgtacggcagcgcccgctgaagggccttgggtatggtaagtgggcggaaaattttctccttgcgcacgatcgttgtgtacatactgtcgggctgggctgcattttgcacagccctctcccgcttgagttgaccgagcgtcttcatgccctgccattggctcttctggtccagcggcagcaggagtgaggacacaggagcatagaaccgaggcacttccacacggaaccaggtgcggcagaagactatgtcgctcagaaggatcttgtcctcaaatgtggcacgataagaaccttcgggtgtgtggtgagccttcttgatctgtccacgaattccagacaccgttttgattttggctccttcgaactttgcaacttccagtgaggagttgaacatgtccttcacaaaggccgtcttcttgtagatcttaaacggatgtcccaccagcttgagcttcttcatgatctgcgaagatttgtccacctcggtgacacagcctgtggctgctatccggaagccaagccgacgcatctcctcctgatcctgacgcacagtctgcaaggctaggaaaccagtattttgaggcgttatcgggccccagaaggtcatgctgcaggtgacatgattgggcgtatacttaaggtagcgttgtcggaagttgtcttccaccttggcatagatggccactgtttgaaaacggcgccaacccattgagatgatcaaaggatcacctgttttcaggatcttcttgtaccagcgatgcttcttcaccttgcagttgacatagccaacgttctcctcggtcatatttaaggcaccaaccagtaccggatagctggcatcgaaattctcgatgaactcggcgggcagctgcttgaatccgaggcgaacgtaaagacccggtcgatagccctcgatctgaatgcggaactcattgtccaggtgggcaaactcgctcttgtttagctcgctctgccgctgagcctctgctttaaggtcctcgtagaaggagtgatcgccagttatccgaccattatcctcctcgccctttccctcgccgctgttgtcgtactccgcatcgaacttggcctttaacttcaatttttttgccatcagctcggccttggtgagattttcctcctctacgcgggtcagtttgcgcttgggtgctgaagaatcctcaggcttggaattctcttcttccgattctccaccatcttctgctttgggtttaccgctgtgctgctcgcccgtctctaaatcctcaaagtctccgtacacttcgctttctgcgtcactcatgtcgtccatctttagtagattttcagcatcctcgctggccttccatttgccggtaacgaagcagttcttgataagttccttgttgtcttccgccagccaatcccgagtggcatcttaaatttaaaacaagtgtaaatagattgacaattcttagaaaaatatatttaacttaccaccctgatactcgaagaaacaccgctcgtctttatccctaatgtcctggtctgattgcttcaggctttgttttttagcagccacccggaacagaccacctagttcttcttctgagtcgtcttctgcttctgcctcctgacgactatgttcactctgattatacacaccgtagacaaggcgcatcaggtttttcgactccgagtgacgttggagaaaagcatcgcgggccttctgggccagattagttttccagctcatgttgctggccaggacgcgagcctcctcatcgtccgaatcggattcgttggatgttttcacatttcccaggctttgatattcctcatcgccagaagaagcgtcttcctcagcatcctcctcctcctcactgttctccccacgccaatcgtccgcatcgaactcatcctgctgctcctcctcactgtcagcggcatccagaccagagtcctctccatcgtcatcctcattctcactactttccgcctcttcatcctcctcttcgtcgtcttgatcattgcggaagtccttggacttgatgggcttggcatctgagaatagacggaactcctgctgttccatctgttcatcaatggtggccttcttatcgatcagcttgttcaccagctccgcctgctcggcagcctcagcggtctgctcctgttccttgtgcgagtgcgatccctgtagctcaatgtagacagcatccttgtcgtaaacaatgccaccgactccggacatgggtgcatacagtaatcgctctttctccagcaaacttcgcttcttttccgtcccaggcagggggcaaggatcgggaatgacgtttaactcgtcgatgcgggcatcccccaggccagctatgtgcaccatgtgttcttgcttgagaggaactcctcggacatagccatagagtactacctcgcgatcgcacttaggatctcggcgcacgcgatctgtgtttgtcacatcctcgatgcggtctaccagcagataactatgtgcacctcgccactgcagcgggcgaaacttcatcacagagataaatcgtcccaggtttttgacttcgttccggaggtactcgccgtgaagaagtccagaaaggtagaatagcttggcgccatcgtagacttccgtccaaaagcggtgcttcagttccttctttcgtttcctcagctgcttggggttcttgatcatgtccaggtgggtaagtacgcccattatcttgggcatgccgtgcacctggcagatgttcaggaactcaaagatctccatttcgaagccgtagcttgcgtcgcagagcagcagcaccagatcggcgcatttggccacatcgatcatggagttcacatcgttgttgcactccagcagggtaatccggcgcttcttggaggtcacaatagtaatgggaccctttatatcggtgacattcgtccgcgtaaagcttttaattaggtccttgatcagcgttgtctttcccactttgggtggtcccaccacggcaatcagtacgggtggcggtacgttcggagtttgatcgacaaccggaatatgctgcttcttggccgtaaggtcctccttgcgccggaagttcctctctgctcgctgcgccgagttgatggcgaacgccttgggattcctctgcctggcggtcaactcgggctccttctggttggagtccttcttggccttcagctttttcttgtccgccttcacgccggactggcgggcgcggtgctgctttcgcttgtcctggccggcatcgtcggccattgttacagcctttaaatatattaaattattaaattatccgctgtttgcgcgctgcacgtggagccagtgttgccagattatgaaacagccccaaatcaattggtttcatccagccctgaatacatatcgtaaataaatagtacgatagactgactatattttgtttgttgcggcctacgaaatctattgagtaaagtaatggttttgaacgtattatttatttcagcatatgttatacgctactaggaatcataagcactttgtttgtaacacgtataagcgtaaccaaaatcgcaatcgtcaaactcatgaaaaatggtatacaaatcagaaacgtttaaaacacaaattaagaaataatttatttagtaatgaccgtttttaagtaaaatgtcaaataatacacatttcgacttccaccttacaacgacaagaaagaaacttacaaaattaacgtatctgtctattttctgatatattttgataaaattgtaatacaatttttgaatagcataattgtattgttttccacctctactggtatttcctcaagtgtcatcactacctcgcggcgtttcgctgtgagcgctttttcggtatttcgccacatatacggtcacacttctgcactgtggatttttcgcaatttgactttaattttattcgatcggatcgggcaaaatgtaccgcactcagatctgcaggccctaagcagacgcctaaggttcaactctactccgttcgcagctgcatcctttcacctgcgcaggtgaaacgcaagaacggcaaccagagccctggtgaaacagagtcggcgaaggagtgttcaagaggggggaggagcagtgcggcggaaggcaaaagtcttttaaggcgaaacagcgcacaaaagccaggtaaccaaagatagaatctggaaaatcggacattttcagccggttgaaagggggaggcgtaatcccacatgtgagttggaagtcactggcagtggtgggctgtgggtggtggtggtggcgatggcgatggcctgccagcctgtgcaaacccttccttcgccgaccttgcccttctatcgattt

SEQ ID NO: 17171 - DNA, 3664 bp, DROSOPHILA
aatctggcaacactggctccacgtgcagcgcgcaaacagcggataatttaataatttaatatatttaaaggctgtaacaatggccgacgatgccggccaggacaagcgaaagcagcaccgcgcccgccagtccggcgtgaaggcggacaagaaaaagctgaaggccaagaaggactccaaccagaaggagcccgagttgaccgccaggcagaggaatcccaaggcgttcgccatcaactcggcgcagcgagcagagaggaacttccggcgcaaggaggaccttacggccaagaagcagcatattccggttgtcgatcaaactccgaacgtaccgccacccgtactgattgccgtggtgggaccacccaaagtgggaaagacaacgctgatcaaggacctaattaaaagctttacgcggacgaatgtcaccgatataaagggtcccattactattgtgacctccaagaagcgccggattaccctgctggagtgcaacaacgatgtgaactccatgatcgatgtggccaaatgcgccgatctggtgctgctgctctgcgacgcaagctacggcttcgaaatggagatctttgagttcctgaacatctgccaggtgcacggcatgcccaagataatgggcgtacttacccacctggacatgatcaagaaccccaagcagctgaggaaacgaaagaaggaactgaagcaccgcttttggacggaagtctacgatggcgccaagctattctacctttctggacttcttcacggcgagtacctccggaacgaagtcaaaaacctgggacgatttatctctgtgatgaagtttcgcccgctgcagtggcgaggtgcacatagttatctgctggtagaccgcatcgaggatgtgacaaacacagatcgcgtgcgccgagatcctaagtgcgatcgcgaggtagtactctatggctatgtccgaggagttcctctcaagcaagaacacatggtgcacatagctggcctgggggatgcccgcatcgacgagttaaacgtcattcccgatccttgccccctgcctgggacggaaaagaagcgaagtttgctggagaaagagcgattactgtatgcacccatgtccggagtcggtggcattgtttacgacaaggatgctgtctacattgagctacagggatcgcactcgcacaaggaacaggagcagaccgctgaggctgccgagcaggcggagctggtgaacaagctgatcgataagaaggccaccattgatgaacagatggaacagcaggagttccgtctattctcagatgccaagcccatcaagtccaaggacttccgcaatgatcaagacgacgaagaggaggatgaagaggcggaaagtagtgagaatgaggatgacgatggagaggactctggtctggatgccgctgacagtgaggaggagcagcaggatgagttcgatgcggacgattggcgtggggagaacagtgaggaggaggaggatgctgaggaagacgcttcttctggcgatgaggaatatcaaagcctgggaaatgtgaaaacatccaacgaatccgattcggacgatgaggaggctcgcgtcctggccagcaacatgagctggaaaactaatctggcccagaaggcccgcgatgcttttctccaacgtcactcggagtcgaaaaacctgatgcgccttgtctacggtgtgtataatcagagtgaacatagtcgtcaggaggcagaagcagaagacgactcagaagaagaactaggtggtctgttccgggtggctgctaaaaaacaaagcctgaagcaatcagaccaggacattagggataaagacgagcggtgtttcttcgagtatcagggtgatgccactcgggattggctggcggaagacaacaaggaacttatcaagaactgcttcgttaccggcaaatggaaggccagcgaggatgctgaaaatctactaaagatggacgacatgagtgacgcagaaagcgaagtgtacggagactttgaggatttagagacgggcgagcagcacagcggtaaacccaaagcagaagatggtggagaatcggaagaagagaattccaagcctgaggattcttcagcacccaagcgcaaactgacccgcgtagaggaggaaaatctcaccaaggccgagctgatggcaaaaaaattgaagttaaaggccaagttcgatgcggagtacgacaacagcggcgagggaaagggcgaggaggataatggtcggataactggcgatcactccttctacgaggaccttaaagcagaggctcagcggcagagcgagctaaacaagagcgagtttgcccacctggacaatgagttccgcattcagatcgagggctatcgaccgggtctttacgttcgcctcggattcaagcagctgcccgccgagttcatcgagaatttcgatgccagctatccggtactggttggtgccttaaatatgaccgaggagaacgttggctatgtcaactgcaaggtgaagaagcatcgctggtacaagaagatcctgaaaacaggtgatcctttgatcatctcaatgggttggcgccgttttcaaacagtggccatctatgccaaggtggaagacaacttccgacaacgctaccttaagtatacgcccaatcatgtcacctgcagcatgaccttctggggcccgataacgcctcaaaatactggtttcctagccttgcagactgtgcgtcaggatcaggaggagatgcgtcggcttggcttccggatagcagccacaggctgtgtcaccgaggtggacaaatcttcgcagatcatgaagaagctcaagctggtgggacatccgtttaagatctacaagaagacggcctttgtgaaggacatgttcaactcctcactggaagttgcaaagttcgaaggagccaaaatcaaaacggtgtctggaattcgtggacagatcaagaaggctcaccacacacccgaaggttcttatcgtgccacatttgaggacaagatccttctgagcgacatagtcttctgccgcacctggttccgtgtggaagtgcctcggttctatgctcctgtgtcctcactcctgctgccgctggaccagaagagccaatggcagggcatgaagacgctcggtcaactcaagcgggagagggctgtgcaaaatgcagcccagcccgacagtatgtacacaacgatcgtgcgcaaggagaaaattttccgcccacttaccatacccaaggcccttcagcgggcgctgccgtacaaggacaagcccaagctgggaccggagaatcccaaggcggcgctggagcgcgtggccgtggttaactcaccgtacgagcagaaggtgtccaagatgatgaagatgattgagaccaactttaaggacaagcggcaacgtgaacgcatggaaatgaagaagcgcatcaaaaactaccgcgaaaagaagcgggagaagatggcttcccaggagcggcgtcaaaaggagctgcgcaagaaggtatcgcgggccatcagcaagctgcgaggaaagcagactgcctgattttattctcgagagtaatcaatggacaattcttaggcattttgctgtataaaatgtagatataacaaaataaaatgtttttaataattgagcgcaaaaaaaaaa

SEQ ID NO: 17172 - protein, 1159 aa, DROSOPHILA
MADDAGQDKRKQHRARQSGVKADKKKLKAKKDSNQKEPELTARQRNPKAFAINSAQRAERNFRRKEDLTAKKQHIPVVDQTPNVPPPVLIAVVGPPKVGKTTLIKDLIKSFTRTNVTDIKGPITIVTSKKRRITLLECNNDVNSMIDVAKCADLVLLLCDASYGFEMEIFEFLNICQVHGMPKIMGVLTHLDMIKNPKQLRKRKKELKHRFWTEVYDGAKLFYLSGLLHGEYLRNEVKNLGRFISVMKFRPLQWRGAHSYLLVDRIEDVTNTDRVRRDPKCDREVVLYGYVRGVPLKQEHMVHIAGLGDARIDELNVIPDPCPLPGTEKKRSLLEKERLLYAPMSGVGGIVYDKDAVYIELQGSHSHKEQEQTAEAAEQAELVNKLIDKKATIDEQMEQQEFRLFSDAKPIKSKDFRNDQDDEEEDEEAESSENEDDDGEDSGLDAADSEEEQQDEFDADDWRGENSEEEEDAEEDASSGDEEYQSLGNVKTSNESDSDDEEARVLASNMSWKTNLAQKARDAFLQRHSESKNLMRLVYGVYNQSEHSRQEAEAEDDSEEELGGLFRVAAKKQSLKQSDQDIRDKDERCFFEYQGDATRDWLAEDNKELIKNCFVTGKWKASEDAENLLKMDDMSDAESEVYGDFEDLETGEQHSGKPKAEDGGESEEENSKPEDSSAPKRKLTRVEEENLTKAELMAKKLKLKAKFDAEYDNSGEGKGEEDNGRITGDHSFYEDLKAEAQRQSELNKSEFAHLDNEFRIQIEGYRPGLYVRLGFKQLPAEFIENFDASYPVLVGALNMTEENVGYVNCKVKKHRWYKKILKTGDPLIISMGWRRFQTVAIYAKVEDNFRQRYLKYTPNHVTCSMTFWGPITPQNTGFLALQTVRQDQEEMRRLGFRIAATGCVTEVDKSSQIMKKLKLVGHPFKIYKKTAFVKDMFNSSLEVAKFEGAKIKTVSGIRGQIKKAHHTPEGSYRATFEDKILLSDIVFCRTWFRVEVPRFYAPVSSLLLPLDQKSQWQGMKTLGQLKRERAVQNAAQPDSMYTTIVRKEKIFRPLTIPKALQRALPYKDKPKLGPENPKAALERVAVVNSPYEQKVSKMMKMIETNFKDKRQRERMEMKKRIKNYREKKREKMASQERRQKELRKKVSRAISKLRGKQTA

SEQ ID NO: 17173 - DNA, 4453 bp, DROSOPHILA
gccaggtacgatgatttaagtaattgcataacatacgaatcccaaataatttccgaacgcagcccactgctgaagccaaaatccctttgcacttcgtaggtggtgcgagaatttttagtattttccgttttctccatatcctaattactgcagaatctggcacttttgatctgcagcccaagttaaatatacttactttaatttagagactgtattttaatgggaaatcaatgtcgaaatgctaatttcgtttccatgacaattcaacaaagctggcgccaaattatcgagagctaatcgattaagcttcacgatataagtttatcaatcgataccgcgtaattttaaatgatacattttgacaatattattttaaatctcaaatctattaatgccatagaaattcggttcaaaactttttcaatcaatagtaattctttcaagtagtaatagttctaaattaaaacttatttcgcgatccacagttttccttggtctttgatccacttggtacctaataattattttacttaacttttaattgccatgttttactgaacaagtttaatatttttggactatcagtaaattactcttttaatgacctttactgacctcagtaatttaatattttaacctcaaaaaatctactagtgtccccgaaaagtccaatacccaagcaatagttgaattttaatatgggatttttatttaaatatacacttaagagttagttatacaaaaacattgctaaggccacggttaagtctaattaggtgttgggcaggcaaaaaggccattggcaagcgattttcgtggtgaaaaatcatcaacaagattagttaacaacgagttaaaaggtaaataaagtgaaattaaatacatgtattgcattgaagttgtgagtctatcagttggttatcagttaaaacagtggtttatcttaacaaaattcgaacaattgaaactgcctgccattaaaatcgagcaataaatggtactaggaccagccgccggtaagtttgtggaaaagctcctcgttcagggtctggttggtgtccttggatcgcatggacatgaaaatgtaaccaccgatgaactcgtgcaccactttacagtcggctgagtggcaggagaagaccacattctcgtcttcaaactgaatcatcatgcactttatgttccagttgacgttccacgccttcatggtgttatatcgccaggtcttgatgtgatctcccgaactcagatccatgcgcataatgcggttgtgggccacgccgagcagctcctccttccgatgcccgtcgaacttaatgatgaacaggcttactccaaagtcaggtaacgaacgccatgcctggatgtacttcagttttgaatctaaagcattcagctcccgaacgttggcatgtgcttcgaggatccgctggactgccttgttcgacaacttgcggatgatcttgggcgacagataatcaactgcttccacagagcgaggatcgatgtttacatgaactccgtgtgcgggtcgctgcatctgcagtagcgagagtatgctgtccacttcactctcgtacgagctatccgccagggatcttcccttggccgccaaacgacaagcagccatccacttggcgtactgctgctcgttctcgcagcgcacccacacctcactgttgataccgtggccaccatcaggagagacctccagccggatagcatactttccctgggacaggtttacatccggagttacttcgcagcccttcaggttaatgcttatggcaggcgcaacacgtcgcgaatcttcggcgttcttgaacagatgcaaatgcagatcccgataggtgaagtagtagcgcttatagccgcgcagcgtgaatctttgcggcttcaagtaacgcaaatagtcagagagctctggtatgcgtgtaatattccgcgagtctccgccgtagtccggtccctccagcgtaatctgtagctctttcagtgccgaatcaatctcgtcttcgttgtcattctcctgactggaagtttcaatgcccgagtccactgctgcaccctggggtgtatgatctacgtgatggttcacctggaactggagggcggcaaacataaggctctcctcctctgtgcaatccaactcctcgttcagaacactccacttggcctgctcgtacagctgattgatgcgcacctggtcgcacttgggatttagatcgaaaaaagtgaaatacttgaagcgcaggcacagcgtgtcgtactcgcgtatgccctgttccatgatggacagcgaggaatctagccagcccacattcagacgagccttctccaccagcgacttggggcgcagctgaagagctcgcacatccgcgcatggggtgggcggagagctggccaaattctcctggaaatcgccaagacttgaggagctcgaatcgtacgtggcatagccaagctggctctgtttccaggtgcctggaaaaggtgatacggtgcgcactggcgagcgcgctcggtgattgtgcggcgacagaggagcacagaagaaggatcccggtgcagagggcttgtccagactgcccgtgcttccgccttctccatgaaacgacgtgctgatgggcacaaatgagttggtgtccgcagcaggctgcaggtaagtggtgccatctggttcagcgattggcactcgcttctgatgcggcacctgggcgaagttacgcttcaggtgctccgcttccagtggtttgcacagggacaactcctccggatagcggatatccaactgcttgcatagattaaccaccgccgagaacgtctttacggagtaatccacccgggagtccaggtacctcaaatccggcagctgcacccgcagtatcttgtgcatgggcgtgaagtgcagaaggctatccgcctggacaccgcactgatccagggtaagtttggttcggctgagccaaacattccgcgctggccaccacagagcatgatccgaccagtccttgggattctccggatccaccagttgcagcataatgcccccaatgtgctggtcaccgcgcacgcgcatcgtcttctccagcgccagatccgtgatgaagatccgcagattccacgagttctcgccgacgtggatcatggtgctgctgtgatgtcacctgtcctactttctgctgcccgtctggggcgtttctaggtcgtccttggtggggcgcccacagcaaagtcgagagttttccaccgatcggcgcacagatggtcgtcaaattcgcattttccgcactgtgacgcaatccacgggttgaaaattcactgcaattgcgttgactatgccgcaatatttccggatccggacaattgcatcgattcgttttgcttgcgtaaatagagcaattaaagaaaattcagtccattgaaaaagaaagcgccgaaccgactggtttacccactcgctctggtatcgatatatctctgacttggttttccaaatcgctatcgattatttcgttgatcggtgtaccagatggaaaaagatatattttcgattactgttttagattacacctattagaatttaacttatgggcgcgaagaagttttgaaattcaatttaatgggatgccttttaagtttgaactataattttaaattcttaaccgaaggacctttaataattttgcatttttgtaggtcccaaaaaaattcaaaagcttagaattttagattaagcatgcagattttagtaagcaaaattgtttcagaacgctgacattcatagtatcacacaaagccctataattattgattgctaacttattagatattttatttttatatcacaaaaaacaaactgcttagcccagaatgattttttttttaatttctttagaaaataagccactaccgcatttgcctgttgatgggctcaaggtaatcaaattaaattgacttaatttgagcccgattggtaagtggtcaaattggacggagacacgcagtgtatttccaaacggaggcctgtacatataaaagcccggattgctaatacggttagcagcatacgatcgattcgaaaatgggacagcccggtttccgtcgtgccattgggcacgtttcgttggtggtggcactgatgtgcaccacctgtttccaagtggaaggactaccccatccgccggccacgtcgccgtcaccaatgatggaaagaatggtggagcaggcctacgacgataagttcgacaacgtcgatctggacgagatccttaaccaagagcgactgttgatcaactacataaagtgcctggagggcacaggtccttgcactcccgatgccaagatgttgaagggtaagcttgaagcccaattcaataattctcggtaatacccaatctcttgtagagatcctgcccgacgccatccaaaccgattgcaccaagtgcacgga

SEQ ID NO: 17174 - DNA, 2453 bp, DROSOPHILA
taaaccagtcggttcggcgctttctttttcaatggactgaattttctttaattgctctatttacgcaagcaaaacgaatcgatgcaattgtccggatccggaaatattgcggcatagtcaacgcaattgcagtgaattttcaacccgtggattgcgtcacagtgcggaaaatgcgaatttgacgaccatctgtgcgccgatcggtggaaaactctcgactttgctgtgggcgccccaccaaggacgacctagaaacgccccagacgggcagcagaaagtaggacaggtgacatcacagcagcaccatgatccacgtcggcgagaactcgtggaatctgcggatcttcatcacggatctggcgctggagaagacgatgcgcgtgcgcggtgaccagcacattgggggcattatgctgcaactggtggatccggagaatcccaaggactggtcggatcatgctctgtggtggccagcgcggaatgtttggctcagccgaaccaaacttaccctggatcagtgcggtgtccaggcggatagccttctgcacttcacgcccatgcacaagatactgcgggtgcagctgccggatttgaggtacctggactcccgggtggattactccgtaaagacgttctcggcggtggttaatctatgcaagcagttggatatccgctatccggaggagttgtccctgtgcaaaccactggaagcggagcacctgaagcgtaacttcgcccaggtgccgcatcagaagcgagtgccaatcgctgaaccagatggcaccacttacctgcagcctgctgcggacaccaactcatttgtgcccatcagcacgtcgtttcatggagaaggcggaagcacgggcagtctggacaagccctctgcaccgggatccttcttctgtgctcctctgtcgccgcacaatcaccgagcgcgctcgccagtgcgcaccgtatcaccttttccaggcacctggaaacagagccagcttggctatgccacgtacgattcgagctcctcaagtcttggcgatttccaggagaatttggccagctctccgcccaccccatgcgcggatgtgcgagctcttcagctgcgccccaagtcgctggtggagaaggctcgtctgaatgtgggctggctagattcctcgctgtccatcatggaacagggcatacgcgagtacgacacgctgtgcctgcgcttcaagtatttcacttttttcgatctaaatcccaagtgcgaccaggtgcgcatcaatcagctgtacgagcaggccaagtggagtgttctgaacgaggagttggattgcacagaggaggagagccttatgtttgccgccctccagttccaggtgaaccatcacgtagatcatacaccccagggtgcagcagtggactcgggcattgaaacttccagtcaggagaatgacaacgaagacgagattgattcggcactgaaagagctacagattacgctggagggaccggactacggcggagactcgcggaatattacacgcataccagagctctctgactatttgcgttacttgaagccgcaaagattcacgctgcgcggctataagcgctactacttcacctatcgggatctgcatttgcatctgttcaagaacgccgaagattcgcgacgtgttgcgcctgccataagcattaacctgaagggctgcgaagtaactccggatgtaaacctgtcccagggaaagtatgctatccggctggaggtctctcctgatggtggccacggtatcaacagtgaggtgtgggtgcgctgcgagaacgagcagcagtacgccaagtggatggctgcttgtcgtttggcggccaagggaagatccctggcggatagctcgtacgagagtgaagtggacagcatactctcgctactgcagatgcagcgacccgcacacggagttcatgtaaacatcgatcctcgctctgtggaagcagttgattatctgtcgcccaagatcatccgcaagttgtcgaacaaggcagtccagcggatcctcgaagcacatgccaacgttcgggagctgaatgctttagattcaaaactgaagtacatccaggcatggcgttcgttacctgactttggagtaagcctgttcatcattaagttcgacgggcatcggaaggaggagctgctcggcgtggcccacaaccgcattatgcgcatggatctgagttcgggagatcacatcaagacctggcgatataacaccatgaaggcgtggaacgtcaactggaacataaagtgcatgatgattcagtttgaagacgagaatgtggtcttctcctgccactcagccgactgtaaagtggtgcacgagttcatcggtggttacattttcatgtccatgcgatccaaggacaccaaccagaccctgaacgaggagcttttccacaaacttaccggcggctggtcctag

SEQ ID NO: 17175 - protein, 715 aa, DROSOPHILA
MIHVGENSWNLRIFITDLALEKTMRVRGDQHIGGIMLQLVDPENPKDWSDHALWWPARNVWLSRTKLTLDQCGVQADSLLHFTPMHKILRVQLPDLRYLDSRVDYSVKTFSAVVNLCKQLDIRYPEELSLCKPLEAEHLKRNFAQVPHQKRVPIAEPDGTTYLQPAADTNSFVPISTSFHGEGGSTGSLDKPSAPGSFFCAPLSPHNHRARSPVRTVSPFPGTWKQSQLGYATYDSSSSSLGDFQENLASSPPTPCADVRALQLRPKSLVEKARLNVGWLDSSLSIMEQGIREYDTLCLRFKYFTFFDLNPKCDQVRINQLYEQAKWSVLNEELDCTEEESLMFAALQFQVNHHVDHTPQGAAVDSGIETSSQENDNEDEIDSALKELQITLEGPDYGGDSRNITRIPELSDYLRYLKPQRFTLRGYKRYYFTYRDLHLHLFKNAEDSRRVAPAISINLKGCEVTPDVNLSQGKYAIRLEVSPDGGHGINSEVWVRCENEQQYAKWMAACRLAAKGRSLADSSYESEVDSILSLLQMQRPAHGVHVNIDPRSVEAVDYLSPKIIRKLSNKAVQRILEAHANVRELNALDSKLKYIQAWRSLPDFGVSLFIIKFDGHRKEELLGVAHNRIMRMDLSSGDHIKTWRYNTMKAWNVNWNIKCMMIQFEDENVVFSCHSADCKVVHEFIGGYIFMSMRSKDTNQTLNEELFHKLTGGWS

SEQ ID NO: 17176 - DNA, 4040 bp, DROSOPHILA
ctttaccatttttaaattttgtttccaactataatacttacgttttaaaatctcaattaaacaatatccactgaacatcgataaggaaaagattaaaatattggattagcgagctaataaggtcagagtgtcagtcaacccgacaattgcattcggaactgcatatcgaaaacacgtttttttttaagtgtgtagattgcaattaatacggcatttgcataaagcagttccgatgcaaaagttaaccgacttcaaggcgcaggttcaagatcaatttgctcactggcaacgttttcccccttttcagccggcaaaacgcacaacaagcatcactacatcagccgaagcagctatccaatgggtggctacctgaaggtgacccgggagcacttcaatcgcctcagcgaactggacatctttccgcgctacaagcccatcaagccgcaccacgaaaagaagcatcgcttcaagagggatcactcgagcaggtcctacaacaacattccctactgctgtctaaaccagtgcgaggaggagttcttctgctaagagagctccagtgtcatgctccatgccccacgctccaagtcggtgccatctggtcagaatcttctgaatccgtccatagttatagttaggctattcatgtacattctacaagtcgcgctcactcttatagagtaccttatttgtgcccactcccagggacacagatccatttacagtatttatacacttagatcgattttgaataaacaatcgaatacggcaactgatcggaattaaagtgttttttataaaaattggtggacagttaaaactaaacaaacattcagagaatttaacagcatattaggtttagaagacgcatataaaggcttaaaagattattacaatcctagtacaaatgagtcacgatggctaacaaatctttgttgtatcacaatctattaatcactaaatcacttaataaaccgacagctcgaaccatggaatcagcttatatggaactaatatagtaggcgcctttgcaaacgttgcatttgtacttgcggcagttttgttcgccaactggctccagtgatcgaaagtacttggataccaccatcaaaatatcctcacgttgtctctgaaggaaatcttcgccgaagtcatcaaaggttttaacgcaatgcattagaatgcgatagaggaccgcttcagttgatacgaacgtattcagcgagcgatcaatgtaatccacgttctcctctacgaatgtgcgggtcatctgcattagaagctgtacagcctgatcgctgaagtatctggccatggcctccaaaacgtccgtaaagctagccagattgccgatatgctcaacgaattttccgccgaacttctgtgcgagcatgtccatattgatcaccatctgcccgccaatgccgtaactcagtatttggggcaataaagtggtggccactgtaagtccctgacttaggtgtgagttcatattgtgaagactgaggagtacctccttaaaagggatttcgttgagggttctcacaatatcaaattgaccagattcattgtgcagcttaactgtttcctgggagattcgatcaaagatttttctgttgatacaaaaatgatgaagaatactatatatgtgactgccaggaggtattgacttgcctggattgatttcgaagtgctcgcctcaaggaagacccgttggtagccttggaagcgatgcgcatattgttgatggaatgagtgaatatcacaaggtgcgaggccatcttcagcatgtccaagctgtttatggcttggtcatctccatgtttctgaggaggtcgaaacgaagttataaaattaatgtcttttttaaaggatccaacttaccgaatataaatcgtaaacaccattcgctacacccgttccggcgatgaccattgaggcaccatttatccccctaacggctaactgcgcagcgggattaactttgtagccagctcctgcagcggtggacagagcttttgtggccccactggctcctagacccacaacgccacctgctacgcccaaccaagagctgcgtgcctcggtatccgtgatgcaggtggactgtccgtgccgtcgacgatcgataagatgggaggcagagcgcagggtgctgtagactccggtggccacgcccacagcggtggcggcaatcgcgagcggagcgcccagaggcacagccaaagctgcagccgccggaacactggccaccaagctaccaacagtggcgactttatcgccagcattcagaattttatacctggcacgtgctgctggcgttggatggaccatcaactggacgcccggctcctcgtcgccggtgaatgtgtaaattccttggctaggggcgatcatcaagcccttgggcaaggtgttccggaagacgaactgctcccaattggcgtagacccgtgcattttcgtccacaaaaatcatgcaacaagcggcgctgttctcgcccttcaaacagcgccgtgtgcgaaaaaccgggtgacaggagtagttggtagactgcagcgccgattccgggtctgtatccggcgtgactagcacgtaaattatggcggagagcaatgtgccgttggtgtaacagcgctgctgccaaatattccggaaaagctgctcccgctttcgttgaatcgccttgccattgcgggcgtcatcatcgcgaatgaggttctctatcttttgctttagaacatcaccctgatccggggctagtctgtgggtataaatatagtttagccaggtacgatgatttaagtaattgcataacatacgaatcccaaataatttccgaacgcagcccactgctgaagccaaaatccctttgcacttcgtaggtggtgcgagaatttttagtattttccgttttctccatatcctaattactgcagaatctggcacttttgatctgcagcccaagttaaatatacttactttaatttagagactgtattttaatgggaaatcaatgtcgaaatgctaatttcgtttccatgacaattcaacaaagctggcgccaaattatcgagagctaatcgattaagcttcacgatataagtttatcaatcgataccgcgtaattttaaatgatacattttgacaatattattttaaatctcaaatctattaatgccatagaaattcggttcaaaactttttcaatcaatagtaattctttcaagtagtaatagttctaaattaaaacttatttcgcgatccacagttttccttggtctttgatccacttggtacctaataattattttacttaacttttaattgccatgttttactgaacaagtttaatatttttggactatcagtaaattactcttttaatgacctttactgacctcagtaatttaatattttaacctcaaaaaatctactagtgtccccgaaaagtccaatacccaagcaatagttgaattttaatatgggatttttatttaaatatacacttaagagttagttatacaaaaacattgctaaggccacggttaagtctaattaggtgttgggcaggcaaaaaggccattggcaagcgattttcgtggtgaaaaatcatcaacaagattagttaacaacgagttaaaaggtaaataaagtgaaattaaatacatgtattgcattgaagttgtgagtctatcagttggttatcagttaaaacagtggtttatcttaacaaaattcgaacaattgaaactgcctgccattaaaatcgagcaataaatggtactaggaccagccgccggtaagtttgtggaaaagctcctcgttcagggtctggttggtgtccttggatcgcatggacatgaaaatgtaaccaccgatgaactcgtgcaccactttacagtcggctgagtggcaggagaagaccacattctcgtcttcaaactgaatcatcatgcactttatgttccagttgacgttccacgccttcatggtgttatatcgccaggtcttgatgtgatctcccgaactcagatcca

SEQ ID NO: 17177 - DNA, 1827 bp, DROSOPHILA
gaaacgaaattagcatttcgacattgatttcccattaaaatacagtctctaaattaaagtaagtatatttaacttgggctgcagatcaaaagtgccagattctgcagtaattaggatatggagaaaacggaaaatactaaaaattctcgcaccacctacgaagtgcaaagggattttggcttcagcagtgggctgcgttcggaaattatttgggattcactagccccggatcagggtgatgttctaaagcaaaagatagagaacctcattcgcgatgatgacgcccgcaatggcaaggcgattcaacgaaagcgggagcagcttttccggaatatttggcagcagcgctgttacaccaacggcacattgctctccgccataatttacgtgctagtcacgccggatacagacccggaatcggcgctgcagtctaccaactactcctgtcacccggtttttcgcacacggcgctgtttgaagggcgagaacagcgccgcttgttgcatgatttttgtggacgaaaatgcacgggtctacgccaattgggagcagttcgtcttccggaacaccttgcccaagggcttgatgatcgcccctagccaaggaatttacacattcaccggcgacgaggagccgggcgtccagttgatggtccatccaacgccagcagcacgtgccaggtataaaattctgaatgctggcgataaagtcgccactgttggtagcttggtggccagtgttccggcggctgcagctttggctgtgcctctgggcgctccgctcgcgattgccgccaccgctgtgggcgtggccaccggagtctacagcaccctgcgctctgcctcccatcttatcgatcgtcgacggcacggacagtccacctgcatcacggataccgaggcacgcagctcttggttgggcgtagcaggtggcgttgtgggtctaggagccagtggggccacaaaagctctgtccaccgctgcaggagctggctacaaagttaatcccgctgcgcagttagccgttagggggataaatggtgcctcaatggtcatcgccggaacgggtgtagcgaatggtgtttacgatttatattcgaaacatggagatgaccaagccataaacagcttggacatgctgaagatggcctcgcaccttgtgatattcactcattccatcaacaatatgcgcatcgcttccaaggctaccaacggaaaaatctttgatcgaatctcccaggaaacagttaagctgcacaatgaatctggtcaatttgatattgtgagaaccctcaacgaaatcccttttaaggaggtactcctcagtcttcacaatatgaactcacacctaagtcagggacttacagtggccaccactttattgccccaaatactgagttacggcattggcgggcagatggtgatcaatatggacatgctcgcacagaagttcggcggaaaattcgttgagcatatcggcaatctggctagctttacggacgttttggaggccatggccagatacttcagcgatcaggctgtacagcttctaatgcagatgacccgcacattcgtagaggagaacgtggattacattgatcgctcgctgaatacgttcgtatcaactgaagcggtcctctatcgcattctaatgcattgcgttaaaacctttgatgacttcggcgaagatttccttcagagacaacgtgaggatattttgatggtggtatccaagtactttcgatcactggagccagttggcgaacaaaactgccgcaagtacaaatgcaacgtttgcaaaggcgcctactatattagttccatataa

SEQ ID NO: 17178 - protein, 569 aa, DROSOPHILA
MEKTENTKNSRTTYEVQRDFGFSSGLRSEIIWDSLAPDQGDVLKQKIENLIRDDDARNGKAIQRKREQLFRNIWQQRCYTNGTLLSAIIYVLVTPDTDPESALQSTNYSCHPVFRTRRCLKGENSAACCMIFVDENARVYANWEQFVFRNTLPKGLMIAPSQGIYTFTGDEEPGVQLMVHPTPAARARYKILNAGDKVATVGSLVASVPAAAALAVPLGAPLAIAATAVGVATGVYSTLRSASHLIDRRRHGQSTCITDTEARSSWLGVAGGVVGLGASGATKALSTAAGAGYKVNPAAQLAVRGINGASMVIAGTGVANGVYDLYSKHGDDQAINSLDMLKMASHLVIFTHSINNMRIASKATNGKIFDRISQETVKLHNESGQFDIVRTLNEIPFKEVLLSLHNMNSHLSQGLTVATTLLPQILSYGIGGQMVINMDMLAQKFGGKFVEHIGNLASFTDVLEAMARYFSDQAVQLLMQMTRTFVEENVDYIDRSLNTFVSTEAVLYRILMHCVKTFDDFGEDFLQRQREDILMVVSKYFRSLEPVGEQNCRKYKCNVCKGAYYISSI

SEQ ID NO: 17179 - DNA, 2780 bp, DROSOPHILA
ggcgatgttgtccggaccgggtcagtttgccgagaacgaggccaacgaggtgcatttccgggagataccgtaagtagtttggctccaccaaaggcacagcccagtggctccgccggcagcagagcgcttacctgcacggcgaccagtcatcgcaagtctgtgtgacctaatgaccggcgacaaatttgcacagatgtacggtacataccctagacgtacgcagttacatgggtacatgcatgtacgtagagcaaagtccacggattacagatcgctcggtatgattcaaatctgaccgttttacacgtaatctcgggcacaactacgcgcattagattagcacacagttcggcatcgattgcgcctagaaatcagattgatggtgttatttctgtgtatattctgattgatctgtacctaaagtctataatagcagtcaaattatgcggcaaaaagccagtcaactcataacttcttaagctaaaccaacttataaatccaaatgcttaagaattcgtgcatttgtgttctgtttgtttaagtattattgtttgagtggtattcatatactatcaaaagtcgtttctttaactattaacgttattaattcttttcagatcccacgtcctacaaaaggtctgcatgtacttcacctataaagtgcgttacaccaacagttctaccgaaatacccgaattcccgatcgctccggagatcgcattagaacttttgatggcggctaatttcctagactgctaaagaaaataatattggttaatttgaatttacattatttacaagtgaacgaagaagggccagactgcgtaaagcttaatttgcccatgttaatttggtaataaaacgagaagattgtccctgcgagaaaataaatttctgttgatttcctaaacgatcagttttgtaatgcgcttttttttcgaaaaaacattgatttttattaaacatcaagacaaaaacaaaagtgcagagcgtcgcagttctatttggagtgcttggacctggatttggcggcatttttgttgttcagcatggcgaaacgcatttgctggatgagccattggacaccctcgcccagaccttcgccggatatagcgctgctggagcagatgtgccagggtttgtcctttatgttctccaatctgagagctgcatacagatgatatattataagcaacatgtagttattaacttttgagtaaccaaagcgaagcacctgctgctattttcacactggatagcgagtcctccatgtccattttgttgccgtagaagagaattggcacaattcggttgcacaagtccggatgctgtagcaccagatccaactcatccttgaccaccactaaaattgaaacattgagcgatagacgggcgttgttaatttgcatattcaataccaaatctcatgcgatcgctggaatcaataacgtagatgatgccgtggcagttcttaaactggtgctcccacagattcctgtatcgcgtcgcaccggacatgtcgattgccttaatggaaacacctgacatgcctactccaaggggatacatatagtcatagttgatgattccacggccacttactgtaaaactgttccaccatgaagccaactgtgggcaccacaatggatgtctgttcgctggactttttgaaatgattaattatcgaggactttccgctgttgttcagtcccagcaccagaatcgtcatcttatcctttttaatctttatcaaatcggccaaattgtgcaacattcccattttactggcggacgggcatcaattttattttgtttacggcgattttcctgacatgtttggccctgcaaaggactttcaattgccatggcaacccgcttggtgttggcatcgatttattgaaacttatggccaccttcaactttggctgccgcatccgatttgttcgcccccacgaattttcaagttcacctaaggcgtgactttgagtattgggttcgattacaacagtaggggaagaggtcacccatcatgcccaagatggaattgttttggccatatgtacacctacactgaactgaatgatttggctttaggatttcataaaataaatcatggaactcagtttagcaattaaatctacaacttgtagcaaaatcaagaatttgttccttttgttacaaaagttttttcattttggcattttgatatttacaattgatttctataatagtacaagaaattgctttaaaattgatcaattgaacagtaaactttaaaatcttgaatgcctctagctgatatccaaatgttttcgtccagacactacaatatgctgcagttgtatccattaacaagacgttggtctccatagaacctaaaaccggatatgaaatcctagcaatgatttcttgccaaataacttcaatcacgatccacttagttgaaactattgtcgataaataatgttgatcagaactacgggttttacgtgttgacacaagccaaggtttattgtagaattcttcttaaaaaacatggttactgatagagctcctctacttcttggtgttcaagatgataccatcgtatttctgctggaaccacttcatggcatcctccttggtgaggcggtgctggaagccgacagtgccggacttgcgcttcctgtggttcacattgtagcctgcaagataaaccagagtagcagataagtaatcaacgttttggcaatccatgagacgctgtcgaaattgtaccgtgtggccacgcatggaatgta

SEQ ID NO: 17180 - DNA, 609 bp, DROSOPHILA
atgggaatgttgcacaatttggccgatttgataaagattaaaaaggataagatgacgattctggtgctgggactgaacaacagcggaaagtcctcgataattaatcatttcaaaaagtccagcgaacagacatccattgtggtgcccacagttggcttcatggtggaacagttttacataggcatgtcaggtgtttccattaaggcaatcgacatgtccggtgcgacgcgatacaggaatctgtgggagcaccagtttaagaactgccacggcatcatctacgttattgattccagcgatcgcatgagatttgtggtggtcaaggatgagttggatctggtgctacagcatccggacttgtgcaaccgaattgtgccaattctcttctacggcaacaaaatggacatggaggactcgctatccagtgtgaaaatagcagcagctctcagattggagaacataaaggacaaaccctggcacatctgctccagcagcgctatatccggcgaaggtctgggcgagggtgtccaatggctcatccagcaaatgcgtttcgccatgctgaacaacaaaaatgccgccaaatccaggtccaagcactccaaatag

SEQ ID NO: 17181 - protein, 202 aa, DROSOPHILA
MGMLHNLADLIKIKKDKMTILVLGLNNSGKSSIINHFKKSSEQTSIVVPTVGFMVEQFYIGMSGVSIKAIDMSGATRYRNLWEHQFKNCHGIIYVIDSSDRMRFVVVKDELDLVLQHPDLCNRIVPILFYGNKMDMEDSLSSVKIAAALRLENIKDKPWHICSSSAISGEGLGEGVQWLIQQMRFAMLNNKNAAKSRSKHSK

SEQ ID NO: 17182 - DNA, 3960 bp, DROSOPHILA
ttcccaggtaaaggcttgaatataagtttcctgtcgagatgatagccattgattaatgggtaacttatagtcaggaagggtactatacgattctaggggtttttttttcttgtttactatggattttgctgcccaggcgaattgcataaatacaacagcagcagcaacaacaactacaactagtgtgcccaagctggcactccaagaagaagctgctggggatgagaaaatggatcgtgttagccacgttctccacggttctcatttgatgctaactgggccagcatagttgttgacaatttgaagaagtactcaccattgcactgcctgccactggttcgattttcgcacttgtctagagctgtggtttccgactattaacaacaagaaactgcggactgcaggtgttggaaaacgacgtttgtttgcctggagaaactaaaccaaacacgtatcgcacagttccgttaggtttaattcgcgaagaaatttttcttggtttggtaaacctgtgttgattgcttacacatattatacatatttagccatattttccaaagggatatttttatttagttttgttcactgatgagtgaccttcacttgacagttgaaatataccataaggttccgaaatataccgaagcgtaattaatgaataccgaaatcacgttggaaacttaaatttaaatattttaattaaaatactttacaaatgttagaacccataaaaaatatataattaaagaaattaattcgattagaaaatgttggaaagtattattgctattaggaatattttattacatatctattaaaaacttatatgaatgatatgaaacaattaaattttatcaaataatggaatgtcatatttatatatattttaaagcaaaatttttctcaaataaacggactgcttgaaacgcagtggaaacacatttaaaacttatcgattactatgcgacgcgactgtggatacgcagtcaacaaaatatcgctcagcccatctgattcactattgattttcttcaataacaaagcagaggaaagtagacaaaaaataacgcaatttgggaaatacaaaacttggaaattctgaaattcggaatgacgagatgcagtcttgtattgggtctcctgctggccctgggcaacctgattcacgccagtaatatcactgataaagtttttgcagacattaaagagggcattgtggcagctttcggagatttcaattccgacgaactcacggatgtttttgtaattcgcgatgggatgaagaggttgcagatactcttcggtatgttattggagccgggaaggtctatatccaaaggtttaattgtctgttttacatagggcactatacggagcctctgcttaaactgggacccgactgccagtacggagataagaccattgttagtgttatacctggagattttgatggcgacgccctgatggacgtgctggtaaacctgaaggggaaggacgaggagacctacgaggtgcacatcaactggggcaataccaccgaactgaagtgctccaataagtcactttttaccagtaaaggagaggtaatggccctggactttaaccgcgatatgattatcgatttatacggacttgattctgcggaaaggcgtacattctggatattcaacagcagtaggcttccgccggaggctgtacaccaagcagaacccacggagttcaaggaaaacttaagcatccccaatgcaaatgcctatctcgatctgaacggcgacttcttggccgatctgttcttgcagacgaagagctcctacgaaatatggcacggcatcaacgagcgagacaagcaggagaatttcagctaccaatatcaaattaagttccagccgatcggaggcaatgattattacatcggtcaggctgtgttcatggacttcgagctaaagggcgtgcagaacattgtggttccgttttgcatcctatccaattgccggaactcctcaatcatggtgcatgatggcacagattttcgtaatctccatgtaaacttccgcgatccacagggcgtcacttgggcctttgtgccgcccgtgtcagatgatgtttacttgcgaaccattacggcaaggagtggggacttcaacctggatgggtatcctgatctcctggttactttgcagccactaaatgtggataagccagtgatgcagacgttcctgctagagaatgttccttgcacaacgtgtaacaagccgctaaagcgcactttcgaggtacgctggaacgccctttcgccaatgggcaacaacacggtggcaggtgcattctacgacttctaccaagacggtgtgctcgatgtgattcttattcgaaaagatggaaagggcaaataccagccactcgctttccggaacacgcttgactatgacgcgaactttgtgaaggtgattgtgctaactggcttggataacaagcagaacccggagagacgcactcctttgggtaggaaaaagcgaacctatggcactaacttgccaggaccacggatcacctacagtaccactactcaggatggtgatcagcagtgcggcagtagcgttcaactaccgcaggcctcgtattttgctctgcaactaccgtatacgtgctttggcttgggccgaacgccaaatttcgtggatcaattgactgtaggactgggcagcaagttgcgcaactggacgcaacttataccgaactctcagataattgtggttccaaaacccctaaacgaaccgtcgcactggaaggctcagctttttgtcacgcctagcaaactgattctgatgagcgtcgtggcgctgggtggcacctgcctggttatcgtctttatcatccttgtgctatatatcaaggaaaagcgcgaggataaacaggaacgcttgcaggagtctcacagattccatttcgatgcaatgtaaggtggtcgccccattaaatgtaaattaactaattaacacttttgattcaacccataagatgagcttttaattttattattatataatgttgattaatattcctaaaagaaaggagcgctctattaactccattataagctttccaaccatattgatgtcctaaaatgccacaaacaaattgataaaaatgtaaagtagaacaatatttggcggaccatctcaaggcggcttttaaaatcatagctcatcatggaatcaatagagatgctcctttacataatttatatttgtaatatggtttaagaaatgtgataatataaaaaagataaaaaataataagattcaatacgttgctcagacaaagtacatggggtttttcttcatgaattcggggacaatcgttcgctttgcgtactccttcttcaaatccaggaacctgttggtgctgtgacattacagaaagaaataagttcaatgtacgggtaacgctcacaaagaatatcatacccagtcagataaacgcgtccacgagcagctaccaaatgggctaaataggccggagccggataagaaaccgagcgattgcaacgagggaacatgtggcacaggttgtaggtcaactgctgcaacaagtcgatgtcaagattgcctgtgttctcaatcacattgtatcgtgttggcttggccgtgccctggatggcctggtggctgaccatgaagaactgcatctcgttaggatgcacaatggtgcgatcgaccacggttccggggtccacgttgttgaacttgttcgatgtcgttacgtcgccgctgggaaagaagcgagtgtgatgacgcttcaccacaatcacgcagcaaatcttgggtttacagcccacctgtatataataatataataattaactcatagctagtaactggtaatttcatttcatgttaaataaatagtgaggaaattcaaaaacttaccttgtcacaggcttgtttaatacacctcagt

SEQ ID NO: 17183 - DNA, 1901 bp, DROSOPHILA
ctcagcccatctgattcactattgattttcttcaataacaaagcagaggaaagtagacaaaaaataacgcaatttgggaaatacaaaacttggaaattctgaaattcggaatgacgagatgcagtcttgtattgggtctcctgctggccctgggcaacctgattcacgccagtaatatcactgataaagtttttgcagacattaaagagggcattgtggcagctttcggagatttcaattccgacgaactcacggatgtttttgtaattcgcgatgggatgaagaggttgcagatactcttcgggcactatacggagcctctgcttaaactgggacccgactgccagtacggagataagaccattgttagtgttatacctggagattttgatggcgacgccctgatggacgtgctggtaaacctgaaggggaaggacgaggagacctacgaggtgcacatcaactggggcaataccaccgaactgaagtgctccaataagtcactttttaccagtaaaggagaggtaatggccctggactttaaccgcgatatgattatcgatttatacggacttgattctgcggaaaggcgtacattctggatattcaacagcagtaggcttccgccggaggctgtacaccaagcagaacccacggagttcaaggaaaacttaagcatccccaatgcaaatgcctatctcgatctgaacggcgacttcttggccgatctgttcttgcagacgaagagctcctacgaaatatggcacggcatcaacgagcgagacaagcaggagaatttcagctaccaatatcaaattaagttccagccgatcggaggcaatgattattacatcggtcaggctgtgttcatggacttcgagctaaagggcgtgcagaacattgtggttccgttttgcatcctatccaattgccggaactcctcaatcatggtgcatgatggcacagattttcgtaatctccatgtaaacttccgcgatccacagggcgtcacttgggcctttgtgccgcccgtgtcagatgatgtttacttgcgaaccattacggcaaggagtggggacttcaacctggatgggtatcctgatctcctggttactttgcagccactaaatgtggataagccagtgatgcagacgttcctgctagagaatgttccttgcacaacgtgtaacaagccgctaaagcgcactttcgaggtacgctggaacgccctttcgccaatgggcaacaacacggtggcaggtgcattctacgacttctaccaagacggtgtgctcgatgtgattcttattcgaaaagatggaaagggcaaataccagccactcgctttccggaacacgcttgactatgacgcgaactttgtgaaggtgattgtgctaactggcttggataacaagcagaacccggagagacgcactcctttgggtaggaaaaagcgaacctatggcactaacttgccaggaccacggatcacctacagtaccactactcaggatggtgatcagcagtgcggcagtagcgttcaactaccgcaggcctcgtattttgctctgcaactaccgtatacgtgctttggcttgggccgaacgccaaatttcgtggatcaattgactgtaggactgggcagcaagttgcgcaactggacgcaacttataccgaactctcagataattgtggttccaaaacccctaaacgaaccgtcgcactggaaggctcagctttttgtcacgcctagcaaactgattctgatgagcgtcgtggcgctgggtggcacctgcctggttatcgtctttatcatccttgtgctatatatcaaggaaaagcgcgaggataaacaggaacgcttgcaggagtctcacagattccatttcgatgcaatgtaa

SEQ ID NO: 17184 - protein, 596 aa, DROSOPHILA
MTRCSLVLGLLLALGNLIHASNITDKVFADIKEGIVAAFGDFNSDELTDVFVIRDGMKRLQILFGHYTEPLLKLGPDCQYGDKTIVSVIPGDFDGDALMDVLVNLKGKDEETYEVHINWGNTTELKCSNKSLFTSKGEVMALDFNRDMIIDLYGLDSAERRTFWIFNSSRLPPEAVHQAEPTEFKENLSIPNANAYLDLNGDFLADLFLQTKSSYEIWHGINERDKQENFSYQYQIKFQPIGGNDYYIGQAVFMDFELKGVQNIVVPFCILSNCRNSSIMVHDGTDFRNLHVNFRDPQGVTWAFVPPVSDDVYLRTITARSGDFNLDGYPDLLVTLQPLNVDKPVMQTFLLENVPCTTCNKPLKRTFEVRWNALSPMGNNTVAGAFYDFYQDGVLDVILIRKDGKGKYQPLAFRNTLDYDANFVKVIVLTGLDNKQNPERRTPLGRKKRTYGTNLPGPRITYSTTTQDGDQQCGSSVQLPQASYFALQLPYTCFGLGRTPNFVDQLTVGLGSKLRNWTQLIPNSQIIVVPKPLNEPSHWKAQLFVTPSKLILMSVVALGGTCLVIVFIILVLYIKEKREDKQERLQESHRFHFDAM

SEQ ID NO: 17185 - DNA, 14708 bp, DROSOPHILA
acccaggccggaggctccacgcatcccgctgccagtgccaattgccacggttacgggaagccggacgcttatcccactttccggatacgattgcctagcagatctgccgtccgtacatattgaacagacctttgagcttaacgatggtaagtacaagcccaaaaattagctaaaatcgcttctaatagttcgtcttccctttgcagccctaacaggcgtctcctcggagaatcgatatgtggtgcgatctccactgggtgatgccattttcgcggccaacgagagttccacagaaaaaaatcgactactttggggagctggtcgaccctttcagatgcacctgctggataaaacgcaccaggaagctctggtttttcgcaaaaaactagcgatgggatccatgtgctgccaggcaaaaagtctagaaatttggataccacctggtaatttgctgggtaaagtggtgcagtcgcccaccttcatgcagccggagttctttatcgaagacgaaagcacaggacaactaacattctgtgtagagggtcctgtcggtttaggattctgctgcttcagtttgcccaaagattgttattttaaggttggtagtagctttaacattcggaacagaatattcaattatagtgtttttgttcccttacagatccattcgggaggcaatatgagggcttccatagaccacaaatggctcgccagcaagtctcagtacaccacaaatatatactttagtgacgccaagctaaccgccaaggagcgggctttgatactgggatcagcctttctactggtactgtgctcctagtttatatacatatatcatttgccacaataatgttttgtattcgtttttcaggaatatctattcttccaaacccgcttttgacgtgattaatcaataaaaaaaaacattgtatattcacattgatttctttattttttgtcatttttttgtataagattttatgtttgtttgtgttttgttttttttttttctcagttttttgatatattttacaataatgtaatagatcacttcattttcttgttgtttaaccacatacacacattcaaatatatagatatatatctatgtgtatatatagattttgctgcagcgcttgccatagcagtttgtacaatatttcatttatatctatcaactttgtgtagtttgtttatctaacctaccgcttaatgcatatatgacaacatattgattatttacagttagcgttttttttcatcatttcgtttctcttctgtcaaatacaaaattaaaagaaacaattaaatgagtctcgtggtctcgttgtttaaagaattaaaacaaaactaggggcgcaagtcatttctcattcaccgttaatagttgcgcttcaaaacttggtgtgataacaatttgaaataaggaagaactacgtgattttcaaagggcaaaacttggatttggacatagaaaaccaatatacttagtgtgcgggtgtgttctggttcggtttggaggttcattttcggggctaggccttaaaaataacacacttctctcgctctcggatctttacatttgtagatagactcacagcacttcaggagtttttgcatttatgcatttcgaaaacaaattatggttaagtgtatacaatatagatagatttataagtgtgctcgttggttggcttataactagggctagctgatgacgattccttaacctaaatacttaagaggcagatcgaaacgatctgtgtggggtgactgccttttaaaaccgtaaaaggctttgtatatgattattttagcgcaattcgcctagagtgtttacactggaatagctgactcgcttatctggctcccctatcgtttgattactactcgcgattagcccaatactagttgggcccatcatcgaagagaggtgggtcttataggctagctctagagtaagttgtgtgtgtgcccatatgcgatatgcttagacatttgatatgcgctcgttggaggtggtttggtcatggcggccctcgatcctggaattgtagatgccgtactgactgctgtccaggtggtagaccgcgggatactgataacctcagctgggctgcagcatgtacatgtactgtcagttgcttgccgctgctgaagcagccacgggaacggccacgggaacaggcagctcctggccagaacgagcccgcttctcgccactgctttccggtggattatcgctctcctcgcccgtactgctgaaactgcccggcaaacgacgcttcaggctatggtttaggccattggccaccgtttcatcctcggacatcgagctggctcgcttgggtgtgttgccagcactgtcgttgtccagcgaagctatagccgaggcaattgcggcactaaagccatcctcggacgcactatcctgcgagacgggacctgctgcatcctgggccagctgcatcatgccagaaggtgtggtatagctactgagcttaccaggatccttctcctgcagtttctgggccagcaacttgagtgatatcagcgaattttcacagtcgcttgtatcgatttcagtgagactaattccggcacgttcaatttcagcataggtcccgaagggcaacttctgcagacactctagcttctgaacatgcgtcttggagcgcaaatgcttggccaaatgcccatggatgcggaaggcgatcttgcagtcggtgcactcgaagggtcgcggatttgaggtggttggaacaccaaaagtcgacgtcatcataaccttgtttttgtgcgcttccgatcgctcgtgcttctgcagatgtccttgcgtgcggaaggatatgctgcatggctcgcacttaaactttcgctccatgtaatgaatattcatgtgcagggtcagctgatgttgccgctgaaacgtcttggagcacatggtgcaggtgggacgtgcatcacctgcaatgggagctggcggcactcctctgccatacgatacatgctggagatcgccgctcttgctagtgggagtagagcttttgaagccatcttcacccacaatcacagtacgctgcgcgggctgagttgagttggcagtggatgagggtgccacaggtgcagctgttgttgtgcttactgaagtagcagtaacagacgatgttggtggtgcagtcggatttccaagtactccagtaaattcattgacatccggttgctgcactgcagcaggcagattggcattgtgtggctctgcgatattaggctcctcgttttcttcctgggcaatctgagcaagaataaccggggcctgttcaggtgcactccgaggtgactcaatggcctctggggtctttacttcgtgcacttcgatgctaggtacctcatttacgctcataacgggcctgctgttggcggtaaagagagtgctactactgctcattacaggagacgccgctgtgtataatgtgttgatcagatagctgcggctaaactgactctgctttatcttggcttgatgcagcgcatgctccttaatgtaggtctgtagttgaacatcctcgccctcggcctcgtgcttggcctgctcttccatttcggcagatattcgcactttgtccgaaaccgagattagagtcttcatgaaaccgctttcgttgccggaggttccaaagataacatcgtgcatctgttgggcctgcgatttgggaagatcatgagcgggcaccgaaacaggcgagggggatattaataagatggagccgcgtggcttagtgagatccatgggagcactctcctcgttggccacactccgtttcggtttggactcctccggattggagtaatactgttcctgcttttggtagtcgaaaggcggcttcggcgatgtaaaggagcacactaatcttttaggttgcgaacccgaagagccaatgctgtttgcaggactggccgctggtaggggtgtatcctgcaactgcggatagggcgatacgctctgcggtatgggcggcgtcattgataacgagagtaggcctctggctgcttcgtgctctttctgtcgcgacttggactcatccgtatctgtgaagagattataatgaatcagctatttgaacatataagtgtatatgattgctttcttaccactactttcagattcattatcactgtagtcatcggaatccgattccccagccatcgatgatgtgcgtcctcctgccgaagtggatgactgctggtcaaagtccatatctacatccaagaactcgctgtctggcggcattggtcccggatttattcccagttcaatgcacttcttaaagtgagttttcgattgcatatgcttggtcagatttcccttggtcttaaaactgtggaatggaacaaagtttataataagttatctcttaagtacggaaaaaatgcaatgactcacctgaagttgcaatggctgcatgtgaatggcctcacgtccgtgtgagtgcgaatgtgcttcttgagcatcgacggcttcttgcaacgaattccgcactcggagcaaacatatcttccccttccgcggccacggatgtacgtgtaatcctcatgagactcgtagccacccaccaggggctgcccggatggacttgtctccaactttttggcctgtgcctcctcattcgccttggccgccacatttgcctcactgagagcggcaatcgtgacagtgggtggggtctttaggggtccttgatagaaagcactgctagtggaggacgtcgagggggaggatacgatttgctgggaagcgactaagttgtagctaagttttcccgatccagccatggcggttgagctgccatttcctaacatcctttgacgtgagtcgtagagtgccataacttgctttagtttgaatccaagtggatgtggctggttctcctcgcaaacctgccacacactatacatcgatagtttgtgcattcctgccacatacgaaggctgtggacagttcaccgtacagtaaaacatctttgtgctgcatttgaggcccagatatgtgtaggcgtgtccattgagatacagttgcacacaggatttggacggcctgggggtctccggcgagatcagcggcaatgtattggctgtcggtgtaatgccatgatggcgtttaggagtaaaagtaccgggtttaagtggcaaactagtaggccgcagaaacttggacttcgccgatgctgaggcactggctacgggactggtctcttctggagcgtttccgttgggagtatcaacatgtagcggtgttaggggcaactcttgctgtttcccagaaatcacattttccaaattaaagtgtcgaacttcaggttcagtggtcttcacattatcagccatgcgtagaaagttaaatggtgctttcttcggtgcctccttgctgttccactgcagcgcttgccgctgggcaggagttggtggctgtcgactgaactcgcttggcacattctgaactccaccgaatggcgatagggccttcagttcaccggatcctcctcccaacagcagcggactgggttgctttcgatttggactgcgacctcgactagagggaatgggtagctgcagctgttgtggcggaggcggcagtagcggcatttgtggtgtcagactaccgggtcctggcattccaggcacatgaggtattggtgttactggagtggttttatctccaccgctcatcggtggcagcgttagcggattgaaggcagttattgagttaatgggcggaaattgaaagtgctgcggacctgagctaacgccgagaagtccactgccactgaccagtgccatcagcttgcgctccttactggatgatcctgtttcgttgttgactttgaccgaaacatcctggaagcttccgccggacagcaacggtgttctaatcatcttggggctgttgtccaagtctgggcactccgaaatgggaatcatgctgcctcccgaagaggtgaatctgcgcagtcgctcctccttggaggactgcaattccggcacactattactgctattctgattattaaaggaaaagttgaaacttgtcggttgctgagaggaggatgctacaaccaaatcgctagtcttgatgcgtttggcaggctgagcttcaatcacaaattgccgatcctcgtgcattttggttatgaccacagaatcctgggccttgcgtggtgtactttgctgagcatagtccactaagggagtttttcccaacaatggaccaggcgatggtagaggcgcatccacaaagcgcagtgcttcaatctggggggcaggtgctgatgatggagcagtgaccgtagcaacagcaggagctggggcagaagcggttacagtgggagctgttacagttgatgtccttgctggcgtctgtgctgcacttaggcgacttaataccaaactgctccttttggtcttcaactgcgaccaggccaacttggccagagataagggattcttcgagttggccatgtggctcttcagctccggtagactcagcgagatcgagttggagcggaatggcgaagatgctggactcattggggcacttgagctcgcatcctgacagtaagtgctgttgtgcagcttcaaatcgtccgcactgcggaattcgcttgcacagataggacacgaataaacagcatcatcgccttcgccaatcggcacggccaatcctcgagcattaagcagtaggttcttaattatcgagttattaacctgagcaggtggtggagcagttttggagctactagtcggattggtagaagtcgttggagtcggtgccagagaactggtggacaaggaactgacgggcacagtgaccagagttggtttaggcttcgctgatagattcagaggcataacaggcactgccgtcgtcggttgctcaattttcgtcactggtgttgcaggatcctggcgatattgcattgtttgcatgggcaacggggacggcggtggaggaagttgctgctgttgcttcaccggcgtagtcatcactactccaggcttataggcattccttttaaccaccccatttggtggttcgagctgttgctgttggcattcctgttgctgttggatgtacgtatagtagttctgttgctcgagctgctgctgctgctgctgggttatctgctgctgttgctgttgctgaagctgatgttgctgtttctggaagatggcctgtgccaaattcactttagtctcgcgctccggcatctgtgcgttggtgttgttttgactattgtttgcatgcaatgccgacgcgttgctcccgtgctgcgaagcattattgctgttggcattgttgaaactgcgggaacgactaagctgtttggggtacttcttctgcaacaatatctccttgttttcaactatggcttcattttgagagatcaacttggaaatgtgttcctgcactttcgccacattctgaaaaggataacacaaattttagtttagtttttctgtaaaaataaacttttagtgcaacactcactacttgcttgccaccacttgagctggcaaaagtgctgagattggcggcgggcgtgggagtggctggtgctgttgctacactggaaatctggctattggcacgcaccaactgtaaacaataaaggtatatagattataattaatctcctcgttcaaaaacaatcgttcttaaccaacctgttgcggcgggagactcggaggttgttgcattggtggtgtcgccttgaccaacggtgggtgttgctgctgctgttgttgctgctgctgtgccaggtggatttggaattgctgaatggctaacgcatgctggtgaatggcagccgctgtatcttggttgtagtatgaaggttgccccaggtaatacaccccgccaggtggcatggcagctagcaatgattgctgggccaaaagggattgctgctgctgcaattgcaactggatctgatgcgagttaatgtggtgcttcatcttcatttgcgtgcttggcgaaagcgtgggatgcgccagtgacggctgctgaaccagaggaagctgaatggacagcttttgctgcgccaattggtgttgctgttgctgttgctgtatctgcagttgctgctgctgctgttgcagctccttactgctacatgagtacaacgaggcattgtggaacttgggcttatatggcttatagtcgatcgactggcgatgctgggcagtggccgagtggtgattgtccgctgtggtgggtggcaatgttcctgctgccggcgagcccagaggcaattgctgcatgtaagtgggcagcggaggctgttgaatgtatgcgctcttggccgcagacagtgtggaaggtgagggtgtgggcgaattgattggctcctcgtaaggcgaaccagcgcgactcggctgcaaaaacgtaaggagttacacatgtttgcgataacaatcacagttatatttgacttaccaactctgaactactgttgctcagctctgcatcctgatcggataaaccatcgtccgcatcggctggcacttccaggccccgcgctcttgccgcatgcgatctcgagcggcaatgtttgtacaaattactcttcgtcttaaacgcaatgccgcacgtgtcgcacggatacggccgttcgttcgtgtgggcccgtatgtgcttctccagcaccgagggcttggcacagatcaagttacagtactgacaaacgtatcgtccggacttctcgcatgcaggatttggcgctgctgctccgcctggaataccaggactcactgttgttggctgcgtcaattgctgatgctgggcaaatgaagccggtgacagtgtggcatttgctgcatggttactgttgctgttgctggtgctgttcgtgttactgttgctgttggctagaggcgttcgcgttcttcccgccgctttgtagccactattgctgatgatgctctcctcatgaccaatggcattgacatgattgctatttacaaaattggcactgaattcatgtattgctactgaaggcggcggcgtctgttgctgctgctgctgctgctgcacttgctggtggctttgttgttgggtcatcagatggtgaccgttggccagcggcgttgttggtggcggtgaaagcgaactgtttgaggagagcgatgtggtgcgaacggcatcgccacttgcttgcagtgctccgccgccattcgtcgcactccagctgtccacctcggtggtgctggccaaacgtttgaacttcttgtgcagatagcgtgaaatatttgaccgatcccccaacggagcctcatcggtggcgggtgtggcatttacggtggtctgctggctgttgatgatgctcgagttgctcatcgtgttggccacattgggagccactggctcctggttgctgctgactgctgccatctgttgtagcgtcattttgctatcacttagacttgctttatctctactcttaaattcataattattctcactaatactattatcactgtggtggttgttgttgttattattacttgtgttgttattgttattattattattgttgttgctgatgatgtggttgctgtcaacagtcggcagcggcacctcgcctagcttatctcgtgtgcttgtgctgggtttgctgctgctgttgctgttgccactagcagcatctgttgttgctgctgctgttgctgccgctttagaagctgttaatgttgcatctgttgctgttgctgttgcagatgctgatgctgatgctgttgcctctgttgctgctgccaatgcaattgctgcagcgatgttggccttgttggttgatctctgagtgactatggttgctgttgcagtttcccgatatgtccgcttcttggttggcgttgctgctgttgttactgttgtggttgctgctgctgctgctgctgctgccgctgctgctgtggcacgtcgcgtattgttcactttattggtcttgtactgtttgcctgcggttttgtaatgcttggccgttgtggtggttgcattttccatattattatcgaatttattatcctgtgacgtatttgcagtgggctcatctataccgaaacgagaagatagagggagagggagagagaaaaccgaaattaattcaatgtgtttcgcataatttaatttaaatagcaatgctaattgatacattcatgataagcccatttatatacactgatatccctgctaggtaatccagtagaaatcaaccacatctgactttgtggatttgcaaatcttcggacgattaaatatttaatattagtttctaatacacccttgtcccctataagtcctcacatgattagtgagaggtttggttttatcttttatatgttaattgcgctgttatgttactgttactgcattgtattgattcatcgcttctaaataaataaatatataaaaaaaaaaaacccttgtcccctggccaataaacatctgcggtttgcatttgggtttcccaagacgagttccctgcccatatagtacacttttatttcgagccccattatcagcactaattcgggctcaatcttatcaacgcgtagccgagaatgccagatacggagcacgctaattctctccatggcgatcaatccgtcaggtgaatcacaagctggcgaattcccgtgctctattgaaaatcaatttcccactctgtgaacgtgtcaacatcgataaagcacagtggcgaaaatatacgaacacacacaaatgtatattcgccttgtttctttttatcaactttctattttgaattcccaacttagctggggttcaggccccacctgccgaaaaccagacatgcgaccaaaagatacaaaaatccaagaaaagtgacaagtgaagtgtaatgactggtgtcgctggcatttcgtttgttgttgggggcttccttatcaccgctcgtgcacacatgtgtgacaacagtgcgtatcagtactgtaaagctgctggcaggtgtgtgattagcaatgggattataaagcgttgccaaatatgaagagtgagtatttgagaactccatttgctcgcattaattaaggcttcagtttgaaaaacaatttaggcagtctttggtaaattctttgttttgtgcatgccaaacgaaacgaaaagctgcaaaaatcttttaaaaatttttcacttttgctgctatttatgtgagccccactgtctgcatagatggtattatatgactcttggccggctgggctgtcgggcgattagtaagccggggcagttctcaaatcacaatcgcacacagactgaacacaaaaaacgctcactggcaaccgagctgggtcgcgttaattgactcgactgcggcgactgtttagcattcagcgttattattatacacattatacggcattatgcgatcgcagcgactctcgtcgcgtaccaatgtttactcaatttgttatcagcacggctggctaataaggctttcaaaccgtgcgaccgcaaaaaaaaaaataaataaataaaaaaaaaatgaaaaaaattgcccaaaagttccattgataatgccaagctctacatgcacaggcggtaaggtaagtattttcggtacgtgtgtttgccagattcattatcagttatcagtggggactatcgtgcgcgcctgagtcagaaacagagcacccgataagcgagccccgttgtaagccaccaagtgattgccaatttgccggagttcagacgcgttgacgtcagttatccgatacgtagtactattcgttcgcaatcgtaaggggctatatcagattgtcaactcattgggcaattaagtggcattcgctggcgattagctgttcgaggatacaaatcctaattacataatcatgtgtagtaaatatgtgtatgcactcgacttattaataaaacgagtgagtgggtcaattacaaggcgccaactgcgccacaattgaaatgcatacatatgtgtggcgattacacggaatgtgttgtttcttgctagtgaaaacaaaagcggagcagacagtgtgtgtgagcattttgactaaataagtagaataaagtttaataacacaacgcccagaatctgtctttcgaaataatatttacatttgtgttcattcgctgtgcgagaaactattgaagttcaactgtacataatgacaaagtgggctatacattcattatacagcagaaactggcgaaactaatgccatcatctacagtcacgacagtataataaagtcaagcgggaataaagaagataagctaatcagaagtaggcgcttataaaaacgccagcaattaaaaccagaatactcatatgcaagataccccgccacccaatgtgcaaacaattagcgcaaagtgcacagtgacgtttaaagatcccaagttcgtttatccaccatttagtttattgttagccacgtaaatccaattgtcagagtcatcaatatcaatacgacgttttcattatcacgaacttttgtttaacgatcgggggtcttctaattacgcctgtttgccagcattttgaggcgtgaaaacggcaagtgaacgcgaaacacatgggaacgtatttcaatatatgtgaacaaactggaactgcatttgcattggcattttcatttgcatgcacatttttattgagccaagcgaaatacaattgcccctgttcaaagtgcacataaataaagcgccacggcaaataatcgaatagggttcggtacactcttacaaatatctaaaaattggttgcaattagtagttcttctaaccagtaaataaacacacaatcttagattttaaacaccaacttccgcgccaaacttcatgaatatctaagatacataaataaatcacttcttattaaatcatatttacatttgttcagagagtttgtttttcgaagcatatggaaatgctggcattgtttctgtgtagaaaagcttgataagtttgcagctcatattgagcacacgctatctcgcctacgtcacaagtgcatttcgcgtttgactgagtgactgcctgaattcgaaattataataaaaccaaaaaaaaaacgagaatacatataaaaacacccacaccagcgcagcgaaataatgaaaaataaataacaaaatcaacgaggtgcggcggcaacggcgccacaaagtccacacatctgtctgacggtcagtctgtcagtccgtcactctgtcaatcggtcattcgctcaatccgcgcgatgacgactacgtcatcgcagagcaaaaagcactaagcactcgcccacttggcaattgtttataatttattagtaagaagcgttttacagcggttgagcagaacgaacgaaaaatgcatatgtaatagtataatacgtcaaaaaaaattcgcggaaaagattccgaaattccagcgaacggccaaaatgcgaaatgcccgacaaaaatgacgaaaacggcacaaacggtaaagagaaacatacccaagtttaattgtgaccacacgcatttttccgcctgtaccgctcatttgcatagttggtgttgttgttcgtttggtttgaagcgcaacaattggaagtgcacggcgagaaaaatctggcggcgcgaatagcaagaaatcgaaaaggcgacaatcgacaatcgacgacaaccgacgcgcctgaaacatttaaggcaactagacgaggcgaccagcgaaattcattcagagtgtgctcagcgtgtgtgcttgtgtgtgcatgtgtgtggtgtgtgcgaaaagaaaacgaagaagcgaccgaacgaagcaaaaacaacaagtaagaagcccaaagtcgcactagtcgactacaatgtacccttgagtggcagtaaaagttattcttactacaaattacgtataattagtaggaataggctaaacgttttggcattctgcgattttgagttgagcataacgaaaatatcagttcagaaaataagtatatattaggaaagttgaagtcttcatgcccgaaaaggttttatagggcagtctatatcccagaatattcggtagtagctccaatagatcataagcttattaatttttctcatattgaaaatacatctgtattcaaataaagataggtggaaagatttcttgctatagcgttttttggtaaatctattaattggtataatattaagaagttgttttgtaatatctttacttattttaaaaatgccatatacccatgttttcattcagttactgagtgttaaagaggcgcgacgtcagcgcaggcagcaaaaaaagtacaataatcaaataattgcggcagcttcgtcgtcgccccccgcacactcacacacaaacacacacatgtgctctcaatctcctctccactcattcgcaattgtcaatcaaatgtaagcacagggtcgccacttctttttgttcagcttttgattttgcggcagccactgagaaatgatcaaatcaagcaaaaattaagactcaaaaaaaagtataaaaattaaacaacaacaggtgacgcgaagtacgaagcgaaatgaaacgaaacgattcgaaatgaaagactgtcgccagccagtcagacgttgctgttgttgctgcagttgttgttatttccccctattgttgattacgtaccccatacacacacactcacacacaagtgcgc

SEQ ID NO: 17186 - DNA, 8968 bp, DROSOPHILA
tttcaggcgcgtcggttgtcgtcgattgtcgattgtcgccttttcgatttcttgctattcgcgccgccagatttttctcgccgtgcacttccaattgttgcgcttcaaaccaaacgaacaacaacaccaactatgcaaatgagcggtacaggcggaaaaatgcgtgtggtcacaattaaacttggatgagcccactgcaaatacgtcacaggataataaattcgataataatatggaaaatgcaaccaccacaacggccaagcattacaaaaccgcaggcaaacagtacaagaccaataaagtgaacaatacgcgacgtgccacagcagcagcggcagcagcagcagcagcagcagcaaccacaacagtaacaacagcagcaacgccaaccaagaagcggacatatcgggaaactgcaacagcaaccatagtcactcagagatcaaccaacaaggccaacatcgctgcagcaattgcattggcagcagcaacagaggcaacagcatcagcatcagcatctgcaacagcaacagcaacagatgcaacattaacagcttctaaagcggcagcaacagcagcagcaacaacagatgctgctagtggcaacagcaacagcagcagcaaacccagcacaagcacacgagataagctaggcgaggtgccgctgccgactgttgacagcaaccacatcatcagcaacaacaataataataataacaataacaacacaagtaataataacaacaacaaccaccacagtgataatagtattagtgagaataattatgaatttaagagtagagataaagcaagtctaagtgatagcaaaatgacgctacaacagatggcagcagtcagcagcaaccaggagccagtggctcccaatgtggccaacacgatgagcaactcgagcatcatcaacagccagcagaccaccgtaaatgccacacccgccaccgatgaggctccgttgggggatcggtcaaatatttcacgctatctgcacaagaagttcaaacgtttggccagcaccaccgaggtggacagctggagtgcgacgaatggcggcggagcactgcaagcaagtggcgatgccgttcgcaccacatcgctctcctcaaacagttcgctttcaccgccaccaacaacgccgctggccaacggtcaccatctgatgacccaacaacaaagccaccagcaagtgcagcagcagcagcagcagcaacagacgccgccgccttcagtagcaatacatgaattcagtgccaattttgtaaatagcaatcatgtcaatgccattggtcatgaggagagcatcatcagcaatagtggctacaaagcggcgggaagaacgcgaacgcctctagccaacagcaacagtaacacgaacagcaccagcaacagcaacagtaaccatgcagcaaatgccacactgtcaccggcttcatttgcccagcatcagcaattgacgcagccaacaacagtgagtcctggtattccaggcggagcagcagcgccaaatcctgcatgcgagaagtccggacgatacgtttgtcagtactgtaacttgatctgtgccaagccctcggtgctggagaagcacatacgggcccacacgaacgaacggccgtatccgtgcgacacgtgcggcattgcgtttaagacgaagagtaatttgtacaaacattgccgctcgagatcgcatgcggcaagagcgcggggcctggaagtgccagccgatgcggacgatggtttatccgatcaggatgcagagctgagcaacagtagttcagagttgccgagtcgcgctggttcgccttacgaggagccaatcaattcgcccacaccctcaccttccacactgtctgcggccaagagcgcatacattcaacagcctccgctgcccacttacatgcagcaattgcctctgggctcgccggcagcaggaacattgccacccaccacagcggacaatcaccactcggccactgcccagcatcgccagtcgatcgactataagccatataagcccaagttccacaatgcctcgttgtactcatgtagcagtaaggagctgcaacagcagcagcagcaactgcagatacagcaacagcaacagcaacaccaattggcgcagcaaaagctgtccattcagcttcctctggttcagcagccgtcactggcgcatcccacgctttcgccaagcacgcaaatgaagatgaagcaccacattaactcgcatcagatccagttgcaattgcagcagcagcaatcccttttggcccagcaatcattgctagctgccatgccacctggcggggtgtattacctggggcaaccttcatactacaaccaagatacagcggctgccattcaccagcatgcgttagccattcagcaattccaaatccacctggcacagcagcagcaacaacagcagcagcaacacccaccgttggtcaaggcgacaccaccaatgcaacaacctccgagtctcccgccgcaacagttggtgcgtgccaatagccagatttccagtgtagcaacagcaccagccactcccacgcccgccgccaatctcagcacttttgccagctcaagtggtggcaagcaagtaaatgtggcgaaagtgcaggaacacatttccaagttgatctctcaaaatgaagccatagttgaaaacaaggagatattgttgcagaagaagtaccccaaacagcttagtcgttcccgcagtttcaacaatgccaacagcaataatgcttcgcagcacgggagcaacgcgtcggcattgcatgcaaacaatagtcaaaacaacaccaacgcacagatgccggagcgcgagactaaagtgaatttggcacaggccatcttccagaaacagcaacatcagcttcagcaacagcaacagcagcagataacccagcagcagcagcagcagctcgagcaacagaactactatacgtacatccaacagcaacaggaatgccaacagcaacagctcgaaccaccaaatggggtggttaaaaggaatgcctataagcctggagtagtgatgactacgccggtgaagcaacagcagcaacttcctccaccgccgtccccgttgcccatgcaaacaatgcaatatcgccaggatcctgcaacaccagtgacgaaaattgagcaaccgacgacggcagtgcctgttatgcctctgaatctatcagcgaagcctaaaccaactctggtcactgtgcccgtcagttccttgtccaccagttctctggcaccgactccaacgacttctaccaatccgactagtagctccaaaactgctccaccacctgctcaggttaataactcgataattaagaacctactgcttaatgctcgaggattggccgtgccgattggcgaaggcgatgatgctgtttattcgtgtcctatctgtgcaagcgaattccgcagtgcggacgatttgaagctgcacaacagcacttactgtcaggatgcgagctcaagtgccccaatgagtccagcatcttcgccattccgctccaactcgatctcgctgagtctaccggagctgaagagccacatggccaactcgaagaatcccttatctctggccaagttggcctggtcgcagttgaagaccaaaaggagcagtttggtattaagtcgcctaagtgcagcacagacgccagcaaggacatcaactgtaacagctcccactgtaaccgcttctgccccagctcctgctgttgctacggtcactgctccatcatcagcacctgccccccagattgaagcactgcgctttgtggatgcgcctctaccatcgcctggtccattgttgggaaaaactcccttagtggactatgctcagcaaagtacaccacgcaaggcccaggattctgtggtcataaccaaaatgcacgaggatcggcaatttgtgattgaagctcagcctgccaaacgcatcaagactagcgatttggttgtagcatcctcctctcagcaaccgacaagtttcaacttttcctttaataatcagaatagcagtaatagtgtgccggaattgcagtcctccaaggaggagcgactgcgcagattcacctcttcgggaggcagcatgattcccatttcggagtgcccagacttggacaacagccccaagatgattagaacaccgttgctgtccggcggaagcttccaggatgtttcggtcaaagtcaacaacgaaacaggatcatccagtaaggagcgcaagctgatggcactggtcagtggcagtggacttctcggcgttagctcaggtccgcagcactttcaatttccgcccattaactcaataactgccttcaatccgctaacgctgccaccgatgagcggtggagataaaaccactccagtaacaccaatacctcatgtgcctggaatgccaggacccggtagtctgacaccacaaatgccgctactgccgcctccgccacaacagctgcagctacccattccctctagtcgaggtcgcagtccaaatcgaaagcaacccagtccgctgctgttgggaggaggatccggtgaactgaaggccctatcgccattcggtggagttcagaatgtgccaagcgagttcagtcgacagccaccaactcctgcccagcggcaagcgctgcagtggaacagcaaggaggcaccgaagaaagcaccatttaactttctacgcatggctgataatgtgaagaccactgaacctgaagttcgacactttaatttggaaaatgtgatttctgggaaacagcaagagttgcccctaacaccgctacatgttgatactcccaacggaaacgctccagaagagaccagtcccgtagccagtgcctcagcatcggcgaagtccaagtttctgcggcctactagtttgccacttaaacccggtacttttactcctaaacgccatcatggcattacaccgacagccaatacattgccgctgatctcgccggagacccccaggccgtccaaatcctgtgtgcaactgtatctcaatggacacgcctacacatatctgggcctcaaatgcagcacaaagatgttttactgtacggtgaactgtccacagccttcgtatgtggcaggaatgcacaaactatcgatgtatagtgtgtggcaggtttgcgaggagaaccagccacatccacttggattcaaactaaagcaagttatggcactctacgactcacgtcaaaggatgttaggaaatggcagctcaaccgccatggctggatcgggaaaacttagctacaacttagtcgcttcccagcaaatcgtatcctccccctcgacgtcctccactagcagtgctttctatcaaggacccctaaagaccccacccactgtcacgattgccgctctcagtgaggcaaatgtggcggccaaggcgaatgaggaggcacaggccaaaaagttggagacaagtccatccgggcagcccctggtgggtggctacgagtctcatgaggattacacgtacatccgtggccgcggaaggggaagatatgtttgctccgagtgcggaattcgttgcaagaagccgtcgatgctcaagaagcacattcgcactcacacggacgtgaggccattcacatgcagccattgcaacttcagttttaagaccaagggaaatctgaccaagcatatgcaatcgaaaactcactttaagaagtgcattgaactgggaataaatccgggaccaatgccgccagacagcgagttcttggatgtagatatggactttgaccagcagtcatccacttcggcaggaggacgcacatcatcgatggctggggaatcggattccgatgactacagtgataatgaatctgaaagtagtgatacggatgagtccaagtcgcgacagaaagagcacgaagcagccagaggcctactctcgttatcaatgacgccgcccataccgcagagcgtatcgccctatccgcagttgcaggatacacccctaccagcggccagtcctgcaaacagcattggctcttcgggttcgcaacctaaaagattagtgtgctcctttacatcgccgaagccgcctttcgactaccaaaagcaggaacagtattactccaatccggaggagtccaaaccgaaacggagtgtggccaacgaggagagtgctcccatggatctcactaagccacgcggctccatcttattaatatccccctcgcctgtttcggtgcccgctcatgatcttcccaaatcgcaggcccaacagatgcacgatgttatctttggaacctccggcaacgaaagcggtttcatgaagactctaatctcggtttcggacaaagtgcgaatatctgccgaaatggaagagcaggccaagcacgaggccgagggcgaggatgttcaactacagacctacattaaggagcatgcgctgcatcaagccaagataaagcagagtcagtttagccgcagctatctgatcaacacattatacacagcggcgtctcctgtaatgagcagtagtagcactctctttaccgccaacagcaggcccgttatgagcgtaaatgaggtacctagcatcgaagtgcacgaagtaaagaccccagaggccattgagtcacctcggagtgcacctgaacaggccccggttattcttgctcagattgcccaggaagaaaacgaggagcctaatatcgcagagccacacaatgccaatctgcctgctgcagtgcagcaaccggatgtcaatgaatttactggagtacttggaaatccgactgcaccaccaacatcgtctgttactgctacttcagtaagcacaacaacagctgcacctgtggcaccctcatccactgccaactcaactcagcccgcgcagcgtactgtgattgtgggtgaagatggcttcaaaagctctactcccactagcaagagcggcgatctccagcatgtatcgtatggcagaggagtgccgccagctcccattgcaggtgatgcacgtcccacctgcaccatgtgctccaagacgtttcagcggcaacatcagctgaccctgcacatgaatattcattacatggagcgaaagtttaagtgcgagccatgcagcatatccttccgcacgcaaggacatctgcagaagcacgagcgatcggaagcgcacaaaaacaaggttatgatgacgtcgacttttggtgttccaaccacctcaaatccgcgacccttcgagtgcaccgactgcaagatcgccttccgcatccatgggcatttggccaagcatttgcgctccaagacgcatgttcagaagctagagtgtctgcagaagttgcccttcgggacctatgctgaaattgaacgtgccggaattagtctcactgaaatcgatacaagcgactgtgaaaattcgctgatatcactcaagttgctggcccagaaactgcaggagaaggatcctggtaagctcagtagctataccacaccttctggcatgatgcagctggcccaggatgcagcaggtcccgtctcgcaggatagtgcgtccgaggatggctttagtgccgcaattgcctcggctatagcttcgctggacaacgacagtgctggcaacacacccaagcgagccagctcgatgtccgaggatgaaacggtggccaatggcctaaaccatagcctgaagcgtcgtttgccgggcagtttcagcagtacgggcgaggagagcgataatccaccggaaagcagtggcgagaagcgggctcgttctggccaggagctgcctgttcccgtggccgttcccgtggctgcttcagcagcggcaagcaactgacagtacatgtacatgctgcagcccagctgaggttatcagtatcccgcggtctaccacctggacagcagtcagtacggcatctacaattccaggatcgagggccgccatgaccaaaccacctccaacgagcgcatatcaaatgtctaagcatatcgcatatgggcacacacacaacttactctagagctagcctataagacccacctctcttcgatgatgggcccaactagtattgggctaatcgcgagtagtaatcaaacgataggggagccagataagcgagtcagctattccagtgtaaacactctaggcgaattgcgctaaaataatcatatacaaagccttttacggttttaaaaggcagtcaccccacacagatcgtttcgatctgcctcttaagtatttaggttaaggaatcgtcatcagctagccctagttataagccaaccaacgagcacacttataaatctatctatattgtatacacttaaccataatttgttttcgaaatgcataaatgcaaaaactcctgaagtgctgtgagtctatctacaaatgtaaagatccgagagcgagagaagtgtgttatttttaaggcctagccccgaaaatgaacctccaaaccgaaccagaacacacccgcacactaagtatattggttttctatgtccaaatccaagttttgccctttgaaaatcacgtagttcttccttatttcaaattgttatcacaccaagttttgaagcgcaactattaacggtgaatgagaaatgacttgcgcccctagttttgttttaattctttaaacaacgagaccacgagactcatttaattgtttcttttaattttgtatttgacagaagagaaacgaaatgatgaaaaaaaacgctaactgtaaataatcaatatgttgtcatatatgcattaagcggtaggttagataaacaaactacacaaagttgatagatataaatgaaatattgtacaaactgctatggcaagcgctgcagcaaaatctatatatacacatagatatatatctatatatttgaatgtgtgtatgtggttaaacaacaagaaaatgaagtgatctattacattattgtaaaatatatcaaaaaactgagaaaaaaaaaa

SEQ ID NO: 17187 - protein, 2532 aa, DROSOPHILA
MENATTTTAKHYKTAGKQYKTNKVNNTRRATAAAAAAAAAAATTTVTTAATPTKKRTYRETATATIVTQRSTNKANIAAAIALAAATEATASASASATATATDATLTASKAAATAAATTDAASGNSNSSSKPSTSTRDKLGEVPLPTVDSNHIISNNNNNNNNNNTSNNNNNNHHSDNSISENNYEFKSRDKASLSDSKMTLQQMAAVSSNQEPVAPNVANTMSNSSIINSQQTTVNATPATDEAPLGDRSNISRYLHKKFKRLASTTEVDSWSATNGGGALQASGDAVRTTSLSSNSSLSPPPTTPLANGHHLMTQQQSHQQVQQQQQQQQTPPPSVAIHEFSANFVNSNHVNAIGHEESIISNSGYKAAGRTRTPLANSNSNTNSTSNSNSNHAANATLSPASFAQHQQLTQPTTVSPGIPGGAAAPNPACEKSGRYVCQYCNLICAKPSVLEKHIRAHTNERPYPCDTCGIAFKTKSNLYKHCRSRSHAARARGLEVPADADDGLSDQDAELSNSSSELPSRAGSPYEEPINSPTPSPSTLSAAKSAYIQQPPLPTYMQQLPLGSPAAGTLPPTTADNHHSATAQHRQSIDYKPYKPKFHNASLYSCSSKELQQQQQQLQIQQQQQQHQLAQQKLSIQLPLVQQPSLAHPTLSPSTQMKMKHHINSHQIQLQLQQQQSLLAQQSLLAAMPPGGVYYLGQPSYYNQDTAAAIHQHALAIQQFQIHLAQQQQQQQQQHPPLVKATPPMQQPPSLPPQQLVRANSQISSVATAPATPTPAANLSTFASSSGGKQVNVAKVQEHISKLISQNEAIVENKEILLQKKYPKQLSRSRSFNNANSNNASQHGSNASALHANNSQNNTNAQMPERETKVNLAQAIFQKQQHQLQQQQQQQITQQQQQQLEQQNYYTYIQQQQECQQQQLEPPNGVVKRNAYKPGVVMTTPVKQQQQLPPPPSPLPMQTMQYRQDPATPVTKIEQPTTAVPVMPLNLSAKPKPTLVTVPVSSLSTSSLAPTPTTSTNPTSSSKTAPPPAQVNNSIIKNLLLNARGLAVPIGEGDDAVYSCPICASEFRSADDLKLHNSTYCQDASSSAPMSPASSPFRSNSISLSLPELKSHMANSKNPLSLAKLAWSQLKTKRSSLVLSRLSAAQTPARTSTVTAPTVTASAPAPAVATVTAPSSAPAPQIEALRFVDAPLPSPGPLLGKTPLVDYAQQSTPRKAQDSVVITKMHEDRQFVIEAQPAKRIKTSDLVVASSSQQPTSFNFSFNNQNSSNSVPELQSSKEERLRRFTSSGGSMIPISECPDLDNSPKMIRTPLLSGGSFQDVSVKVNNETGSSSKERKLMALVSGSGLLGVSSGPQHFQFPPINSITAFNPLTLPPMSGGDKTTPVTPIPHVPGMPGPGSLTPQMPLLPPPPQQLQLPIPSSRGRSPNRKQPSPLLLGGGSGELKALSPFGGVQNVPSEFSRQPPTPAQRQALQWNSKEAPKKAPFNFLRMADNVKTTEPEVRHFNLENVISGKQQELPLTPLHVDTPNGNAPEETSPVASASASAKSKFLRPTSLPLKPGTFTPKRHHGITPTANTLPLISPETPRPSKSCVQLYLNGHAYTYLGLKCSTKMFYCTVNCPQPSYVAGMHKLSMYSVWQVCEENQPHPLGFKLKQVMALYDSRQRMLGNGSSTAMAGSGKLSYNLVASQQIVSSPSTSSTSSAFYQGPLKTPPTVTIAALSEANVAAKANEEAQAKKLETSPSGQPLVGGYESHEDYTYIRGRGRGRYVCSECGIRCKKPSMLKKHIRTHTDVRPFTCSHCNFSFKTKGNLTKHMQSKTHFKKCIELGINPGPMPPDSEFLDVDMDFDQQSSTSAGGRTSSMAGESDSDDYSDNESESSDTDESKSRQKEHEAARGLLSLSMTPPIPQSVSPYPQLQDTPLPAASPANSIGSSGSQPKRLVCSFTSPKPPFDYQKQEQYYSNPEESKPKRSVANEESAPMDLTKPRGSILLISPSPVSVPAHDLPKSQAQQMHDVIFGTSGNESGFMKTLISVSDKVRISAEMEEQAKHEAEGEDVQLQTYIKEHALHQAKIKQSQFSRSYLINTLYTAASPVMSSSSTLFTANSRPVMSVNEVPSIEVHEVKTPEAIESPRSAPEQAPVILAQIAQEENEEPNIAEPHNANLPAAVQQPDVNEFTGVLGNPTAPPTSSVTATSVSTTTAAPVAPSSTANSTQPAQRTVIVGEDGFKSSTPTSKSGDLQHVSYGRGVPPAPIAGDARPTCTMCSKTFQRQHQLTLHMNIHYMERKFKCEPCSISFRTQGHLQKHERSEAHKNKVMMTSTFGVPTTSNPRPFECTDCKIAFRIHGHLAKHLRSKTHVQKLECLQKLPFGTYAEIERAGISLTEIDTSDCENSLISLKLLAQKLQEKDPGKLSSYTTPSGMMQLAQDAAGPVSQDSASEDGFSAAIASAIASLDNDSAGNTPKRASSMSEDETVANGLNHSLKRRLPGSFSSTGEESDNPPESSGEKRARSGQELPVPVAVPVAASAAASN

SEQ ID NO: 17188 - DNA, 2309 bp, DROSOPHILA
taatgcatacatttaaattgttttcttttggttgtttttttttttctgtttcatattacttttttataattctagaaagagagctatttaaagggcacattcggttaagctataattatatacttttctttctccctacactttttgttcataatttattcccttacgctgtttgatatatcgaaaaattagaaattatgagattaatacgaatttcatgtctcaattccttgtgtgaaaagtcgtttatgtttggggggggggggggggttttgaaatgtagggtaagaagtaacaataaaagaacgcaaacatttcacaaacaaaaacttcaaacaaaatcaatttatcaagctacaaaagaacattaaatggatattgaataacaaacaaattctcgatcagcttgctatatatatatgcatgtatatataggtgtttatgtatgtatatatgtgtattcgtttatagggggcatatcggctgtatttgcaactaacttagttaagtagttcgctcagctttcgatctatggtaaattgtatattttactacaagtttatcccgttttttggttttcactacaaatcttttgttgcctgtcgaaaaatttcactaaactggggttatacacgggtctgcggcagctgcttcctctccgtcatatatatatataaattaacttctttttgcatttttgttttgtttttagttttttttttttgatttttcaacatttttttttctgttatttttgtatgcctagaactaaaggttcttacttctcgcatgaatccgttgcatgcggagcttctttgcctcgattttctcaaactcaaatgtggccacctcaggccgctatgtgactgactgccggcagcacgtacgagtagatgtggtgcggctgcagctgctgctgctgttggtggtgcggctggtggagctgatgtgggtggtggtgcggcggcgtcgtagtcgtcgtcgtcgttgtcgcataaggtcaggttgctgtcggcgtcatcaagaactgctgctgatggtgatgatggtggtggtggtggtggctcaggtgctgctgctgtgcctgctgttgctgttgctgctgctgttgctgttgttgctgctggtggtgctgctgttgctgctgctggtggtgcgctgtctggtggctgtggtggtagtgctgcgctgctgtgtggtggtgctgctgctgctgctgttgctgctgcgtctggtgatgcacttgcgtctgctgttgctgcatttcgcgctctagctttttagcgagcaaatcatgccgtgattccatacccgctcctctggaaataatttgcaaagtgtgaggcacaattagtttttgtcagtgtaagtggtccaactactggtttcgttggtgctggctatttaagtggttgtttgggaactactcatgcgtggacctaaaatattttaaaatcactttttatggcttctaactttctatttattttgattttttagggtaaatattcaagactaaagaacataaaataactaaaaaattcaaaaaatatatcaatttaatttagatatagactttgatagaaagttaaaataaaatctagtcaaatactttgatctatatataatatcgtaaagttcattcaggcaagaaaatcttcactttaacgctctgttattaaaaattaaataaattgttggactttccattggctagtaataatatttatggcagctcgggcatgctcacccctcgatatgcaaattgattttcaaacaacctacaataaagtaaagtacagaccatgccttgaacaaaagtggtttaaagcccgaacgtttaatgtggttgggttaaattggtggggcagtagtcaagtgggttatgtgtatggcaatataggtgtggcatgctgcgtttaattttgcattttttataaagctgctgccactgctgccgtggctttttcttgcagcaaattgaaaaaacatatttatgtggccgtttggcatttgaagtacgtgagtcaaagcccacgttgtgcggacatagaatggttggcggggcagtctcccagcggaagctggcatttaggaaacggatgtctatgaggaagtcccagcagcaccttctctggacccgctccatttccccttcccccaacctcgttatgactgccaaactgttcgtttgctacaatttgtgtttaaatgcggctccaattgtaatggctaagtgagtgtgcgagtgcgattgcgctccggtgttcgggccaaactcatatggttttggccatcccttaggtagg

SEQ ID NO: 17189 - DNA, 309 bp, DROSOPHILA
atggaatcacggcatgatttgctcgctaaaaagctagagcgcgaaatgcagcaacagcagacgcaagtgcatcaccagacgcagcagcaacagcagcagcagcagcaccaccacacagcagcgcagcactaccaccacagccaccagacagcgcaccaccagcagcagcaacagcagcaccaccagcagcaacaacagcaacagcagcagcaacagcaacagcaggcacagcagcagcacctgagccaccaccaccaccaccatcatcaccatcagcagcagttcttgatgacgccgacagcaacctga

SEQ ID NO: 17190 - protein, 102 aa, DROSOPHILA
MESRHDLLAKKLEREMQQQQTQVHHQTQQQQQQQQHHHTAAQHYHHSHQTAHHQQQQQQHHQQQQQQQQQQQQQQAQQQHLSHHHHHHHHHQQQFLMTPTAT

SEQ ID NO: 17191 - DNA, 4193 bp, DROSOPHILA
ctgttcgccaaggacgtggctgcgttcttctatgacctcatgcagaagtgcatccaagttcggcgggaaagtccggcggcacagcagcgagatgacttcctcaactacatgttgcagttgcaggagaaaaagggactgaatgcggcggagctgacctcgcacacaatgacatttttaacggacggattcgagaccaccgcacaagtgcttacccacacactccttttcctggcacgcaatcccaaggagcagatgaagttgagggaggagatcggtaccgccgagctgacctttgaacagataagtgagctgcccttcaccgaagcctgcatccatggtgagttttttggcgaaatctgaagttatttagtatgcgtataatatctatatctgcagaaactttgagaattttctcacctgttctggctgcccgcaaggtggtaactgagccctgtgaactgacgaacaaaaacggagtgagcgtgaaactgagacccggggatgtagtcatcattcctgtgaacgccttgcaccacgatccccaatactatgaggaacctcaatcgttcaagcccgagcgattcctgaacatcaatggcggagccaaaaagtacagagatcagggtctattctttgggtttggcgatggaccacgtatttgccccggtgggtaacatcatttttgaaacaattaaagttactaaaaaaaatctatgcataatttgtaggtatgcggttttcacttacccaaatcaaagctgccctggtggaaatcgtgcgaaacttcgacatcaaggttaatcccaaaactcgcaaggataatgaaattgatgatacctactttatgccagccttaaaaggcggcgtttggctggattttgttgaacgcaattagttattcaataatgttacgactttatattaaatatagtttatccagttgcatacatgttatatttccaaacactcttaatactttaattttgtaacttaaaaccacacttttagtctcgacttagggctagttgcactaggggcagcaccttgatagaggacaagtctgccagaatcgcttcgatgctatccaacgaggccacctgcatgatgctctcctttcgaaagctaagaatgatgatggcgaatagaggaaggatctccaagctatcaaagccaaggatctgaaaaggaagggataagtactgccaataagaacggaggtgtatttcgtaccagatcccagaggaccagcaattgatcgggaggcaaatgtccggaaaacgctcgcataagccatttgaagaccacccgcaggctaaggaaagatatgtcgtgaaatgggtgaaatagctgtctaacgaaaaacccaatcccaactcacggctgtatctgaagctctcggaaatgggaccataactgcggttcgtatgtctgcagcagcttctcgaagagcaggcacagactgacaatcccttgaggatgcgtgtttatggtggtcaagcgatggcagtaccggatatagaaggcccggaatgtatagtatagactcaccggcgagtcatacagataacaaaagggggcggcaaacatgcagatgccgtggaagggcaccacacccgatggaggaccttcgtaggtcttgcccttcaccggaaacgtctcgtattccacacatccaccgatatcggtgtcccgagaaaagcagagcagcacctggtagagcacgtcctcgaacacaaagtactggtcgtcgttggaggccgtcaactgaatgtccttgaagaccagtttgtcaacgatgtgatccgtagtccaaacggcattgcgcagcttttgccagtactcaatatccttcgggggtatagagatgtataatgaggttattgatcccaaaatcagtagttacgtagtcatgtagcttgctgtccagcaccgaagcccagagagctcccctataaggtgcgggtgtgcagcccttcttcagaaactgctggcacatgggcgcatgcctggcctccagaatcctctggcactgaaccgtaagatccggcactcccaaatagctatcacttcgcagcagatccgcgtagtgggcacgcagctcgaaaagatttttcacaggtagtgcaatgtgggagaactcccattgggggatttgactaatgagcaaaatgattatttacctgactgatttaaaccaaaacttactctgtattttcagtggttttggcgggtccttttagcgagagtagcacctccagtaaatcctttggagcgtaaacaggcctatagttggccagatctagaagtttaaccatggttaattgttagcttcaatatttacgaaatgcctacccatattgtagttgctcagttcgttccacttggccataaagtcctcgcgatcagcactgatccttggttgtccatgcaatggaaccttcagctctgtacacatggcattcaaactcttcctaacccttcgatcccaaagcacaccagctctttttaaatatccaagtggatcactaacggtgggtttctattggaaaatatagacataagtaaagaactatttaattcattttccctagcactacatactactaatacccctaaggctaactctatagttgtggcacttcgagatcttccggtattatgtatcattataatttgttttataaacgttaaggtataaaataaaattttgccaataaagtcaaaaagtagaaaatgataggagcagcatggaatacttttaaataccactccaattattctaaattcaattacaagaaatttgataaattgtatcttaaaagttgtacccaccgctccctgtttgttggccaggtttttgtcatctgttttcgacagccgcgtgcggaccaggttgtagacaatattccggatctccgtctccagtccggcgctcttgatggcatcctcgagggtgttgcgcatatcgtgagtatctacgctgggattgcagaccagcttctgcagctccttgtagatgggctcgtagctcttagtgttcttgatggccgcgattacctttgcggtcatatggtggatgctggcatcctgcagctcctccatgccgatagctccttgacccgaccgttctttctacgtattactctgccactgactaccaactaactatttacaccgttttgataccgattagccccaaaactttgggcgctcctaactccgtcgtttgacttttatcgatcaaactccgtcgcctgctttgatttggagtcgattcgattccgagtcacatcctcggttgtcgtcgcttcttggcgacggaatgcaaacacttgtttggctgctagtttcgcgttagttgtgatttgattcgttcgttttgccgcccctcgcaaccaagaaattccattatgtttcgtttcgaatgaaaagccagaggcgcgtgaaattgctttccatatacatttattttcacgcacaccgaaacacgctgaaactgaaactgagtggcggcaacttttcctttttcttggcatctgtcacctggcccaacgagttgttgacgtggtcgtcgggttggctcctcctgttgattgcgaaggtgggccaaactcacctgaacatgtcagagtgtcgaaagtatttcacctgaatatttagaccaggccgaaatatgattttgaaatggcaaaaatttttacacgaaaatagagatatataatcctctatgtggtacattattcaatgtttatttatgaattaaaaatattcgttttaagatttggatagcatcccttactacgttccaatcaatttatctataatatcatcgttcacgaaagttcgaccttttagttggcggcttattgaggtaaagttctctcccttggcataaggaggaccattattggtatccagaaaatacctgcctctggctctgcaattaaatagataaaaagagatctggaaaaataggtgctggcacttacttcggatccacgtgaaaacccatcagctctatatttttatcaggaatgcaaattccctttgcgaagcttttaaaattgggacagtagaagccatagaatccagaaggtgacgaaatagactcggcataatagtctgctgctcggttatggtagcagaaatgagtctccactaaagtcagaacaacgaaaatgaaaaatataggt

SEQ ID NO: 17192 - DNA, 1625 bp, DROSOPHILA
ctaatcggtatcaaaacggtgtaaatagttagttggtagtcagtggcagagtaatacgtagaaagaacggtcgggtcaaggagctatcggcatggaggagctgcaggatgccagcatccaccatatgaccgcaaaggtaatcgcggccatcaagaacactaagagctacgagcccatctacaaggagctgcagaagctggtctgcaatcccagcgtagatactcacgatatgcgcaacaccctcgaggatgccatcaagagcgccggactggagacggagatccggaatattgtctacaacctggtccgcacgcggctgtcgaaaacagatgacaaaaacctggccaacaaacagggagcgaaacccaccgttagtgatccacttggatatttaaaaagagctggtgtgctttgggatcgaagggttaggaagagtttgaatgccatgtgtacagagctgaaggttccattgcatggacaaccaaggatcagtgctgatcgcgaggactttatggccaagtggaacgaactgagcaactacaatatggatctggccaactataggcctgtttacgctccaaaggatttactggaggtgctactctcgctaaaaggacccgccaaaaccactgaaaatacagatcaaatcccccaatgggagttctcccacattgcactacctgtgaaaaatcttttcgagctgcgtgcccactacgcggatctgctgcgaagtgatagctatttgggagtgccggatcttacggttcagtgccagaggattctggaggccaggcatgcgcccatgtgccagcagtttctgaagaagggctgcacacccgcaccttataggggagctctctgggcttcggtgctggacagcaagctacatgactacgatattgagtactggcaaaagctgcgcaatgccgtttggactacggatcacatcgttgacaaactggtcttcaaggacattcagttgacggcctccaacgacgaccagtactttgtgttcgaggacgtgctctaccaggtgctgctctgcttttctcgggacaccgatatcggtggatgtgtggaatacgagacgtttccggtgaagggcaagacctacgaaggtcctccatcgggtgtggtgcccttccacggcatctgcatgtttgccgcccccttttgttatctgtatgactcgccggtgagtctatactatacattccgggccttctatatccggtactgccatcgcttgaccaccataaacacgcatcctcaagggattgtcagtctgtgcctgctcttcgagaagctgctgcagacatacgaaccgcagttatggtcccatttccgagagcttcagatacagcccctgcgggtggtcttcaaatggcttatgcgagcgttttccggacatttgcctcccgatcaattgctggtcctctgggatctgatccttggctttgatagcttggagatccttcctctattcgccatcatcattcttagctttcgaaaggagagcatcatgcaggtggcctcgttggatagcatcgaagcgattctggcagacttgtcctctatcaaggtgctgcccctagtgcaactagccctaagtcgagactaaaagt

SEQ ID NO: 17193 - protein, 509 aa, DROSOPHILA
MEELQDASIHHMTAKVIAAIKNTKSYEPIYKELQKLVCNPSVDTHDMRNTLEDAIKSAGLETEIRNIVYNLVRTRLSKTDDKNLANKQGAKPTVSDPLGYLKRAGVLWDRRVRKSLNAMCTELKVPLHGQPRISADREDFMAKWNELSNYNMDLANYRPVYAPKDLLEVLLSLKGPAKTTENTDQIPQWEFSHIALPVKNLFELRAHYADLLRSDSYLGVPDLTVQCQRILEARHAPMCQQFLKKGCTPAPYRGALWASVLDSKLHDYDIEYWQKLRNAVWTTDHIVDKLVFKDIQLTASNDDQYFVFEDVLYQVLLCFSRDTDIGGCVEYETFPVKGKTYEGPPSGVVPFHGICMFAAPFCYLYDSPVSLYYTFRAFYIRYCHRLTTINTHPQGIVSLCLLFEKLLQTYEPQLWSHFRELQIQPLRVVFKWLMRAFSGHLPPDQLLVLWDLILGFDSLEILPLFAIIILSFRKESIMQVASLDSIEAILADLSSIKVLPLVQLALSRD

SEQ ID NO: 17194 - DNA, 3877 bp, DROSOPHILA
cgaaaaacatcacatggaaacgtgccgctctgcccgtgtgcttatgctgtgacccagtggcgtagtccggattccccgtaggggttatgtttcaagcctttcgaagatacccctttggttgcgccactgtgcgcagactgtaagctcgccaaaaagctccgggcaaaagcatgcaacacagctgagtgagtgggcaaatcgagtgggctgtcgagtggttttggggcgcagagagaacatgagaaggggcctgataccctctccttgtgcacagagaaaaatttggtattaaataccattttccaaatcattgatctatcagaagataacatcttgactaatcctactatccttaaaaacattaaaaaatttgaaagcttgtatttccaatttttgtttaatttaggctttcaaaatagcgaacaaatttttgtatatgtatacaatttctctctgtgcactcatacagtatttctaggtgacccgtaagaagtacctcatttggctttaaattaggaatttaatttataagtatatatatttactcaattgcatacaagtttttgctagatttggttagtgaaatttcctaagactcttcgttaaataactcgtttgatattggtaggtccattttgtttgtatgtatatatatgcagatatatccttcgatgtatatacagcttacagttgcagtatcctttggccaaattgggaatgacagaactctggagcacttggtttatatgtaagtagttagttatcttttattacccgcctacattgactttacatgatcatttgtccgtagctttggaattacattatatatatatagagagaggcggctggtaataaatcaggttaaaatgtttccgtgtatatacagcaagggagtttacatggaattgtaattaagagcccgaattcaaaagcaagctaagtcataaataaatctaatttacactaaatataaacgatttgggaacaacgaaagcaattacaaaataataaacaaaattatcacaaacaataacagtccggataggatgagaatggcggcccactgtcgtttatctgtgaaagaagatggatacagttaagaattaggaatcagaagtcacaaaagtattcaatgggtaattttgattgtggttcactgaagcatttactcttcattaatatttcaatcaaaatagtccttgaataccacaagtgccgcaccactcaccattattcatgtgcaagactttggcaactttcttcatggtcgtatccaacttggactccgtggtatcgaactcgttcccaaagtcgtctagcatgacggcctgctcatcgagctcaacgccaatttgccgcgagaccgtcttgagggtaccaatcgaatcgctgatcatgtctagctgctcatcctgtccctggatcatacgctgctgtatggacactgtttcgcccacgtacctatgactcggactgtccatgccgccgtgatgcgtctgcccatagtgactgggactgtccagggcgttctccagcttggagtacttggtgccgctgtggcgggatgctgctgccgctgccgccgacatggtcccagctatggtattggccacctgactgccgctattgatcagcgagttgccgttgggacactccacgaggtacgtgcgatcgttgtgtggatgctgatggtactcgttggagttggaattcgaattgggtatggcaatggaatgattgtgattggggctgtggcgatcgttgtcgagcagcggctggtgtgcggtgatgtctctgtcccggctccggttcaggctcatcttatccttcatctgcttgacctcatcgcgagtgttgtcgatgaagtggcgccggctggagagttcgcggttgtcgatccgaaacttgcttggattcttctcaacgatgcgtgtgagtcaaaatggtatgggttaaggagaaaaccgaggagactgatgagctagaaagtcggttctaccgaccttaagataccaagtactctttttttacaattatagtgccaaaaaaacaagttctgtacagtttattagtataatactaataaacgagcgaattaaatcacgaataaattgcatattcagcaattttaaatgggatctcaacctctttatgcgaaaataaaacagacaatgcaattcgataaatgagtaccaggtaacgaattgatttttcaatggtctttgcaaaaggatattgatagtgtcctcgaggtcctcgagatcccactcgatgctccgtagcgagttacgcagctcggtggtggtccattcagcctccgttccgccgttctcgcccagctcccgccaacgcagatagaggccgcgggttttgttcagagctttgaatacctcgctgttggggaaggggagggaaatgaaagaaaaaacagagatataagtaagatagcactttccaccagcagtgcatgtggccatctgccaaatcggggacacctactccttgaccacgaaaaacggatcctccagagacatgccgcgttctcttcttgccacaaaacgaaaactaacactcctagcagtttttcaccagcgtggcgcacttgacggttcttttcatggatttttccgggcgaaaaccaccccccaaaggtacaagggggcaaattgcaagttggcaatagcaaaagcacttcgtgggagttacatcaaaaggcaagcaaatggggagcaaatttttgctttcaatccgttctatatagcaggaatttcacaatcgactgggttttatctttcgcctagcagcgatgtttgaacagcacgtttattgattattgcacttggacccgctccgccgcttatcgctcgatttcttgtggattccgccgacttagctggttccaccgatggcccagagaacactgtcgctatttgcgctccagagattaagcccccaccgagaaccactaccccactggcatttgtttacgccgctcccgctccagcggctgcgcactttggttccttgattaccaaccccttgactaaccgatttgaaaacaacccgaattttggccaaaaaattccacaacaacaaatcgtcggccaaatggccagcactgttgcaattttcatcgctcgctcacctgctgctcgtctccacgtcatttagcaaacttcggtccgagaacacggtgacggactttaatttcaagttcacacgagacaaattctgataaataaatttaagtaaaggttttatttctgttttgctgctagcaaaataaaccgtaaggcttagtatgacccaagtgcgatagcacgtttatcccgcgataatttagtatatatcgcaagtgcagaaaatacgttactaaacagtttgaatcaggtggcagctctggatttgaatatatatttatccacattcagcttgagcagcataaacgaatattttgaaaacctgcaacattcgcatgaattaaagtttacaaaatagcactataaataagctattattactatttcacatgagaacgttcgtaatagagtattaaaatcatctgagtcaggaagtgtgaccaggcgaggggcacaaagcacttaacttccgttgtgctactgccccactgaccaccgttatcaatttcatttagaccgccgtcaaataagtttgaaaagtgctggcgaaatgttgcaaaacaacgcggtgcgcactttgcaatacgacagtgagatccgtgtggcccagcagccaagtctctcagaaccgagaggtaatttagggcatatggctttagaaaacgaataaaaacagcgagtgaatcaccctggcaaaagggtaaccgaattgttaccaactgataagcagtgca

SEQ ID NO: 17195 - DNA, 1417 bp, DROSOPHILA
aagaaatcgagcgataagcggcggagcgggtccaagtgcaataatcaataaacgtgctgttcaaacatcgctgctaggcgaaagataaaacccagtcgattgtgaaattcctgctatatagaacggattgaaagcaaaaatttgctccccatttgcttgccttttgatgtaactcccacgaagtgcttttgctattgccaacttgcaatttgcccccttgtacctttggggggtggttttcgcccggaaaaatccatgaaaagaaccgtcaagtgcgccacgctggtgaaaaactgctaggagtgttagttttcgttttgtggcaagaagagaacgcggcatgtctctggaggatccgtttttcgtggtcaaggagtaggtgtccccgatttggcagatggccacatgcactgctggtggaaagtgctatcttacttatatctctgttttttctttcatttccctccccttccccaacagcgaggtattcaaagctctgaacaaaacccgcggcctctatctgcgttggcgggagctgggcgagaacggcggaacggaggctgaatggaccaccaccgagctgcgtaactcgctacggagcatcgagtgggatctcgaggacctcgaggacactatcagcatcgttgagaagaatccaagcaagtttcggatcgacaaccgcgaactctccagccggcgccacttcatcgacaacactcgcgatgaggtcaagcagatgaaggataagatgagcctgaaccggagccgggacagagacatcaccgcacaccagccgctgctcgacaacgatcgccacagccccaatcacaatcattccattgccatacccaattcgaattccaactccaacgagtaccatcagcatccacacaacgatcgcacgtacctcgtggagtgtcccaacggcaactcgctgatcaatagcggcagtcaggtggccaataccatagctgggaccatgtcggcggcagcggcagcagcatcccgccacagcggcaccaagtactccaagctggagaacgccctggacagtcccagtcactatgggcagacgcatcacggcggcatggacagtccgagtcataggtacgtgggcgaaacagtgtccatacagcagcgtatgatccagggacaggatgagcagctagacatgatcagcgattcgattggtaccctcaagacggtctcgcggcaaattggcgttgagctcgatgagcaggccgtcatgctagacgactttgggaacgagttcgataccacggagtccaagttggatacgaccatgaagaaagttgccaaagtcttgcacatgaataatgataaacgacagtgggccgccattctcatcctatccggactgttattgtttgtgataattttgtttattattttgtaa

SEQ ID NO: 17196 - protein, 339 aa, DROSOPHILA
MATCTAGGKCYLTYISVFSFISLPFPNSEVFKALNKTRGLYLRWRELGENGGTEAEWTTTELRNSLRSIEWDLEDLEDTISIVEKNPSKFRIDNRELSSRRHFIDNTRDEVKQMKDKMSLNRSRDRDITAHQPLLDNDRHSPNHNHSIAIPNSNSNSNEYHQHPHNDRTYLVECPNGNSLINSGSQVANTIAGTMSAAAAAASRHSGTKYSKLENALDSPSHYGQTHHGGMDSPSHRYVGETVSIQQRMIQGQDEQLDMISDSIGTLKTVSRQIGVELDEQAVMLDDFGNEFDTTESKLDTTMKKVAKVLHMNNDKRQWAAILILSGLLLFVIILFIIL

SEQ ID NO: 17197 - DNA, 3823 bp, DROSOPHILA
tatgcccaaatagatagcggctatgaacacaaccaggtacgtgacccaagtgaagttggctaagcactcgcctgtggggtacatcacatcggataaagttgtcttgttggggttaagtccccctggaggggtgtccccaaagagcacgtcaaatcggacgcagtgcatcacaaaggcaagtagccagacgacgaaaccaaactccagaacctgtagcatttcgtccactacaatcactgtgaatccgtgcttctgctggtactgatacattcgcgagaagaacgagtcaaggtcctcgatgtggttccaccgcgcacgccccgtctccggaaccatgtggatcatgacgccactgtttcgaggcgtgtcctcgccctcatgctcggtgtcgtgctcatccagcggctgctccagcccgtgttcaccgagggggtctaaatgcgcagcagctgcgttcgcttttgcgtcttgtgttttggatgggccttggcctgtggagggatggtgctccaggaacggactggccgcctcctcggccagggagcggtagttgatatgtgggctagacatcgcccaacgtcaaggtcaaccgttctgactatttatatcgctgtatagtataagttggaaaattctttgttgtttgattctgctgaaccttctcagcaaacagctgactctcctaagagaagtgttggccaacgtcaaaatactgggtaatgaataagtaaggcgaacctcttgcagcgcccaatgtgcagtgttcacactgccagggcatctctaaataacacacattggagaatcaaaggtatcttataaaattaatacttataaataattaaatttgcatttttcttgttatttgtttttatattcgtttttaactttttgaaatactcgatacttttgtttatggtacccgaagtgtgaacagcctagatatccatcaacataaatctgcacagagttggcagttctctcccgcatttgtaaacaaactatttgtagctcttactttattgcaaatttaatttaaaaaaacaaacagccaagatgggtaaaaggcagcatcaaaaggacaaaatgtaagtatttagcacatccagcgagttatggaaatgaagactacccattgctttaacaggtacctcacgtacacggagtggagtgagctgtatggcggcaaaaaagtggaatccttggagaacgaccatgtcaagttcaagcggctgccattcgagcactgctgcattacgatggcgccctacgagatgccctactgcgatctacagggcaatgtgttcgagtacgaggccattcttaagtttctcaagacctttaaggtgaaccccatcaccgggcagaagatggactccaagtcattggtgaagctgaacttccacaggaatgcaaacgatgagtaccactgccccgccttgttcaagcccttcagcaagaactcgcacatcgtggcggtggccacaactggaaatgtatactgctgggaggcaatcgaccagctgaacattaagacaaagaactggaaggatctggtggatgacacgccattccagcgtaaggatatcatcacaatacaagatcctcagaagctggaaaagtacgacatctcgaccttctatcatattaagaagaatctacgagtcctgacggaagaagagcagcaagagagaaagaatccagccagcggccgcattaagaccatgaatctggagaccaaggagacgctggaacagctgcagcaggactatcagccagcggaagaggaggcctccacttcgaagcgtacagctgacaagttcaacgcagctcactattcaactggagcggtggcggccagttttacgtctaccgccatggtgcccgtttcccaaatagaggcggctatcatagatgatgatttggtcaagtacgagcgggtaaaaaagaagggctacgttcgtttaaatacgaaccttggccctctcaacctggagctcttctgcgatcaaactcctcgagcctgcgataacttcatcaagcattgcgccaatggttactacaataatgttatgtttcaccggtccataaggaattttattgtaagtacgatctcttttgagagaaactttaatttactatggttttatccacaggtgcaaggtggtgatcccactggaagtggttctggtggcgagtccatttggggcaagaagtttgaggacgagtttaagccgaatcttacgcacacgggccgaggagtgctatcaatggccaattcgggacccaacaccaatggctctcagttgtaagtaccacaaagtgacattttttcaatgcttttgcaagtatacgctgtttcgtagctttatcacctatcgctcttgcaaacatctcgacggcaaacacaccatctttggaaagcttgtcggaggattagacactcttcaaaagatggaaaatatcgaggtggataacaaggacagaccaattgaggacatcatcattgagtcctcacaggtctttgtgaatccatttgccgaggcagccgaacagttggccaaggagcgcgaggaggaggcggccggcaaggaggagattgtcaagaaggaggagcagcaaaagcgcatgaaggagccactgaaggtgtacagagagggcgtaggcaagtacctgaaacttcagacagtggccaaaaagccagaggcgccacttacatccgctcaagcagccaagaagaagaaactggcgaatggttttggagatttctccagttggtaacccattgttttccaaaaataaatatttaaaagaccgttttagaagtaaaagttatcactctttatcggtagatttggttcccccatctgtgcgctctctatcctgccagcttttcttcatttcttgcagcttttcctgtcgccgccgccgctcagtggactttctctgctcttgtgccttgacttgcgcggcaattgaatgctctccgtttagatgcacgtccagtttttccagtagaagtttacgagcctccactcgattctttgatgctagacgatgtgtgtgacacttgaccgttatattggtgggtagatggcgcaagaacacgcagttggatgtcttgttgacagcctggccaccaggaccactgccgcgcatgaaggtctcctcgatatccgactcctgaagcacgggaaagcgggagtagtccagattggacttgcagcgcacagcggtcggaggcagcgccaggaatcgcaccagacctcgcagcattcctacagaatgcgtcccttctttagcagggtctctccgcgctgaaatataagttcattttgtaaatcagttatgaaatacgaaagtggcacttaccttaaagctgaattccacttccacgggattcgtaagggaacggttgtcccgaaactcgtggcgaactcttcccagaaagtagttcttgtcggtcagctttaggtgattgccgtaacgaattaaatgcttgtataaacgcaaaatttgctgccgcgaaggttgaaccattttcatatttcactctcacatgtgtgacagtgctggttaacgcagaactacaacaggttggcagttcagcaaaaacacaatcagctgcggcgttgtgcgatcaaaacaaaagcaacagttataaaaataaacatttgaaaaaaacgcaatgataagattataaatcttaagtagcccacaatttacgattcccccaccactgttaaaaattcctagtcacggttaaacagtgtattaaactctaaataggtaatgcatgtcactttaacatctattttattat

SEQ ID NO: 17198 - DNA, 1652 bp, DROSOPHILA
actatttgtagctcttactttattgcaaatttaatttaaaaaaacaaacagccaagatgggtaaaaggcagcatcaaaaggacaaaatgtacctcacgtacacggagtggagtgagctgtatggcggcaaaaaagtggaatccttggagaacgaccatgtcaagttcaagcggctgccattcgagcactgctgcattacgatggcgccctacgagatgccctactgcgatctacagggcaatgtgttcgagtacgaggccattcttaagtttctcaagacctttaaggtgaaccccatcaccgggcagaagatggactccaagtcattggtgaagctgaacttccacaggaatgcaaacgatgagtaccactgccccgccttgttcaagcccttcagcaagaactcgcacatcgtggcggtggccacaactggaaatgtatactgctgggaggcaatcgaccagctgaacattaagacaaagaactggaaggatctggtggatgacacgccattccagcgtaaggatatcatcacaatacaagatcctcagaagctggaaaagtacgacatctcgaccttctatcatattaagaagaatctacgagtcctgacggaagaagagcagcaagagagaaagaatccagccagcggccgcattaagaccatgaatctggagaccaaggagacgctggaacagctgcagcaggactatcagccagcggaagaggaggcctccacttcgaagcgtacagctgacaagttcaacgcagctcactattcaactggagcggtggcggccagttttacgtctaccgccatggtgcccgtttcccaaatagaggcggctatcatagatgatgatttggtcaagtacgagcgggtaaaaaagaagggctacgttcgtttaaatacgaaccttggccctctcaacctggagctcttctgcgatcaaactcctcgagcctgcgataacttcatcaagcattgcgccaatggttactacaataatgttatgtttcaccggtccataaggaattttattgtgcaaggtggtgatcccactggaagtggttctggtggcgagtccatttggggcaagaagtttgaggacgagtttaagccgaatcttacgcacacgggccgaggagtgctatcaatggccaattcgggacccaacaccaatggctctcagttctttatcacctatcgctcttgcaaacatctcgacggcaaacacaccatctttggaaagcttgtcggaggattagacactcttcaaaagatggaaaatatcgaggtggataacaaggacagaccaattgaggacatcatcattgagtcctcacaggtctttgtgaatccatttgccgaggcagccgaacagttggccaaggagcgcgaggaggaggcggccggcaaggaggagattgtcaagaaggaggagcagcaaaagcgcatgaaggagccactgaaggtgtacagagagggcgtaggcaagtacctgaaacttcagacagtggccaaaaagccagaggcgccacttacatccgctcaagcagccaagaagaagaaactggcgaatggttttggagatttctccagttggtaacccattgttttccaaaaataaatatttaaaagaccgttttag

SEQ ID NO: 17199 - protein, 517 aa, DROSOPHILA
MGKRQHQKDKMYLTYTEWSELYGGKKVESLENDHVKFKRLPFEHCCITMAPYEMPYCDLQGNVFEYEAILKFLKTFKVNPITGQKMDSKSLVKLNFHRNANDEYHCPALFKPFSKNSHIVAVATTGNVYCWEAIDQLNIKTKNWKDLVDDTPFQRKDIITIQDPQKLEKYDISTFYHIKKNLRVLTEEEQQERKNPASGRIKTMNLETKETLEQLQQDYQPAEEEASTSKRTADKFNAAHYSTGAVAASFTSTAMVPVSQIEAAIIDDDLVKYERVKKKGYVRLNTNLGPLNLELFCDQTPRACDNFIKHCANGYYNNVMFHRSIRNFIVQGGDPTGSGSGGESIWGKKFEDEFKPNLTHTGRGVLSMANSGPNTNGSQFFITYRSCKHLDGKHTIFGKLVGGLDTLQKMENIEVDNKDRPIEDIIIESSQVFVNPFAEAAEQLAKEREEEAAGKEEIVKKEEQQKRMKEPLKVYREGVGKYLKLQTVAKKPEAPLTSAQAAKKKKLANGFGDFSSW

SEQ ID NO: 17200 - DNA, 5223 bp, DROSOPHILA
cggcgaactggtcaatgctttcgagcagctggtccagaatgtccagcgactggagaacgaaccggtatgggcaccatccatgtgggtgcagtagatcggttgccaaatgtggacaagcatttcatgcagtttgttgatgaacaccaaagtatttttgccatacgaatttagcaatctgctagagaaacggagaagagacactatttacccgtaggcggtcctgctgggcactcccgtccggccttagtccttttcacgacatgtacctttttgcgtaacagtgaaaacaatgtaatgaatacaataattattgacagaaagtgaaggaaatttgaactcaaccagcatctaacttacaattaaattatataaacttgttgtacaaaatttatttgtgttcaaagaatgacttaattataaatgtatgtattacacgttgttgaaatcaaagtacagagttaatccccccgtaaaacctaaagctaatcgtattgtatctcagttgtatatacactcactaactgaagcatattggatacaatgtgaagttctgtgtgacgacatgtctcatttcgaaaactgatttcaccaaaaacgtagtgacaaattgttgaaaacaagtgagaaactaataaaaaaaaaaaactattttaaatgcgattgagagggaagcgtttttcattagcttagcaattgatgatgtatatattaactttatttaggttagagaagacttaaacacagctttattgggcagcgcacttgttgacatattgacatgctcacgtacatataaactcgtaaatataatctgtcacctatgctaacctatggcaaatgtgtaaattattagcttaggcatatgaagtctatccaggatgtactgatcagttttcttgattgtatcttgtagtgcgaagacagaattctacatccacacgtataactgggtcaggtatcgctgtcgtctatacatgttctacgatatcctagcctacagctagagttgcgatttggttccagaacgggacacgcttattccgtaaaactgggccagtcgtctggcctcccgccatcccgcctcgactgctccgtgaaccgtggagtagtagtgctcgctggacgcttctccggcgaactggacaatgggtctatcgcagcgactctgctgccacgcctcgtcctccgagtccttgtccttctccggagtggtggccaccacggtcaggggatgggataactcccgtgcacccgttcccagctgctccgtgtccatggatcgataggagtaggacccacgaaaattgtcattcgtataccaggcagaggtgcggaaattcgcgggatctgggattttccacctcaggaatcttcggaagaggtacataacgccagcctggacctcatcaacgggaagggtttccatgtgcctgccgctctcattggttatccagcccgccaagattctcggctgatagctcaccctgtagaagccaaagacatcctccaaccatgctcgagaagtgccgcgtatgtcatccaaatcctcgtcccgccagagcatggtgaaacccgtccaatcctcgggccaaaatgcctcgggaaactccacaaagattttgttgaccgttccaaaggccaaaccgtcaatggcacgttgtttctctactggaagctgtggctcaaatagccgaaggtgctgatccttgagaactcccaatgaaaccgtgaccaccacatggtcagctatacaggtctctccattgctcatttgaagttccacgcgtccgtcgttccgattccagttgatcttcacaacacgagtgccaagcaggagacgctgctccagaactccatgctccacatttaactccctggagcgcatgagaagccgtagaagctccacatagcccttgtccttccagtttagcaggatatcgccctcgcactcccaatagtccaggtaacctcgtcccgaaacttgttctagcgtatccgaggcctcgacggagttctcgaatttctgatagttgacaaagaactcactggccacctctgcgtctatatcggagttttccggacgccggagagtgtcgtaaaacttgttggtcagatagctgcccaaggaaccgctgcagtgacgcagctccagttgccgggtgaccagtgaatccccgacgatggctttcaggcgactagatacctcttccggtaccacatctccgttggagcggacgcactcatagttttcgtagaccggacccgtcgactccagcagctcctcatcctgtttccgtgtcagttcgtacacaatgttgtcccgttccccatgacaccattgggcacccagatcaatgacgttgtccgcaaagggtatagtgtgtatgcggccacctagacgatcctccgcctccacgacgagcacattctgaaagcccaattccagcagtttggtggcacaggccacacccgaggctcctgctccgatgacaacgatcttgcgatcctgattccgctgtgcgccactcattccgggtaactgaatatctggtttggaaataaaggggtagcagagcaacaggagaaaagcaaattaaataataaacaccataagttcgaatgtgctagagtgtgagtaagtgggttgtgggcaattgtgcgtacacttgaaaaaaatctggtatacttaaaagcacattaagtatggttcccttttcaacccacaatatttagaaaattatatttggatgattttttcaaacttgcaaactatttaaaaatttgtaaaattgtttttcaattttatgcaacagtaagcattatttaattatggtttcctttaaacacacaatatttagaaaattatatttggatgaatttttcgaaatagcaatctattcagaaatttgtaaaattggtttttaattttacgcaacagtaagcattatggtttcctttaatcacacaatatttagaaaattatatttggatgcatttttcaaaattgcaagctattcaaaaatttgtaaatttttttttcaattttatgcaacagtaagcttacaaatgcttggcgttaaaactgtgtaaattgtaatacaatatcacttattcgcagtcatgcctaaaatctcagaacgtgaatacgttagctttactatccattgcaaatgttaaagtgaataaaacaagcccttttaaaaattcttatggttgtaggaaatttgcttttcaaaattcccattttgctttcacagatatggcttttcaatttccctttcactttcaaaaatagcattgtaaattgatttcgcaataaacttatcgtataatatacataaacaacagtctgtgcgggtaatttgctgatatataacatgatattttcaccaacagaattaattttgtgtttttttttgccatttttgcttactgtgcattggaaatttgcttatggcaatggtgcattgcaattccagacacttgagttttattaccgtccactttccgtacaacataaactacacacgtcttttgattaaaaagtaacggcatgttcgctcatctgtttcgataacgaacgaatccctgcccgcgaatccgacttttgataagagtttcgaaaaagctccccccacccagcaatgaaaaccacgagcaacacactggcgtccaaaggaaaacacacggccaccaagaacacatgtagtctgaaatatgttcactcgcttcttctggccacatgcatttattaatagccacggcagcaaagggaaagcggaggaaaaatcccagaaggagtatctagccaaccggaccagctggttttacctggcggtcaactgaaatctgagtgtttccacgaagagcagtaagtggggggggggggggaaagaaatggaagcggtatcccatcttccgccgtttgacattgattttatatatttttggccaacaaaatgctcaaggttttcagcggcaacaaaaactgcacacaataggaaaaccaaccacaaacatccgagaggaagtcgaattttgggttactgcatatttgggggtgataatgggtgggtatgttcacttcactgcgcactgtcactcaccaaaataactttgaatgccgcttagccgaagtaattcaacaattgaacatttctaccggaatatcaggagatatatatatatactatatgccaactgctgggaaaactccagctccgcggaaaaggcaaacaacactgaatgccgaaacccgaaaaacatcacatggaaacgtgccgctctgcccgtgtgcttatgctgtgacccagtggcgtagtccggattccccgtaggggttatgtttcaagcctttcgaagatacccctttggttgcgccactgtgcgcagactgtaagctcgccaaaaagctccgggcaaaagcatgcaacacagctgagtgagtgggcaaatcgagtgggctgtcgagtggttttggggcgcagagagaacatgagaaggggcctgataccctctccttgtgcacagagaaaaatttggtattaaataccattttccaaatcattgatctatcagaagataacatcttgactaatcctactatccttaaaaacattaaaaaatttgaaagcttgtatttccaatttttgtttaatttaggctttcaaaatagcgaacaaatttttgtatatgtatacaatttctctctgtgcactcatacagtatttctaggtgacccgtaagaagtacctcatttggctttaaattaggaatttaatttataagtatatatatttactcaattgcatacaagtttttgctagatttggttagtgaaatttcctaagactcttcgttaaataactcgtttgatattggtaggtccattttgtttgtatgtatatatatgcagatatatccttcgatgtatatacagcttacagttgcagtatcctttggccaaattgggaatgacagaactctggagcacttggtttatatgtaagtagttagttatcttttattacccgcctacattgactttacatgatcatttgtccgtagctttggaattacattatatatatatagagagaggcggctggtaataaatcaggttaaaatgtttccgtgtatatacagcaagggagtttacatggaattgtaattaagagcccgaattcaaaagcaagctaagtcataaataaatctaatttacac

SEQ ID NO: 17201 - DNA, 1664 bp, DROSOPHILA
cggagctggagttttcccagcagttggcatatagtatatatatatatctcctgatattccggtagaaatgttcaattgttgaattacttcggctaagcggcattcaaagttattttgatattcagttacccggaatgagtggcgcacagcggaatcaggatcgcaagatcgttgtcatcggagcaggagcctcgggtgtggcctgtgccaccaaactgctggaattgggctttcagaatgtgctcgtcgtggaggcggaggatcgtctaggtggccgcatacacactataccctttgcggacaacgtcattgatctgggtgcccaatggtgtcatggggaacgggacaacattgtgtacgaactgacacggaaacaggatgaggagctgctggagtcgacgggtccggtctacgaaaactatgagtgcgtccgctccaacggagatgtggtaccggaagaggtatctagtcgcctgaaagccatcgtcggggattcactggtcacccggcaactggagctgcgtcactgcagcggttccttgggcagctatctgaccaacaagttttacgacactctccggcgtccggaaaactccgatatagacgcagaggtggccagtgagttctttgtcaactatcagaaattcgagaactccgtcgaggcctcggatacgctagaacaagtttcgggacgaggttacctggactattgggagtgcgagggcgatatcctgctaaactggaaggacaagggctatgtggagcttctacggcttctcatgcgctccagggagttaaatgtggagcatggagttctggagcagcgtctcctgcttggcactcgtgttgtgaagatcaactggaatcggaacgacggacgcgtggaacttcaaatgagcaatggagagacctgtatagctgaccatgtggtggtcacggtttcattgggagttctcaaggatcagcaccttcggctatttgagccacagcttccagtagagaaacaacgtgccattgacggtttggcctttggaacggtcaacaaaatctttgtggagtttcccgaggcattttggcccgaggattggacgggtttcaccatgctctggcgggacgaggatttggatgacatacgcggcacttctcgagcatggttggaggatgtctttggcttctacagggtgagctatcagccgagaatcttggcgggctggataaccaatgagagcggcaggcacatggaaacccttcccgttgatgaggtccaggctggcgttatgtacctcttccgaagattcctgaggtggaaaatcccagatcccgcgaatttccgcacctctgcctggtatacgaatgacaattttcgtgggtcctactcctatcgatccatggacacggagcagctgggaacgggtgcacgggagttatcccatcccctgaccgtggtggccaccactccggagaaggacaaggactcggaggacgaggcgtggcagcagagtcgctgcgatagacccattgtccagttcgccggagaagcgtccagcgagcactactactccacggttcacggagcagtcgaggcgggatggcgggaggccagacgactggcccagttttacggaataagcgtgtcccgttctggaaccaaatcgcaactctag

SEQ ID NO: 17202 - protein, 509 aa, DROSOPHILA
MSGAQRNQDRKIVVIGAGASGVACATKLLELGFQNVLVVEAEDRLGGRIHTIPFADNVIDLGAQWCHGERDNIVYELTRKQDEELLESTGPVYENYECVRSNGDVVPEEVSSRLKAIVGDSLVTRQLELRHCSGSLGSYLTNKFYDTLRRPENSDIDAEVASEFFVNYQKFENSVEASDTLEQVSGRGYLDYWECEGDILLNWKDKGYVELLRLLMRSRELNVEHGVLEQRLLLGTRVVKINWNRNDGRVELQMSNGETCIADHVVVTVSLGVLKDQHLRLFEPQLPVEKQRAIDGLAFGTVNKIFVEFPEAFWPEDWTGFTMLWRDEDLDDIRGTSRAWLEDVFGFYRVSYQPRILAGWITNESGRHMETLPVDEVQAGVMYLFRRFLRWKIPDPANFRTSAWYTNDNFRGSYSYRSMDTEQLGTGARELSHPLTVVATTPEKDKDSEDEAWQQSRCDRPIVQFAGEASSEHYYSTVHGAVEAGWREARRLAQFYGISVSRSGTKSQL

SEQ ID NO: 17203 - DNA, 2452 bp, DROSOPHILA
acaatttcgactcaacggcagctcttatacgggaagattgcacactcgacgcttctgtgcggtaaatatgtttttttatcgtagtttttgacggtaatatttccgttccatatttacagtgatatatattactattctaatttcgtacagctttacttttttgtcattatagaagtattcaaagcttaaagttgtgtccactactgtccgcggaattatatatttcgatcttggcatgtctgcctgttcgttctactatcactttcaaacaagtaccgcaccgaaatcgagaaaccaccgacaggtctaaatgtactgctactaaactatccggttgatcgccaatgttccattatcgccaatgttccattatgacaaacaggaatttaatgttttaccgtctgatgaatatggaaaatattgaacaacctctgtgttcaattttaaagtccagacggttgaagagtgaaataagcttgtgtgggcgtatgtatgtttaaaacgctggacaggataagtatatcccctaagagggaataataataggcctatgcaccacttcagtttgacaccttttcaagaacacgaatcgaaaatcaagtttaagtgcttcattagtcctgaataacacatttaagcccatgggagggtgtccttttcacttggcaggtggtggatctggtcaaattgtggcttacatcagcgatgttagataagttttctgctacaattagacgcactgaactttgttttgccgcctatcattacagattgatccaaaatttatattattaaagacttcgaagctgtgtttttagtggtcctatggatagaagattattgagagcttccaggatttctgatttcttttagctcaatccgacgactggagatgattttctattatgaatatttcccttgatagtaaataatgggtttaaaaacgccactcgttaggcataccaaataaaaatcgaaatttaattgctccaaagtactttattcacgccatgacattggtgacagggtatccttctgacttggcaagtggtgggattggtcggaggcgtggtcagcgacgtcagccgttctatcggccataccaaccacctccgcgacctccccaacctcctcgaccgccccatcctccaccccatcctccacggccaccccatccaccacggccgccccatcctccacggccgccccatcctccacgaccaccccatccaccgccccatcctccgagctggcgggcctctcgggctccatcgttggcatggttcgctccctgatcggcgacgtccaggagtccaaccacctgatcgttgttttcagaatcatccaaggcgtaggcacatgccaggcacaggacaccgatgagggccagaagtgttagacgcatcttgctttctgcttgattcaatgggttgctgatacagactcgacagactcgtgcaactgatgatttgttcgtctcaatcgcgggccttatatgcgaagatctcgccacttgacgttcctgttctcatacgcatcgatgagtcgggtctctccacagcacccccctccaatagctccaccaccacctcttgccatagtcgtactatactgtgtatgtactatatacctacttggcctctaggtgcgattgtttaggggcttttttaaccgggttctggtttgtatcgctatatatttcaccacacaaatattacactcttttttattctgtgtaccatttttttcttgtttttttttttttgttttggctgtcattactgaatcattccaaatttttaatgtctcatttgcgaaagttgtcgggatgctactcctaagtggtttcatacatagatcattcgattaggattcgttgactgccaacaattgagacctgttttgttttatgggtttttactaaagtgcatcggcagctaagtgacaggtcgattgccatatttaattaattattaatcaacaaagccaaatatacagaacagaaacctttccatttacatgtaggtttaaattgtttaagtttcatataaacaaatctttgacttaaatctggactgtaacagacatgttgatgtcaggtcaatcctaataacattttgttgaatactgagtagagcgttaaacatgaggcaaccctttattcgatatcctcgactatcagatacccgtttcttagctagtactaatagaagtgcatgttgaaccaaataatacaaagaatcttttgatacatgagcgctgccctagatggtcagacatagcgatcctgatcaaaaatatatatactttatatgatcagaaacgcatacttcaacctgttacatacataattttaaacgagtctagtataacctctattcatcgcatatcgtgtgtaataatataatatttaatacaaatctgctaatcattaatcccaattaacatagta

SEQ ID NO: 17204 - DNA, 452 bp, DROSOPHILA
tctgtcgagtctgtatcagcaacccattgaatcaagcagaaagcaagatgcgtctaacacttctggccctcatcggtgtcctgtgcctggcatgtgcctacgccttggatgattctgaaaacaacgatcaggtggttggactcctggacgtcgccgatcagggagcgaaccatgccaacgatggagcccgagaggcccgccagctcggaggatggggcggtggatggggtggtcgtggaggatggggcggccgtggaggatggggcggccgtggtggatggggtggccgtggaggatggggtggaggatggggcggtcgaggaggttggggaggtcgcggaggtggttggtatggccgatagaacggctgacgtcgctgaccacgcctccgaccaatcccaccacttgccaagtcagaaggataccctgtcaccaatgtcatggcgtgaata

SEQ ID NO: 17205 - protein, 104 aa, DROSOPHILA
MRLTLLALIGVLCLACAYALDDSENNDQVVGLLDVADQGANHANDGAREARQLGGWGGGWGGRGGWGGRGGWGGRGGWGGRGGWGGGWGGRGGWGGRGGGWYGR

SEQ ID NO: 17206 - DNA, 4633 bp, DROSOPHILA
gcagccatattgtagcagtgttgccagctggacggtattcaaaaatactaaactttttctcctgttactacttatatactaaatatacagcaagctgtcatctaaaaaccgcgcccacagactgattgattaatgtgtaatttgaaataaccagctaaattttacattcgagaatggttagaggctacacaaccttatatacataattgtttattaagataatttaaattcataatatatttgttcaatattaacaacaacataaacaacatactttcaggggcaaatgtatgaatttttgaagtgccgtgccgactttggaaacggccactttgatttctacaccgcgccgttaaccaactggcagcactgcactaagagagcgtgttctgaaatctaagagaacaatataacattttttaaaagagaaaaacaaccaaaaagacaggtcactgttattattgaatttaacttgataatgaatattttcttataactgcacttaacttaacaaaataataaccatttttttgttttgcttttatttcaaaaaatatgtatttgtataataaacaatttatctagtttatgtgagtcacaaaagtttagttaacgataaaaacaaactttgaatgattgtcttcaatgaataaataacttagttaccaaagctttattctccctttaaaatcaagtagtatttatattaccttctaatcttactccctgactttcaattccctgaaaagttctatattgaaaaccacgaaacttagagctacacagattaaagaatgtctagctaaacactacttatttagtcgattataagtaaagggaggactaacctttagtagaataaagaagcttaaaaactgtaagtcaaaaataaattatttgataattaagttaagtcaaatttatataatttcccaactggcggtgatcttttccagaattttttctaagtttttctagatatttatgacctcacatcacattagtgtattggctgtgaggattttgagttaatctcaatccacttcctaagtaaatcccccggctgcatagttggctgttgctgcggaagagcagtcctcgagtattgatattcactaggcgttattgtgggtgtaggtgacggcattggcggaaaaactgcgaaatttcgctgactctcacgggcttcggaccagccgtagtcccttacagttgcagcacctgttccgcattgggcttctggacgtggctgcgactcaaatccagaagattgtgacgaagtgcgggaaagttgattctgctgtttctcttcgtaatgtctcattagattggcagtgcatagatcttggttcacactttgattggccgccacccaggcgcttacatcagctccgccgacgttcctgtttatggacggcaaacgcgatggcatcaaaagattttgcgtggatctagtgaaagtattgccttgggccaggttactttgtccatggcgataccattgggactctaatggtctcatgggtttctgttgaaacatcatcgccggctggacacgcggggcaaccactgtagaggcatctccatagttcgaggaccaagcctgctgttccatccgttgcttcgacagatgcaacgagtccagggacagcaaagaagcaggcgcctgaattgttcgctgggaaatcgttggggcgggtgagtggcacacagaggcggttcgcatggacaaattgctattgctgatatcactgtatccacttaactgctgactgagcatgctcagcgtttcatcatcgcattcgtccgcacagaggcgatggaagctctcacaggcagactcgtcccgattcacttggctcaacagattggtccggttggtggccaacaaaacaagggttacaaaacttcccaccagctgtttaaagaatttgttaaataagattcaaatataagtaaatgcacttactataaaggatattccactgatgtaaggatccaggaattcgatacccatggcatacccactccataacaatagagcaatggtgaatcgcgtaaatttcaatccgtcgtatatcgtgtgcaggaaacacagggccagcatggcatatgggtagatcccaataaaacaggatgcgaaggttgcttgctgcacttgctgttggcctatgccaagcgaatacagcaagagcttgccaaaggtacggccatacaataaaagtttggctatcatttcgcgctgttccaggaaaatgcctacgctcgaagtcaccactcgaattaaggccagcacgtgggagtaggcgtagaacaaggttagcccaatgaattttccaaggtaagtcgtaaactgaatggaagttgcattcggcagccggcagagcaggcacaaaatattgactacagtcaggatggtcatcagaatgcggtatcgctgcagtttaaactgcttttgggcagcggccaatcggttgaagtgcggctgcttgagcaacgatgctcccttgatgatatagttcaagaacttggagctcaacaccattttcttcttctcgtgcaggactttattcacatgtcgttcgcagctgctacacaggcgaaactgcttctccagtcgttctctacggaaaacataaatattattatttaataacttgtgccccagcttttatattaaaggttctctattaatagatataaattataaatcggcttactcatagaaactatctaatctagttaacttgtctttgatttgcaaaccgatgtagatacgggtatttagatcatattcagacatacatttgtatgtttgttgtatatcttatttgcttgacttaaacacgattaactcatttataaaacacatcaagctaaattactttgcttgattcttagtaaacatagataccataacattgtatatataatgcttattgttatgacagctcacctgtaaacctttagttcctgatcgaatcgggactcgttcttgggctcgaattgagagagcttctcgaccttcaggcgctgcgcctcgttgcactggtcgcacaggccgtttttgggagcaggaggttgagcagtcaggacatcggaataatatgagttggcacagatgctggagctgcctttggagctgttcttttgggagccaaggctgcagtcccgctgcgacgtaatatcccggttgtagtcgccgtccttggtgaatccattgtattgctcgcatgacgggcaggtccaactgttgcgatcctggtacggaactcgtacattgccattgcagaaccagcagttgacacgggcgtcgtagcgggatctgtagacattgcaggttagttagtctggactattataactcaatgcatcacttaccgtatgctaatataaaccttgaacagaaacgtgccggccacaaagagaatagcacaaacaggtatggccgtcgccgccagccgaattagtagggttagcatcgctttagtatttcggtaatctgtcacgcttatctatgcagtcaagctggtgcctctgtgggtcacggagtcacttagctatccaaatgccagctagagatccactttttccaaacgaaacgcaacgccggcatgcaagtcggcattagcgcgcgcagaaaataaccacaaaataatacagcggaacttctagcgatggcagtagttaggcgatgcgatagtttctacagtgtgcatcctatgttttctggcctttgaggagagctgtggcgaaatgttaaggtggtaacacactgtaagttgtttttcgtattattttttattatttattttatttttattatttatttattttgtaataatatttgtgtaatattgtaaatattataatataaatattattataatattaatattaattattatattataataatattataatattataataattattatattatattattataatattaatattaatatatattaatattataatataattatatatatatataatataatataataaatattgtaatatttatttttgtaaatccttcccaaagaagtggacattataacatcgaaataggtcagtcaatagcttataataataatataaaaatagttgttaacagtttgttgtcgctagaatttacaggatctgcttagtaagagtataatatatacactattaacaatgaaaaaaaaatgtacctttatagttcctaaatttagaaaaaaattttaattatttaaatttttcaaagtttgtatctggcttacatctggtgtttatttttaagcccagcaagattatactggaagatatcttttcaactgagtttaatgtgataaaatggacaaaaatgtattcccttttaatacatttttcaacatagctactatctttcgattaaactttgtatttatttcattgacattaattaaaacttaatgttatgtcaggcaagtgggatgttttagcacactaaaacgggatttgcgttttattcgttttcatgtagtatggccacactgcggccatcgtataaaagcccgcgctctccaaagcgaatgcactaatttttccaagtgtgtgaagcggacagtttgtgttgtgttcgactgctataagc

SEQ ID NO: 17207 - DNA, 2194 bp, DROSOPHILA
cgctaatgccgacttgcatgccggcgttgcgtttcgtttggaaaaagtggatctctagctggcatttggatagctaagtgactccgtgacccacagaggcaccagcttgactgcatagataagcgtgacagattaccgaaatactaaagcgatgctaaccctactaattcggctggcggcgacggccatacctgtttgtgctattctctttgtggccggcacgtttctgttcaaggtttatattagcatacgatcccgctacgacgcccgtgtcaactgctggttctgcaatggcaatgtacgagttccgtaccaggatcgcaacagttggacctgcccgtcatgcgagcaatacaatggattcaccaaggacggcgactacaaccgggatattacgtcgcagcgggactgcagccttggctcccaaaagaacagctccaaaggcagctccagcatctgtgccaactcatattattccgatgtcctgactgctcaacctcctgctcccaaaaacggcctgtgcgaccagtgcaacgaggcgcagcgcctgaaggtcgagaagctctctcaattcgagcccaagaacgagtcccgattcgatcaggaactaaaggtttacagagaacgactggagaagcagtttcgcctgtgtagcagctgcgaacgacatgtgaataaagtcctgcacgagaagaagaaaatggtgttgagctccaagttcttgaactatatcatcaagggagcatcgttgctcaagcagccgcacttcaaccgattggccgctgcccaaaagcagtttaaactgcagcgataccgcattctgatgaccatcctgactgtagtcaatattttgtgcctgctctgccggctgccgaatgcaacttccattcagtttacgacttaccttggaaaattcattgggctaaccttgttctacgcctactcccacgtgctggccttaattcgagtggtgacttcgagcgtaggcattttcctggaacagcgcgaaatgatagccaaacttttattgtatggccgtacctttggcaagctcttgctgtattcgcttggcataggccaacagcaagtgcagcaagcaaccttcgcatcctgttttattgggatctacccatatgccatgctggccctgtgtttcctgcacacgatatacgacggattgaaatttacgcgattcaccattgctctattgttatggagtgggtatgccatgggtatcgaattcctggatccttacatcagtggaatatcctttatactggtgggaagttttgtaacccttgttttgttggccaccaaccggaccaatctgttgagccaagtgaatcgggacgagtctgcctgtgagagcttccatcgcctctgtgcggacgaatgcgatgatgaaacgctgagcatgctcagtcagcagttaagtggatacagtgatatcagcaatagcaatttgtccatgcgaaccgcctctgtgtgccactcacccgccccaacgatttcccagcgaacaattcaggcgcctgcttctttgctgtccctggactcgttgcatctgtcgaagcaacggatggaacagcaggcttggtcctcgaactatggagatgcctctacagtggttgccccgcgtgtccagccggcgatgatgtttcaacagaaacccatgagaccattagagtcccaatggtatcgccatggacaaagtaacctggcccaaggcaatactttcactagatccacgcaaaatcttttgatgccatcgcgtttgccgtccataaacaggaacgtcggcggagctgatgtaagcgcctgggtggcggccaatcaaagtgtgaaccaagatctatgcactgccaatctaatgagacattacgaagagaaacagcagaatcaactttcccgcacttcgtcacaatcttctggatttgagtcgcagccacgtccagaagcccaatgcggaacaggtgctgcaactgtaagggactacggctggtccgaagcccgtgagagtcagcgaaatttcgcagtttttccgccaatgccgtcacctacacccacaataacgcctagtgaatatcaatactcgaggactgctcttccgcagcaacagccaactatgcagccgggggatttacttaggaagtggattgagattaactcaaaatcctcacagccaatacactaa

SEQ ID NO: 17208 - protein, 680 aa, DROSOPHILA
MLTLLIRLAATAIPVCAILFVAGTFLFKVYISIRSRYDARVNCWFCNGNVRVPYQDRNSWTCPSCEQYNGFTKDGDYNRDITSQRDCSLGSQKNSSKGSSSICANSYYSDVLTAQPPAPKNGLCDQCNEAQRLKVEKLSQFEPKNESRFDQELKVYRERLEKQFRLCSSCERHVNKVLHEKKKMVLSSKFLNYIIKGASLLKQPHFNRLAAAQKQFKLQRYRILMTILTVVNILCLLCRLPNATSIQFTTYLGKFIGLTLFYAYSHVLALIRVVTSSVGIFLEQREMIAKLLLYGRTFGKLLLYSLGIGQQQVQQATFASCFIGIYPYAMLALCFLHTIYDGLKFTRFTIALLLWSGYAMGIEFLDPYISGISFILVGSFVTLVLLATNRTNLLSQVNRDESACESFHRLCADECDDETLSMLSQQLSGYSDISNSNLSMRTASVCHSPAPTISQRTIQAPASLLSLDSLHLSKQRMEQQAWSSNYGDASTVVAPRVQPAMMFQQKPMRPLESQWYRHGQSNLAQGNTFTRSTQNLLMPSRLPSINRNVGGADVSAWVAANQSVNQDLCTANLMRHYEEKQQNQLSRTSSQSSGFESQPRPEAQCGTGAATVRDYGWSEARESQRNFAVFPPMPSPTPTITPSEYQYSRTALPQQQPTMQPGDLLRKWIEINSKSSQPIH

SEQ ID NO: 17209 - DNA, 4019 bp, DROSOPHILA
atgtgatggacaacagcaccaccagacgcggccaaccctgctggcacaaggtggagaacgtgggcctgactgccattaacgatgctcttatgattgaaaacgccatgtatgccattctcaagaagcacttcagccacttggactgctatgtcgccctaatggagctcttccacgaaatcacatacatcactacctgcggacaatcgttggaccaactgaactcgaaccgctgtgtctcggaattcacaatggaaaactacaaagcaattgtcgaaaataagactgcctattactccttctaccttccattcgcacttgctttgcacttggctgggtaagtaatggccatacatatataagattccgcttattaatcttccgctctattgtttagctataaagacgcagaggccttccgtcaatcgaagaccattctcctagaaatgggcaactttttccaggttcaagatgatttcctcgactgcttcggtaatccggaagtgactggtaaaattggaaccgacattcaggacaacaagtgctcgtggctggcagtggtggcaatgcagcgagccaatgtcgagcaaaagcaaatcatggtcgattgctatggcaaagaaggtaaaactagcttagcaaacccgcacaattagacattgacttttgaatattaacctgcagaaccagctaaagtggagcgagtgaaagaactgtacaaggaacttggactgccatccacctatgccattttcgaggaggaatcctacaacatgattaaaacgcacatacaacaaacctcacgcggggtgcctcaccagaccttcctgcaaatactcaacaaaatctaccaacgtgactcctaaattactcaagcgcaacgactttacggatacgtttttaattaaattgtagttttagcatttacatggatgaactgttagcaagggctcagcaattacaaccgatatgaactttttactatacatacaatgttctttgcttaatcgtctgtaaaatcaaagggcgcaaaagcctttcggaaatcttccacatacgccacttcttcgtccttatcgagaaggcaatccttccagttcactttttcatcgcagttaagaagattctccgaacagaacacgtccctgaaaaaatgagtttagtcaagagttggtagcttaaatcgagaagttaacgcaccttgcgaaatgaatgggaaagtgtttcatttgccgcgttataagtgtgctatcgtcgggtaactcggccaggaaataaggtcccatttcaggcagcattttctcagaatccaatgcgggaagtgtctcaaattccagattaaattcctccgccttatcctgcaatgttgtgggatatacatcatatgttataaaaggttgaatgtcgtgagcatacctcaaaactatgttttatcttccaggcatagccttcttcaaaggcaagcgcgttgatttgtaggtgaaccgatttatagtgccgttcagtaaaacacaccacttggcctaacgttttgaagaactttcgcaaagctgccttgaacttgttgagctccttccaatcatctggacttagttgagcagcgcagggcacatgcttggtggacaatatcatgacatggtgtttgttaatcggtcctttggccagagcaagataaaaatgttcgcccacagtgataatgagatgcttctccacatcaggtgaggataaacagaaccagcatttatctacaaatataggaatagtattaaggatgcagcttgtaaaattaagtactagacaaaccttgctcaatctgcggtattctaggacgtttatctcttttgttattatcaccgccttgtcgcttgcgtctgccaccatccatgtcgtagaagtattgtcggttttctgactgaaagaatatataattagtcacttggagtacttatagatatgtaaaggttacccaccgaatcattcttgccaatagctccgcctaagtccaagccaatgaaaggacacggaatttcatttgttgtcttctgcgctaggtccaataagcgtgatttgtctactggcttcaggctgagtgcatagatgtacttggctttttcggcatttcccacttccgcaagggaaatgaagcgagtgcacagttcaaactgggtagtctcatctttgggcatccgaaagggtgcgctttcgtagtgtgttccattaatggcacaaaagtgatagcgcggctttatttcacgacaaagaaatgataccaacttggatgctgtggcctgagaagaggaattagttagtttcacagtaacaagtgctctagatgtatatttacgttttccttctcctgcataccaaagggccattgcgatgttaggagcacatccacaccgcggtactctgtggagcagttcttggacaccaaacatgagttcctcacagcgatgacatcggctttggtgaactcgtgttccgagccagcggaatctgcagtgccctgtgcctccaaaccacttagataggcaattttaacaccactgctcagcgtgtagaccccacgtcgaccaagatacgtaagattggtgcagatttcaccgtccgtcagattttcaaagtatttttcatgctccctttggttgggtcccaggatataggtgggaacagtgactaagtacagggaaagggttaagagaataataaatgcttatattacacttaacttactatgcttaaaaccatttttgtaggcaatcagttcctcgttttgcttgtcctccccgaagaagtcaccgacgcagcaaaggatttcgaagggtcccgcttttttgttgacctgctccacgcgctgaaatagctgcttgaagcgacctcgcacatcgcccacaactaggctaggagaaataaacaatattaaacccttaaatcatataatttataccatgttttttactcacattttggtgcccgcgtccatggttatcgataactgagcaatcgattgaatcttcatcatgttggtactgccaacttggtgcattaattgggcggcagaattcgtaatggaaatctaattaggtcattgattattttagaaatattaaatttctcaaagccaaatcatgttccttttaccgaattggaacataattctcgcaattatagaccatttcgagcaccatgacacattttacagcagcattcccagcaccacagttttttttcggcaattgctgtttaattgagcgaagaacgttctatgcttatataacgaactataaccttaccgcaatgtcaatggcccaaaacatgacattatttatgacattggccccaaacagcagcagattgcaacaatgaacttttgctgggcttttctggtcatgcgtggctggcactattaagtggccattactcttttcgttccattagatttggagctgcgtgagggatataaaatgggccttgcgatttcatattcatatcagtcattttactcactcaattgcagctatgtcgcccagtcagcttcttgtgatcttcgcttcgctggccctaaatactcgtctagtatttggccaagccacgattgattgccaaagaccaccgcaactagtggtgggttttgagtttggtttttttttaattttaaagtgattcttaagatattttgacactttcctaggatcccgcactctgctgcaaggatgggggtcgcgaccaggtggctgagcagtgcgcccaacggattttaggaacagcaaatggacagaaggcaggaggtcctccatctttggacacggcagcagtgagtaatctcagcctatgaaattgttaagaagtcgcaatacataatacattatctacttagtgcctagctgagtgcatcctcacatcctccaagtatattgatgagccccagaaactaaacctggcaaacatacgcagtgatctctccgctaagttctccaacgataccctttacgtggaaaccatgaccatggcgttctccaagt

SEQ ID NO: 17210 - DNA, 1614 bp, DROSOPHILA
atgatgaagattcaatcgattgctcagttatcgataaccatggacgcgggcaccaaaatcctagttgtgggcgatgtgcgaggtcgcttcaagcagctatttcagcgcgtggagcaggtcaacaaaaaagcgggacccttcgaaatcctttgctgcgtcggtgacttcttcggggaggacaagcaaaacgaggaactgattgcctacaaaaatggttttaagcatatcactgttcccacctatatcctgggacccaaccaaagggagcatgaaaaatactttgaaaatctgacggacggtgaaatctgcaccaatcttacgtatcttggtcgacgtggggtctacacgctgagcagtggtgttaaaattgcctatctaagtggtttggaggcacagggcactgcagattccgctggctcggaacacgagttcaccaaagccgatgtcatcgctgtgaggaactcatgtttggtgtccaagaactgctccacagagtaccgcggtgtggatgtgctcctaacatcgcaatggccctttggtatgcaggagaaggaaaacgccacagcatccaagttggtatcatttctttgtcgtgaaataaagccgcgctatcacttttgtgccattaatggaacacactacgaaagcgcaccctttcggatgcccaaagatgagactacccagtttgaactgtgcactcgcttcatttcccttgcggaagtgggaaatgccgaaaaagccaagtacatctatgcactcagcctgaagccagtagacaaatcacgcttattggacctagcgcagaagacaacaaatgaaattccgtgtcctttcattggcttggacttaggcggagctattggcaagaatgattcgtcagaaaaccgacaatacttctacgacatggatggtggcagacgcaagcgacaaggcggtgataataacaaaagagataaacgtcctagaataccgcagattgagcaagataaatgctggttctgtttatcctcacctgatgtggagaagcatctcattatcactgtgggcgaacatttttatcttgctctggccaaaggaccgattaacaaacaccatgtcatgatattgtccaccaagcatgtgccctgcgctgctcaactaagtccagatgattggaaggagctcaacaagttcaaggcagctttgcgaaagttcttcaaaacgttaggccaagtggtgtgttttactgaacggcactataaatcggttcacctacaaatcaacgcgcttgcctttgaagaaggctatgcctggaagataaaacatagttttgaggataaggcggaggaatttaatctggaatttgagacacttcccgcattggattctgagaaaatgctgcctgaaatgggaccttatttcctggccgagttacccgacgatagcacacttataacgcggcaaatgaaacactttcccattcatttcgcaagggacgtgttctgttcggagaatcttcttaactgcgatgaaaaagtgaactggaaggattgccttctcgataaggacgaagaagtggcgtatgtggaagatttccgaaaggcttttgcgccctttgattttacagacgattaa

SEQ ID NO: 17211 - protein, 537 aa, DROSOPHILA
MMKIQSIAQLSITMDAGTKILVVGDVRGRFKQLFQRVEQVNKKAGPFEILCCVGDFFGEDKQNEELIAYKNGFKHITVPTYILGPNQREHEKYFENLTDGEICTNLTYLGRRGVYTLSSGVKIAYLSGLEAQGTADSAGSEHEFTKADVIAVRNSCLVSKNCSTEYRGVDVLLTSQWPFGMQEKENATASKLVSFLCREIKPRYHFCAINGTHYESAPFRMPKDETTQFELCTRFISLAEVGNAEKAKYIYALSLKPVDKSRLLDLAQKTTNEIPCPFIGLDLGGAIGKNDSSENRQYFYDMDGGRRKRQGGDNNKRDKRPRIPQIEQDKCWFCLSSPDVEKHLIITVGEHFYLALAKGPINKHHVMILSTKHVPCAAQLSPDDWKELNKFKAALRKFFKTLGQVVCFTERHYKSVHLQINALAFEEGYAWKIKHSFEDKAEEFNLEFETLPALDSEKMLPEMGPYFLAELPDDSTLITRQMKHFPIHFARDVFCSENLLNCDEKVNWKDCLLDKDEEVAYVEDFRKAFAPFDFTDD

SEQ ID NO: 17212 - DNA, 3631 bp, DROSOPHILA
cacatacgctagccaaatgcgtgggaccctcgaatattcggtggtccattaagtagcctaagaattgcaccactgaccagtatccaaatattatgatcttatttatctaagcctaacaacagaaaacacaagcaagtaattattctctctaccagctaagatatgaaacgcaataaagcctaaacatattcatatcaccacagactttcgttctgcccagaggaatgcaaagctgatcggtcattaatcaacgtacaggattgcaattgcagtggcactttgaatggccgcttggccagtcgagggttaacgagctaggccaattgccagttgcagtggcagtttccgttgcagacagtagccagcgggtcttagtagttgcaattgcatcccgctttgtgggtaatcggagggttggtcaaaggccactcataaatcaagcagcaggacggctactgaacataactgaaattggacctcagtgggtcacgaagctttacatatcattaggaactactttctttatgatgactacactactttcgcatatgcggttgtaaactttcgtgccgaaaattccactatcagcatgcgaaaatggatcacatccagagaaaacttaccacaaagcatcgtagcatccattcctgaccccttttaacaaaaatgcccaaatacacataaattgcaaattttcacattggaaagacacttttccattgagtacactttaataagaatttaaataaattaaaaccgatcattatattcttaaacatatataaaaaaacataaattaatgcagatatggaatcccaattgctggtcttgactagcacatttgaaaagtgttcggtagaacgtagagctttgcaaatgactcattggtgggaaatttgaccaaagcgatgcaattactattatctgacaaccgtctaacgaataacataagttaaggataatagattacattatttacaaatacctagtagctagccctttaatcgtcgaagaatagtatttctaggatccgtttctgtgcacttttcttccgttccttgttcattttcagcagttccgtggtgactaattctcccagcaaatgctcagacaaccgctgcacacccggatgattgggcggcgcctggaatttcccgaagtttgcgggatgcgaactgctggcctgatgtgggaactgctggtataactggaaaaggaagtccgtgtttgacggaaacatgttctggtgctgttgctgctgctggttgttgtggctattattgccgctgggattgttgctcccgctattgctgctactgttattcccatttccattgccccgctgcatgggcatcgaattgctgtagtgattctcctgctgcatcatagcctgcggctccatcagatcatggctgttctcatcggattcgtcgtccgagtcattgccaaagtgactaccattgctggtcatctggttatgggcattgccatttagttgaatacggggtttcttcatatggaaatggctcgatgacgaagagtctagaccatcgcccttggggttatagacatgtgactgttgcatctgcagagtggaactgttgccgatggaagcgcccgtggcgctggaagaggaatgtaccaccggaagctgctgttcagatgccggcgactgttgctgcgcttgttgctgctgctgctgctgttgttgttgcgtctgctgctgaggatgatgggatcctgccccaattccttgcagcggcgacgacagcggtgatttcatcgaggatgatgttgaggtcagactgccagcgctgttctgggccccgttcatgcccacggagccatccttgtattgatcctgataaccttgcgaggaatcagccattacagctgcaacggccgccgcctgttgctgcatttgtgactgtgatatgtgctggagctgctgtgaggccacggcagccgcaaaatccctgaacacctggtccgcctcgatcttcacctggccattgacgttttccagcgcagatgcagcaacgttactcagagcactcattgcgtgttgctgatccggctggtggtaaagatgactttgccctgagctgccaaactgagacacattcttcatggagccattggacttatcaacctggtattcgttgtagccggagctgttggcggactgtggagatgttaggaagttcggcacatggcggtaggacttgcgcggctggatgtgctggtccaagaacttcattttctccaggtatggacgcgacaggtgttcgtagacaggtggatcgccctgcttccgctgcgacacgtagcgttcgcgtaggtacttccaccgcttcttgcacgtgtccactggaaaggagggcaacatttatatagaggatctgccggaggagcgcgtcttcctcaccatccgtgcgcagcttcatcgcaatcagctgccaggcctcgtccttcgtctcgtacttgccaccattggcgccgccgttgaggtagtacttctgccggttgtagatcactccgtgctgcgctacctcgtcaattagctgctcatccatcattttagtttaattcgtgttttcagctgccaatttgcctttggtgtatgtcaggccatttccaacactgttcatgggacatcgaaacagtgtgaccgaaaatgtagcagcagagtgtcaaatataatttgaagatattgatatcgaaatatattcgacaatttgcatcatgtttaaattcgtcagcattttgatttatatatagtaatgcatttaattaattaacacgcaataaaattaataatttcagcaaaagtaaatcatttgctgttcctgaatttactaaataaaaatgtttaaaaatttaacttataagttaccttcacaaaattctcgaaaaataaaagtcagctataaaatagttgctataaacgtattatggttatttgaaattttaaggtgggttcttttgcgaaccgagattcagtcacactggcaatttggtacccgaagttgaattgccgttttgtgaagcggatagttacctgccgataatcttaaataaaaatgtttaaactggcccgtatgctcctgccgcagcagcggatcctggccagcccgctgcgcctgcaacgcctgatctctaccagcgacgaggtcaacgcagagcccatcatcaagtccatggacaccattggcggcctccccaccgaactggtcaacgaacagaagctgaagaagactagcaggtaatcaatctaccggttttcgcacttgacctttgccttgcctgtttgttttgtttacatttcgaccggtatgggcatgggcatggtatgcatgtatcggaggcctgttttgggcgtgattttcgaaaaggagtttcggggtctttttttcttgatttcaagtgggggagaaagtttgtatcgagccgcttatgcagtcacgtagaccatagatgcgtgcatgtgtgtgtgtatgtatttgtgcctgcctggtggtgtcagttatgggctctattgttcttgacttttgttttgtccacagaaccttatcgacgctccaaaatcactcggttcccattgccgctcgcgtcacggtgtcgaaagatg

SEQ ID NO: 17213 - DNA, 1573 bp, DROSOPHILA
cctgacatacaccaaaggcaaattggcagctgaaaacacgaattaaactaaaatgatggatgagcagctaattgacgaggtagcgcagcacggagtgatctacaaccggcagaagtactacctcaacggcggcgccaatggtggcaagtacgagacgaaggacgaggcctggcagctgattgcgatgaagctgcgcacggatgtggacacgtgcaagaagcggtggaagtacctacgcgaacgctacgtgtcgcagcggaagcagggcgatccacctgtctacgaacacctgtcgcgtccatacctggagaaaatgaagttcttggaccagcacatccagccgcgcaagtcctaccgccatgtgccgaacttcctaacatctccacagtccgccaacagctccggctacaacgaataccaggttgataagtccaatggctccatgaagaatgtgtctcagtttggcagctcagggcaaagtcatctttaccaccagccggatcagcaacacgcaatgagtgctctgagtaacgttgctgcatctgcgctggaaaacgtcaatggccaggtgaagatcgaggcggaccaggtgttcagggattttgcggctgccgtggcctcacagcagctccagcacatatcacagtcacaaatgcagcaacaggcggcggccgttgcagctgtaatggctgattcctcgcaaggttatcaggatcaatacaaggatggctccgtgggcatgaacggggcccagaacagcgctggcagtctgacctcaacatcatcctcgatgaaatcaccgctgtcgtcgccgctgcaaggaattggggcaggatcccatcatcctcagcagcagacgcaacaacaacagcagcagcagcagcaacaagcgcagcaacagtcgccggcatctgaacagcagcttccggtggtacattcctcttccagcgccacgggcgcttccatcggcaacagttccactctgcagatgcaacagtcacatgtctataaccccaagggcgatggtctagactcttcgtcatcgagccatttccatatgaagaaaccccgtattcaactaaatggcaatgcccataaccagatgaccagcaatggtagtcactttggcaatgactcggacgacgaatccgatgagaacagccatgatctgatggagccgcaggctatgatgcagcaggagaatcactacagcaattcgatgcccatgcagcggggcaatggaaatgggaataacagtagcagcaatagcgggagcaacaatcccagcggcaataatagccacaacaaccagcagcagcaacagcaccagaacatgtttccgtcaaacacggacttccttttccagttataccagcagttcccacatcaggccagcagttcgcatcccgcaaacttcgggaaattccaggcgccgcccaatcatccgggtgtgcagcggttgtctgagcatttgctgggagaattagtcaccacggaactgctgaaaatgaacaaggaacggaagaaaagtgcacagaaacggatcctagaaatactattcttcgacgattaa

SEQ ID NO: 17214 - protein, 506 aa, DROSOPHILA
MMDEQLIDEVAQHGVIYNRQKYYLNGGANGGKYETKDEAWQLIAMKLRTDVDTCKKRWKYLRERYVSQRKQGDPPVYEHLSRPYLEKMKFLDQHIQPRKSYRHVPNFLTSPQSANSSGYNEYQVDKSNGSMKNVSQFGSSGQSHLYHQPDQQHAMSALSNVAASALENVNGQVKIEADQVFRDFAAAVASQQLQHISQSQMQQQAAAVAAVMADSSQGYQDQYKDGSVGMNGAQNSAGSLTSTSSSMKSPLSSPLQGIGAGSHHPQQQTQQQQQQQQQQAQQQSPASEQQLPVVHSSSSATGASIGNSSTLQMQQSHVYNPKGDGLDSSSSSHFHMKKPRIQLNGNAHNQMTSNGSHFGNDSDDESDENSHDLMEPQAMMQQENHYSNSMPMQRGNGNGNNSSSNSGSNNPSGNNSHNNQQQQQHQNMFPSNTDFLFQLYQQFPHQASSSHPANFGKFQAPPNHPGVQRLSEHLLGELVTTELLKMNKERKKSAQKRILEILFFDD

SEQ ID NO: 17215 - DNA, 2819 bp, DROSOPHILA
atcccgctactgttgttggccattgggttctcctccgttatttcaatttccggtcaaccggagggcagaataattaatggcactacggtagatattgcccgtcatccatatctagtctcccttcgctatcgccgggataatgagtccagctatatgcacgaatgtgccggtgtcatcatctcggaacaggcattgatcaccagtgctcagtgcctctatggcttgcccgaggaaactaaacttgtggctgtggccggagcaaacacccgcaatggaaccgatggatttatttacccagtagccaattggacccatcatccgaactacgatcccgtgacagttgacaatgatataggtgtcctccttctggacacaaccctcgacctcacgctcctcggaataagctcaattggtatccgcccggagcgtcctgcagtgggtagacttgccactgtagccggatggggctaccgggaggagtggggcccctccagctacaaactggagcagaccgaagttccagtggttagctctgagcagtgcacacaaatctacggagctggcgaggttaccgagcggatgatttgcgcgggattcgtagttcaaggaggcagtgatgcctgccaaggcgacaccggtggccccctggtcatcgatggtcagctggtgggtctggtgtcctggggacgcggatgtgcccgacccaactaccccaccgtctactgctacgtggccagctttgtggattggatcgaggaaaccatagcagctgctggagtgcaataaacataggcattttcgcggcaatcgatacgctatctttaagtggttaccgtcggatagagctacctaatttaataataaaaccgtaatcaaacaaacaatatactacgttatcgtctgtattggtcatttcttacgtaattcgaagatataaaaggttttgagttgattgaggctagttacaagacgtttgaatagtatttttgccttaatattattacagaaagtcgattttgcccacactctctttatccgcaacggtctccaccagccaatcgagaacatccggtacggagcaatagactccgggatatttctcacgggcacagcccgttccccaggacacaatgcccaggagtgtgttgttgtagaccagcggaccaccggaatctccctggcatgcatcctttccacctccgttgactccggcgcaaagcatacgactggtcagcataatggaataggcgttcttgcagttcgagttgtccaccacattaacgctgacctcctgcaggacgtcggagatggttccgccttcgctggtggttccccagcccgtcacggtaacgggtgtatcatgatcgggccgctccttggccaactcaatcggctgcacggcgtcgttgaactcgaaatccccatccaggatcagaattgccgcatcgtagtcgttgttcagagtgcgatacttgggatgaatgatgatctcacggacttccaactcctgctgcggacccgtggggaaccagatgttcgaggaaccagccacaatggtaaggttttccgggccggacaaggtgtttacacaatgggcagcactgatgatctggtttgatctgtaaattgtgcctccgcatcggtgatttcctctatacctcatcgagatctgatgcggatattgggtgatgttcgtgtcctgtccaccgacaatgcgtccatcgagcttcggtatatgaacctcttcgttccggtatataggatctgccagggagcagcccactccgagcaccagaaacacaaccaaaatccgtgacattttcgagcaactgaacgcaaaagtagcgctatgtgtagatttatagaatactcgtatccttatctatcggctgtagattgggattggattgccgattacttggtaatctaatgatagttttcgtaatcaagaaacagacatgaacaatggctagtcataaatcttggccacaattctttctgccgtttttcccagattacgtttctgctcgatccatgagtggtgaacttgcaagttggttttggggtaagtcaataaacccatcattgattatctcgcttttctcgttcgaaatcaattgtatttactagctttcactaactatcgctatgtatgtatgtacatattttatgttggtggtttattaaatttagctctacccaaaagcaggctacatttgaattctttcctttttatataaaatatttattattttacataggtaaaacattagcgttaattgcttaaatctaagacatttacactgacactaacactaagattgcacatttccggcccaagactgctgacatttatcacaatacgcatccgttacgatactaaacgatatataatgttgattgattgcacttacatttcttagggcttgggttttcgattccttcttctattttgatatactgttggtacctgcactttgcgtattgtatgcagttccccagggtttcacgttcctaattactaaagattatcagctaacttagatgtattaaaattgcaccttgtggtttggcaagaatctctatgttattgcactgattgttgctattgcgtttcttaagtcttaaaaagtaagtctttcgtatattttccatattgcacgaccctagaaactatttatgcacttaagcatagcctaatctaactcttcctaatcatcttgtagagcacagagtgcgtttctatgctctctgcccccgactcccacatgtcctccgcgttggtctcctcgtccgtttccgaagatccacagcaggta

SEQ ID NO: 17216 - DNA, 819 bp, DROSOPHILA
atgtcacggattttggttgtgtttctggtgctcggagtgggctgctccctggcagatcctatataccggaacgaagaggttcatataccgaagctcgatggacgcattgtcggtggacaggacacgaacatcacccaatatccgcatcagatctcgatgaggtatagaggaaatcaccgatgcggaggcacaatttacagatcaaaccagatcatcagtgctgcccattgtgtaaacaccttgtccggcccggaaaaccttaccattgtggctggttcctcgaacatctggttccccacgggtccgcagcaggagttggaagtccgtgagatcatcattcatcccaagtatcgcactctgaacaacgactacgatgcggcaattctgatcctggatggggatttcgagttcaacgacgccgtgcagccgattgagttggccaaggagcggcccgatcatgatacacccgttaccgtgacgggctggggaaccaccagcgaaggcggaaccatctccgacgtcctgcaggaggtcagcgttaatgtggtggacaactcgaactgcaagaacgcctattccattatgctgaccagtcgtatgctttgcgccggagtcaacggaggtggaaaggatgcatgccagggagattccggtggtccgctggtctacaacaacacactcctgggcattgtgtcctggggaacgggctgtgcccgtgagaaatatcccggagtctattgctccgtaccggatgttctcgattggctggtggagaccgttgcggataaagagagtgtgggcaaaatcgactttctgtaa

SEQ ID NO: 17217 - protein, 272 aa, DROSOPHILA
MSRILVVFLVLGVGCSLADPIYRNEEVHIPKLDGRIVGGQDTNITQYPHQISMRYRGNHRCGGTIYRSNQIISAAHCVNTLSGPENLTIVAGSSNIWFPTGPQQELEVREIIIHPKYRTLNNDYDAAILILDGDFEFNDAVQPIELAKERPDHDTPVTVTGWGTTSEGGTISDVLQEVSVNVVDNSNCKNAYSIMLTSRMLCAGVNGGGKDACQGDSGGPLVYNNTLLGIVSWGTGCAREKYPGVYCSVPDVLDWLVETVADKESVGKIDFL

SEQ ID NO: 17218 - DNA, 5330 bp, DROSOPHILA
cgggggtgtggtgatggtggtggttaatcgctgagctcgccaccaccgccgaattgttgctggacaagcgggcaccgtcggtggtcatgttgttggccacatggtggtggtgttggtggctgtgctggtgcgagtgattggtgttggccgctgacgccgaaacggtcgctggaccctgggaaacagatcccactccacctgtcgctgccgcccccgaggccggcgtgggcgtggccgcagtgctattgctggtggccgaattcgaggacgttacaatgggcatcattgtgttagtgttggcgactggcgttgtcgttggtggcagtgacacaatgtttgcattggccgaatcatgctgctgctgctgctgttgctgctgctgatccttgaccgaatgcgaggatgtgctgatcgagttggtggcgtaggtggcggttgtgctggagacggcggccagtggtggcaccgcgtttgttgcgctcgatactggcgccgccggtgctgctacattggatgctgtgccattggacacgctatccgctggcagggcctcaggaactgactgcagtgtggtgcgcattgctgtcgacatatttttaaacagtccaatagggattcttagagattctgcacgtgagattcgagtattttcgggagtctttcaggtttcggtgcttaaaagtagtcaaatgcccaatgggtttctatcatccgtggtactccttcacatctgcaagaaataaatgcacgcaattagtatggatctaaacaaagcagactacttgtatctttcggcacctataatatgactggccattcacttgccattatcaaaaacgtagccaattaccggctccgattaccgacctcaagccataacactttagaggcacaataaaaaaaataatctcctttgtctgcttgagtttactggcttcgtccacacaaagtaatgcagaaaatcaagttgaccactcaatacgaaacactagaagcagattactcagacattacgagtgtaaattactattatccgttatccaaatattaaaattatgttttctaaaggcaaggatcttaaggtactttaatattaattagtcgtaatattatattgacgttattaaagctgcattgaaattaaacattacattttataacataagcaacaaaatcggaatcccaatgaatggggaatttaattattaaattactatcttaattaattcaaatattaatggaaagctgattacgcgaactaacttttacagtactatttttaggagtcttatggtatctttatagagatacgttttttacaaactaattactatattactatacctacaacatattttaaactaactaataatatttcaagagtaataatatttggcttatggggtttaccactgaactctacaaaaacaagttccgattgattttatttggtatatagtcgtcggtcaggaagtcgatgacactctcgatttcggccttcagctgaacgtcctgcagcatgcgcagttcctgccgcactcccggctccaaatcgtggcgggcgaggaggtcattgattttcttgttgtcgccggcaaccagggcaaccgctccagtgccgagtgcgggaatctccgaggggtgtagaccaatccaacgcagcgcaggtgtggttagtccttggctggaaaaactcatggacttcgagccatggcgatagactagcattatctcgacgccaaatggatcggcgtcaacgagaatgtaggccgccagttggttctcctcggtgagccgatggacaatcctccgggtacagcaatcggggtatccttttccagttataaggatgaagcgtcgttcaaaagtaccaaatacatttctggataagagactctcaaaaaccgactccttttcaacgattagcacaaattccgccagcgtttcgattcgatctatcttctcgggatccgtgggcaatgtcagaggtccaccatacaagctgctgtccagaacgtctccgttggtcatcagcagccttaagtcgcctgcaagagtaaccggatgagcagggagcctttgatcaggatttcgagataaactcacctgccaccaggcccttggaggcggccagtatgcccaagcttaggggggatgtcctcagcatacgacagacatctagcctggcttcggcaatcctggactgcgaccggactagcagaggattgtcatagtatagtccacggacggtgaaacttcctccgcggacttgcaatcggtgcacccgggagagcatgtaaatcagcacgcaaaagctatggcgacttccgcgattattatagctgactcgtcgatattccgagatcacgtttccggatgaatttcggggaacactaagagtggcattgccatgaaccaagttgctcagcaactcgagggcaattctttctatattctccgaaaattcatccattgttctagcaatttacttatattaggaacggattcttaacaacaaatatgtacgtcttcttgatttcgtactcttgcaatctacaaaatgaggttttttaatatccaaattaagagaaattaataataaatataattttacttgtgaataacagatttaaacttaattaagcggcatatattttaacaagaacttggttactaacgcttaaattttaaacaattacatttttgaattcctccaactttatgtatccttgctcccaatttccattagttctaaattcgcatgaattcttctgtttatgttcaatgatttgaaacattctctagaatacaaagtgtaagcacttttttggtctaatttaattgcatgggtggtgccacgcccccgggattttcttgttggttctttgaatgcctttgtcacaagcggaaaccccgcaggaaaatgagtgaaaactgtgggctaaaacgttgaaacacgcccaccgacctacgcacagtaatatttcataaatacgtaagcaattcgtggacttacatactatacgaaaatcaagtggtctttgcacttacttatatctgattttgtaaaagtttatcgcgtaaatcgttgcgtggaaacatttcgaggggggttataaataatttccgaaaggagcttgctggctaaaaatataccatcgaaatgaaaattccctttcggtgaaaacaactgttttttaaaaatttaagcacgcacactagttgcaaatgaagagagcgcgagggagagtgccataagtttatgtgaatttctttattcggtctttcattttttcttcttattttattattcttttttccttctttttcgtatgtgcagaaaagtgtactcgttattacaaagcacacatacaccgagtgtgggcgggcggggggttttcgctctcttttggggaagagaaagagagagactgacggaaaagagagagcgccaacgaatgggctaggaaaactgacgaacggaacgaaacggaatggcagcccaagtattgatttgctggttatggtgctgccacttcttgtacttaccaatgaaatacaatttccgattggcccaagaaaagctaaagctgaaaagctattagctctctcgctcagagaggagtcgctagctgatggtcgctgctgttgttgttgttgttgccatcgatgtaacgcatattattatttaatttctttcgattttcccagttccttttccgattccgtttacccgaaagtggttaggtttggaaaggctctgctttttaccgacttttaccgaacgaaaacgacgacacacacaacgaaatgcaaatgcaatacatagctttctcactcgctcactagctacctctcgaccgctctcactcgcacagcagcagtagcagcagctctttggttttcaatcagatttttctttcttatattttcttatcgcgatggttttttctttcgctttttttttaagaagaacggtcaccgatttttcacaaggattacgaacgcacccccactgctctccccagtcactgaaaagccacaataataacaacaacaacgacagtcttgttggcaacaaatggaaatattcgctatatgctctgcgctgctctgcccttcgcaaaactaatgtgtatccgcgatgggtaatgggtaacttgatattgatacgattactaatattattgatagccgattagccgacataagcggtggccgcaattggcaaacgacgattgtcccgctcccgcaacgcagttaaatattactattttcctccgtccacatccactttggcagcaacaaaagtatgtacgtctcggtctctcaaaaaaattcacattacgatacggcagccatattgtagcagtgttgccagctggacggtattcaaaaatactaaactttttctcctgttactacttatatactaaatatacagcaagctgtcatctaaaaaccgcgcccacagactgattgattaatgtgtaatttgaaataaccagctaaattttacattcgagaatggttagaggctacacaaccttatatacataattgtttattaagataatttaaattcataatatatttgttcaatattaacaacaacataaacaacatactttcaggggcaaatgtatgaatttttgaagtgccgtgccgactttggaaacggccactttgatttctacaccgcgccgttaaccaactggcagcactgcactaagagagcgtgttctgaaatctaagagaacaatataacattttttaaaagagaaaaacaaccaaaaagacaggtcactgttattattgaatttaacttgataatgaatattttcttataactgcacttaacttaacaaaataataaccatttttttgttttgcttttatttcaaaaaatatgtatttgtataataaacaatttatctagtttatgtgagtcacaaaagtttagttaacgataaaaacaaactttgaatgattgtcttcaatgaataaataacttagttaccaaagctttattctccctttaaaatcaagtagtatttatattaccttctaatcttactccctgactttcaattccctgaaaagttctatattgaaaaccacgaaacttagagctacacagattaaagaatgtctagctaaacactacttatttagtcgattataagtaaagggaggactaacctttagtagaataaagaagcttaaaaactgtaagtcaaaaataaattatttgataattaagttaagtcaaatttatataatttcccaactggcggtgatcttttccagaattttttctaagtttttct

SEQ ID NO: 17219 - DNA, 2276 bp, DROSOPHILA
agagaccgagacgtacatacttttgttgctgccaaagtggatgtggacggaggaaaatagtaatatttaactgcgttgcgggagcgggacaatcgtcgtttgccaattgcggccaccgcttatgtcggctaatcggctatcaataatattagtaatcgtatcaatatcaagttacccattacccatcgcggatacacattagttttgcgaagggcagagcagcgcagagcatatagcgaatatttccatttgttgccaacaagactgtcgttgttgttgttattattgtggcttttcagtgactggggagagcagtgggggtgcgttcgtaatccttgtgaaaaatcggtgaccgttcttcttaaaaaaaaagcgaaagaaaaaaccatcgcgataagaaaatataagaaagaaaaatctgattgaaaaccaaagagctgctgctactgctgctgtgcgagtgagagcggtcgagaggtagctagtgagcgagtgagaaagctatgtattgcatttgcatttcgttgtgtgtgtcgtcgttttcgttcggtaaaagtcggtaaaaagcagagcctttccaaacctaaccactttcgggtaaacggaatcggaaaaggaactgggaaaatcgaaagaaattaaataataatatgcgttacatcgatggcaacaacaacaacaacagcagcgaccatcagctagcgactcctctctgagcgagagagctaatagcttttcagctttagcttttcttgggccaatcggaaattgtatttcattgattgcaagagtacgaaatcaagaagacgtacatatttgttgttaagaatccgttcctaatataagtaaattgctagaacaatggatgaattttcggagaatatagaaagaattgccctcgagttgctgagcaacttggttcatggcaatgccactcttagtgttccccgaaattcatccggaaacgtgatctcggaatatcgacgagtcagctataataatcgcggaagtcgccatagcttttgcgtgctgatttacatgctctcccgggtgcaccgattgcaagtccgcggaggaagtttcaccgtccgtggactatactatgacaatcctctgctagtccggtcgcagtccaggattgccgaagccaggctagatgtctgtcgtatgctgaggacatcccccctaagcttgggcatactggccgcctccaagggcctggtggcaggcgacttaaggctgctgatgaccaacggagacgttctggacagcagcttgtatggtggacctctgacattgcccacggatcccgagaagatagatcgaatcgaaacgctggcggaatttgtgctaatcgttgaaaaggagtcggtttttgagagtctcttatccagaaatgtatttggtacttttgaacgacgcttcatccttataactggaaaaggataccccgattgctgtacccggaggattgtccatcggctcaccgaggagaaccaactggcggcctacattctcgttgacgccgatccatttggcgtcgagataatgctagtctatcgccatggctcgaagtccatgagtttttccagccaaggactaaccacacctgcgctgcgttggattggtctacacccctcggagattcccgcactcggcactggagcggttgccctggttgccggcgacaacaagaaaatcaatgacctcctcgcccgccacgatttggagccgggagtgcggcaggaactgcgcatgctgcaggacgttcagctgaaggccgaaatcgagagtgtcatcgacttcctgaccgacgactatataccaaataaaatcaatcggaacttgtttttgtagagttcagtggtaaaccccataagccaaatattattactcttgaaatattattagttagtttaaaatatgttgtaggtatagtaatatagtaattagtttgtaaaaaacgtatctctataaagataccataagactcctaaaaatagtactgtaaaagttagttcgcgtaatcagctttccattaatatttgaattaattaagatagtaatttaataattaaattccccattcattgggattccgattttgttgcttatgttataaaatgtaatgtttaatttcaatgcagctttaataacgtcaatataatattacgactaattaatattaaagtaccttaagatccttgcctttagaaaacataattttaatatttggataacggataatagtaatttacactcgtaatgtctgagta

SEQ ID NO: 17220 - protein, 331 aa, DROSOPHILA
MDEFSENIERIALELLSNLVHGNATLSVPRNSSGNVISEYRRVSYNNRGSRHSFCVLIYMLSRVHRLQVRGGSFTVRGLYYDNPLLVRSQSRIAEARLDVCRMLRTSPLSLGILAASKGLVAGDLRLLMTNGDVLDSSLYGGPLTLPTDPEKIDRIETLAEFVLIVEKESVFESLLSRNVFGTFERRFILITGKGYPDCCTRRIVHRLTEENQLAAYILVDADPFGVEIMLVYRHGSKSMSFSSQGLTTPALRWIGLHPSEIPALGTGAVALVAGDNKKINDLLARHDLEPGVRQELRMLQDVQLKAEIESVIDFLTDDYIPNKINRNLFL

SEQ ID NO: 17221 - DNA, 1532 bp, DROSOPHILA
ctcgttgagaggccaaaggtcagtggtgtggacagacgaagcacggcaatgtcgtagtgcaggaagcgggaatcaaactgctcgtggactttgtacgccgccacaggaaccaatgtgccgccgtagttgtgattctgtgcacccacacgcaccttcatcagcgtcacggatctctcatgtagacagtgtccggctgtgatgatgatctccttgctatagatgactccgccgcactcgtggcgcgcactgatctgaatagacacctgccagggggcgttacgaatcagctgatcgcttccgccaataattcgtccagtggcctcgacatctgacgcatcgccgagcagcaaaaggaccagcaccgtagccactattccgtaaacagccattccgaaagccaagtgcaaactgctcgtatttgtccacgaaaccccttcatggcgtgctttttactagggctgtaaaagttaatcttcggctaattgatggcttatcgttagtatatattactgatacccttgattggtcttggtcagcactgctccttacccggttctctagttcgatatgaaaacacgttgcccaggcaactattgccaaacaaatttatttagatgttgtgaatatcgaaaaaaggacttttgagagataataccgacatggataactggaagataaccgcggaggagcttatccgtctgcgggagagctgcttgcagtgcatccgtgatggagaactctatgaactgcgcaacgatgccaaacttagggctgtttatagcactcagaactacgaagaattcaagtaagcaatacaaataaacatgtctcaaattgaaaaatgcatgtaagccaattgccatcaggaacatagtggatgcggctcatcttcgtccagtgaccaagggcgacaaggcgaattttaagacgaagaatcgactatggaactcggcggcccgggattaatttgttaattgcgcaataaaaataaaagaccaagtttatagtcagaatatacgttttatttcgcacactttttaggcattgctaataacccaggagcggagggcagcaacatcggcatagacaccggggtagttggagtaagcgcatccgtatccccaggagacaacaccgacgaggactccgccggagaccagtgggccaccggagtcaccctggcaggcatccttgccgctggcagcagcgcagatcatggtgctgcggatctggctaccgtatccgtaggtggaggaagcacactggctctggctaacgatgttcacgttcacgtactgcagctgggaggggatggagctggatccgtaggagagagtgccccatccggagacggaggccgcagcgccgttggcggggttggagctagccagaccgatggccttgatggtggagctgaaggtcagggcgccgttgatcttgatgatggcaatgtcgttgaccatggtgttggcgttgtagccctcgtggttcttgaaggaggacacagagaaggtgacaccgccggagctcca

SEQ ID NO: 17222 - DNA, 532 bp, DROSOPHILA
tggagctccggcggtgtcaccttctctgtgtcctccttcaagaaccacgagggctacaacgccaacaccatggtcaacgacattgccatcatcaagatcaacggcgccctgaccttcagctccaccatcaaggccatcggtctggctagctccaaccccgccaacggcgctgcggcctccgtctccggatggggcactctctcctacggatccagctccatcccctcccagctgcagtacgtgaacgtgaacatcgttagccagagccagtgtgcttcctccacctacggatacggtagccagatccgcagcaccatgatctgcgctgctgccagcggcaaggatgcctgccagggtgactccggtggcccactggtctccggcggagtcctcgtcggtgttgtctcctggggatacggatgcgcttactccaactaccccggtgtctatgccgatgttgctgccctccgctcctgggttattagcaatgcctaaaaagtgtgcgaaataaaacgtatattctgactataaa

SEQ ID NO: 17223 - protein, 141 aa, DROSOPHILA
MVNDIAIIKINGALTFSSTIKAIGLASSNPANGAAASVSGWGTLSYGSSSIPSQLQYVNVNIVSQSQCASSTYGYGSQIRSTMICAAASGKDACQGDSGGPLVSGGVLVGVVSWGYGCAYSNYPGVYADVAALRSWVISNA

SEQ ID NO: 17224 - DNA, 3284 bp, DROSOPHILA
tattggtattctggggtcattgcatgccaaagtaaacttcatcattagatgtgatttattttgaattcaaaatcaattcgctttgttcttttgttgagatgcctccctctatttcacaatgtttgccataaaacccacactctcactaagctatctgagtttgctggaaaacaaaactggtaagtagtacgcagttaaggcacttatataatataatttaaattccgcgagtatagtaaatcttttcgttgtgtttttagatatccagatagattgtttaagatttatttatactatgtgaatggaataaacctaccttaaccaccatttttcgctgaaacttttgcccgtcgtattcaaaattaatggttgtccggtagcaaaaagttagcataaaggcctccgagtggccaattacatcaatgtcgatgtcccccacatggaatgtggtcaccttggactcgctgtagttgtccaccaggcgcccgttcctcagaattgacggaagaaccgtgtatctcagccattgcctctcagcctcgatcttctccatttcgtcggtactgacgatcccaaccgcttcgcttgtggatagcgaatgagcataaaccatttcatatagctcattttgtactactctccaaaagctcattcgttgttagagattacacgataagagcgaattggaaatgaaaagctttctaatcattaaaagcactttatggtttatagagaagcagtacctacctaatgattagcatgatgcaatttggcatgttaaaatgatatgataagatatcatgacgcaaagatagggggatacgctatttattagttttaattagttttttttttttgtttattgtgtgcaaagtttaatgattcctttggattaagttctattttccataatcacaggtatcgatatatttttagtcaaaatttccagttttagaaaaagctatcctaccgttgcagttcgactatcgaccaactaccaatgggcctcaactggtatttactcaaaacgaccgggtcaatgaccagggccaacacctacgttcgaaagttcacgaatggatcgcagcaaagtcgagatatcagcatgccatccaaagtgccaaagaggacaagtgcttcgatcaggatcacggatttggataacatgtcatatatgtcctcttcttcgcgaaaaggcaaaataacgagcggccgacacgatcagttgaaaatgtcgaagaatgctcaacacgacgatgtcgtctgtccaatgcaagcgagtaggaagcccatcgaggagcccactgttcgggattcgccacaaatgcgcgagttcttcgaggaagtgcgtcagcgaaagctcaaggattactatcttcagatgaaggctgcacaaagaaatccagcgatgtcccatgtgtgtccggattgtggttttgtgaagcgggataagaaggatctcagcaaaaacatttactgcacgggggataaacgattgaggataaaagattgtgatcggcatggggatctcacctggctgtggaactcctccgctgcatatcctcactctgcacttagttgtggatgcagcagaggtgtctccagccacttggaaactttaatcaagctgcacaatataaaatgtttaatttaaaatttgtaatttttgatatctagttgccaaggagtttgctgataatacatctgtttttctccgatatttagtttcattctgcaatccaaatcgttcgtacctttccgatttgaaccccactctttccacaatgttttccgatcccgcccaggagtcggttgccacgcagacggaggcacaaccggttccgtcgcccatctgcaccccactgctgatggtggacgaggatggacgaaagcggtactgctaccatggtggaaaatgcaagtgtgccacttgcgcacaaattcgtgcagagcaggcagtgaaactcgaccaggagctgctgtcctacataccgcactcgaagctccacctggaagttccaatccgaatggccaagccgaagcagtatcgcctggaagctcgacgggctactcccgaactggcaaaatttctgcgggaggatcacgagaggctgagggcggagtatccatcgtactatctcccggatcgatactttggtaagaaattctacgagttgccaggaccgcagcacaaggagacccagacggacattccgattgggcgttacggcatcgatggttgtccctgtaccaataaatcgctctgctatgacttgtaatcctgggcaggactcaattggggaaaaaagagtttaataaaagttcggaatgtgagaagtatttgcatgtttttcaataaatcactatagttaatttccccgactatcacatacccattactcagctagtaggtgtgcaaattaaatttaatgtaaataaattgattatcacttatgataatagttatgatactcctatttcttgggtaatttggaatagaaatcctccaggaaatcctttaatatcaacttgaacttttcgccgtgcttggccaatagcaacttggcctcactgtcctcattgtccagcatctcatccgcttcctccagcacctgaaggtaatgcagccaagccgtttccaatcccataacctgctcaaatgtttcctcgctaagcttcacctggtatttgtgcagcagaacgaagagttccagcatcggagtaaatgcggactgcttcactggcacatccttcaggagtttttcaaagagctgtttggcagccaccgtttcacggatggtacgaggaaccttcatcacattacgctcgttgcgtcgcatatatcggtaaacagctaaaattacataaaatatagattagatcctagttcaatgtcttagctacataacttctcagaattataagtatgttgttaagaggtacatacctcccatcaaattgctaccatgatccagcagcattttaatatttagagcctgccacttctcgatccaatccagcatagtgctcttcagtgcattctgattgatcaggataaagtaaacgttagtgatggcatcctcgaagatgacatcgtccgccagggcactgtagtgttcaattccgccttcaaagacgccagccgttcgagacttagacataaggcgttgccggaattcctcctctgtcgtttgccaaagaacacgattcttattccactccgattcgtacttagctagttcctcccgctgaatgccaatctccgcttgaatgcttctcatcaa

SEQ ID NO: 17225 - DNA, 1154 bp, DROSOPHILA
atgggcctcaactggtatttactcaaaacgaccgggtcaatgaccagggccaacacctacgttcgaaagttcacgaatggatcgcagcaaagtcgagatatcagcatgccatccaaagtgccaaagaggacaagtgcttcgatcaggatcacggatttggataacatgtcatatatgtcctcttcttcgcgaaaaggcaaaataacgagcggccgacacgatcagttgaaaatgtcgaagaatgctcaacacgacgatgtcgtctgtccaatgcaagcgagtaggaagcccatcgaggagcccactgttcgggattcgccacaaatgcgcgagttcttcgaggaagtgcgtcagcgaaagctcaaggattactatcttcagatgaaggctgcacaaagaaatccagcgatgtcccatgtgtgtccggattgtggttttgtgaagcgggataagaaggatctcagcaaaaacatttactgcacgggggataaacgattgaggataaaagattgtgatcggcatggggatctcacctggctgtggaactcctccgctgcatatcctcactctgcacttagttgtggatgcagcagagtttcattctgcaatccaaatcgttcgtacctttccgatttgaaccccactctttccacaatgttttccgatcccgcccaggagtcggttgccacgcagacggaggcacaaccggttccgtcgcccatctgcaccccactgctgatggtggacgaggatggacgaaagcggtactgctaccatggtggaaaatgcaagtgtgccacttgcgcacaaattcgtgcagagcaggcagtgaaactcgaccaggagctgctgtcctacataccgcactcgaagctccacctggaagttccaatccgaatggccaagccgaagcagtatcgcctggaagctcgacgggctactcccgaactggcaaaatttctgcgggaggatcacgagaggctgagggcggagtatccatcgtactatctcccggatcgatactttggtaagaaattctacgagttgccaggaccgcagcacaaggagacccagacggacattccgattgggcgttacggcatcgatggttgtccctgtaccaataaatcgctctgctatgacttgtaatcctg

SEQ ID NO: 17226 - protein, 382 aa, DROSOPHILA
MGLNWYLLKTTGSMTRANTYVRKFTNGSQQSRDISMPSKVPKRTSASIRITDLDNMSYMSSSSRKGKITSGRHDQLKMSKNAQHDDVVCPMQASRKPIEEPTVRDSPQMREFFEEVRQRKLKDYYLQMKAAQRNPAMSHVCPDCGFVKRDKKDLSKNIYCTGDKRLRIKDCDRHGDLTWLWNSSAAYPHSALSCGCSRVSFCNPNRSYLSDLNPTLSTMFSDPAQESVATQTEAQPVPSPICTPLLMVDEDGRKRYCYHGGKCKCATCAQIRAEQAVKLDQELLSYIPHSKLHLEVPIRMAKPKQYRLEARRATPELAKFLREDHERLRAEYPSYYLPDRYFGKKFYELPGPQHKETQTDIPIGRYGIDGCPCTNKSLCYDL

SEQ ID NO: 17227 - DNA, 2759 bp, DROSOPHILA
aaacacggcttgaatcggctactgtggccaagcctcatttgttgccaaccctatatgtttttgttatttaattatagtgaaggctggtggcatgcgaattgtgcagcacaaagcgccgacggcagaacgcgcgcccaaggatgcagaggattgtactggactgacagtgagctattgacataagtatgtggttttcaatggaaactaacttatcctctaatcctttaaagcaacccattgccgtgaactccggctctgtgagcggtgcccccgtcaagggcaacacggactttacgcccgcctccgcccaggtggcccactcgcccaagccaccggctgcagtgcagcagaagccccagatccacatccagcagccacggaagtgatgcgtactcgggcggaataactattatcattatctaatctctttgatcttttgttgaaattctatgagtcctctcaatggtattgaaatcgcctttgaatgcgatatttactctttaattttatatatgcatttgccactgcattccataaattaaaaatgctgattttctgagttaatattttgtaataaactttatcccttttatagatttcaagacattcgtttcgaatgcgtatatcttaaatttttacctaaaccaactcgtggtgttcctggtgagcttggatgcgataaaacattgaccaaagaagacatataacactatacatgaaattcgtgatttccgatgttatctatattgccctcagatctactggaatttgctctacacgtactcttaaaattcccaagtgcttattcagcacaacgtgtatataattagggaaactctagcacactaaatgccccactgaacttcggtggtccggggtgcggacttcaaatccgtagtcgatttgcgtcgaagtggttcgattccacctggggggcgaatattaatggagttgcattcttaaacttttttaagcatggtctttattttccaaaatctgttcatatggcattggccgccttgactatccaaggtcgcagaatcgccacatcggcatagacaccggggtagttgtcgtccgcacaccggtaaccccaggatacaatgcccaccagctggctactggccaccaaaggacctccagagtctcccgtacaggcatctgcatcagtgctggcagcgcaaattgtttcctcgcccacaaaatccgcaccgtagccaaacttttgcgaggcacactctccgcgatcgatgatctgcaactgggccttctgcaagctatcggagagggctccattatcagtgtggccccaacccgtgacagtgactgttgttccacccgatggactcgtactggctaaattgatggctctcgttgagaggccaaaggtcagtggtgtggacagacgaagcacggcaatgtcgtagtgcaggaagcgggaatcaaactgctcgtggactttgtacgccgccacaggaaccaatgtgccgccgtagttgtgattctgtgcacccacacgcaccttcatcagcgtcacggatctctcatgtagacagtgtccggctgtgatgatgatctccttgctatagatgactccgccgcactcgtggcgcgcactgatctgaatagacacctgccagggggcgttacgaatcagctgatcgcttccgccaataattcgtccagtggcctcgacatctgacgcatcgccgagcagcaaaaggaccagcaccgtagccactattccgtaaacagccattccgaaagccaagtgcaaactgctcgtatttgtccacgaaaccccttcatggcgtgctttttactagggctgtaaaagttaatcttcggctaattgatggcttatcgttagtatatattactgatacccttgattggtcttggtcagcactgctccttacccggttctctagttcgatatgaaaacacgttgcccaggcaactattgccaaacaaatttatttagatgttgtgaatatcgaaaaaaggacttttgagagataataccgacatggataactggaagataaccgcggaggagcttatccgtctgcgggagagctgcttgcagtgcatccgtgatggagaactctatgaactgcgcaacgatgccaaacttagggctgtttatagcactcagaactacgaagaattcaagtaagcaatacaaataaacatgtctcaaattgaaaaatgcatgtaagccaattgccatcaggaacatagtggatgcggctcatcttcgtccagtgaccaagggcgacaaggcgaattttaagacgaagaatcgactatggaactcggcggcccgggattaatttgttaattgcgcaataaaaataaaagaccaagtttatagtcagaatatacgttttatttcgcacactttttaggcattgctaataacccaggagcggagggcagcaacatcggcatagacaccggggtagttggagtaagcgcatccgtatccccaggagacaacaccgacgaggactccgccggagaccagtgggccaccggagtcaccctggcaggcatccttgccgctggcagcagcgcagatcatggtgctgcggatctggctaccgtatccgtaggtggaggaagcacactggctctggctaacgatgttcacgttcacgtactgcagctgggaggggatggagctggatccgtaggagagagtgccccatccggagacggaggccgcagcgccgttggcggggttggagctagcc

SEQ ID NO: 17228 - DNA, 759 bp, DROSOPHILA
atggctgtttacggaatagtggctacggtgctggtccttttgctgctcggcgatgcgtcagatgtcgaggccactggacgaattattggcggaagcgatcagctgattcgtaacgccccctggcaggtgtctattcagatcagtgcgcgccacgagtgcggcggagtcatctatagcaaggagatcatcatcacagccggacactgtctacatgagagatccgtgacgctgatgaaggtgcgtgtgggtgcacagaatcacaactacggcggcacattggttcctgtggcggcgtacaaagtccacgagcagtttgattcccgcttcctgcactacgacattgccgtgcttcgtctgtccacaccactgacctttggcctctcaacgagagccatcaatttagccagtacgagtccatcgggtggaacaacagtcactgtcacgggttggggccacactgataatggagccctctccgatagcttgcagaaggcccagttgcagatcatcgatcgcggagagtgtgcctcgcaaaagtttggctacggtgcggattttgtgggcgaggaaacaatttgcgctgccagcactgatgcagatgcctgtacgggagactctggaggtcctttggtggccagtagccagctggtgggcattgtatcctggggttaccggtgtgcggacgacaactaccccggtgtctatgccgatgtggcgattctgcgaccttggatagtcaaggcggccaatgccatatga

SEQ ID NO: 17229 - protein, 252 aa, DROSOPHILA
MAVYGIVATVLVLLLLGDASDVEATGRIIGGSDQLIRNAPWQVSIQISARHECGGVIYSKEIIITAGHCLHERSVTLMKVRVGAQNHNYGGTLVPVAAYKVHEQFDSRFLHYDIAVLRLSTPLTFGLSTRAINLASTSPSGGTTVTVTGWGHTDNGALSDSLQKAQLQIIDRGECASQKFGYGADFVGEETICAASTDADACTGDSGGPLVASSQLVGIVSWGYRCADDNYPGVYADVAILRPWIVKAANAI

SEQ ID NO: 17230 - DNA, 3107 bp, DROSOPHILA
gcggcgaaagtaactcagatccgagacacacatggagggcatgcccaagcaggcggctagggcatccctgtcgtagtaaatggttagcaggggctcgtgaacctccagtagccagccgcggatgatgtccagagttccctcctgccagtccctgtgatccaagcagctcaacacactcatccgctgaatgtagcccaccagttggttcagttcctcgtcgctatacgatggctttggggtctccggacggatctcctcctgacgaggttccacgctgcgctctgggttccaggattaaaagaagttctaggggaaatagtgacacaaactcaccctcatcgtcggttaaatcggaatccgttagatgctcatcttctacagcgctggaggaggccatttcaccgagtttttactcaccaaaattacagaaaacttaacaaaaatccatggcaaccggaagccggcctttccgttacttttagttcgcgctaaacaagtgcttcattttctaagtgcatttccggtgggcttttcaaaaacataatgactattgcagtttaaaaatacatttacaatgattcttttttgtcttaaaaatgtttattctaaaaatgtagaaatgtaaaaactcttctacatcattttacatagccactattatctaatgtcgaactaaaagtatgaaatggaatcttaagcgatttttagggtagcaagccttggtcacaccaatctgcccgaaaacggcgctttatttaaaaacaagagagaattctatagttaagtgcatcgactatcagatacccgttactcagctgaaaaatagcaataaaaatttcattcttttacactaatttaggaactcggacttaggaataggatctcaaaatatttgtgtatacagttgtgggggcaatttgtgtcacttgcttacttagcagatacattcctaggattcatctttaaaataatgctaagatgcccgaaagtgactcagtcgatgctggccaggatcagcgtccgccacttcgcagacgagatccacggcagtgtgcgagcggcctacgcaaaaggagacgctcgagctgatccggtcaatgtgctgcccaagtccaagtacggtggaatcaatacggtctctctggtcacgggcaccaccatcattggccagcagggagcccaattcgtgtcatccctgctttcgagcagccgcgtccctgtggaggtccaagtcatcgaagctggccaagatgacgagtacttccactcggtgctccggaacagaaccgccgttcatgtggacaatcaggcggacgcggaagccaagcagaaggcgctcaagatctgcaatgatctggacttgtacgtcttcaagacccggacacgcagctttcccggcttcaagtgccgctttccgggcgtggacatccagttaatcggtcagaacaacatgggtatcttcaacgaactggaatattcacccgtggagggagtggtggaggccctgtccgtcgtctcccaaaaaggcaatgacaagtatctgcggtacgcctttaaggcggctgcaaaggcgggccggaaacgggtgacgctgatcaacaaggccaaggagtggcccattagcgatggctcactggtggaagccgcacagcgcttgcactgccactacaaggattgcctggagctggagctcatggaggtggaggaggccatcagccggctgatgacggagcccacctacttcgattgcctcttcgccagcgaacgctatgccacattcctatccgccatctgcagtggagtctgtggcggggctaatctcttcagtgcggtggagatcggagatcaccatgccgttttcaaaccgctccagacgaaactatcgctgaccaattatgccaatctaagtgcatacggcatcgtgtccaccattgtggatctcttccagcatctgggccacgataagtgcgccgatgcactgtggtgcgagctgaagcgcaccatggacgaaggcattcgcaccaaggagttcggtggccaggataccggcgagtatgtcatttgcaacatcatcaaccagctgcgatgccgagcattgggtaaataaagatcctgccataaaatatatgatattggggaaaaaaaactctcattaaattgtctgtgaccattatttttccaaaataaaaaccaactatttttagtttttctcgaaatatttttttatcaacacataacaatttattagcttacaacgaacaataattttaaggaaagttgtcagtagttgcgatatttttgggagctcttcagctaaagtttaagattaaaagaatgattagattgtaatataagaaactgaaaataagaataagtctgatgcattggaaaacgtatcaaaaagtagtagtagtattttatttaaattgttctagtaaaactaaaatttttaataggcttgtccaaatgcatcagaaatacgtggtgcccgagtatcggaaagtggactttagcatccgtaaccacacctgctcatcctccgagcgcagcctgctctcgctcatcttcatcttccagttttccgaataggtcaccagctccaccaccgtcttgaatgtgacacttttcgatggtttaacgcctttcaggagttttgccttctctttattgctgggatacttcatgtaatcgtattcaaccgactgatccgctacctcatcgatgatatcctttttgaactcgaccttctgagttcctggatgtttgtccagcttcttgggttttaggcgctgttttactgggctgtccatgttcagaggggaatttggtatgattttgttgctcagctatcaaaaatgtatcaaaacatgaattgtacttgctcaaaactcaaattcgaagtgcctgctgcgggtgtgtgtaatataacatgatgtcctcccatttgcacgtacaatttgaatggatttatgttccaagccggaggctgtaaacaactacataaataccgaagcaggactatcctatgaaatggatgggggctactccccaaataaaaaggagcatatttgcaggcgccaaaaacaaaagccccaacacacaattgc

SEQ ID NO: 17231 - DNA, 1107 bp, DROSOPHILA
atgctggccaggatcagcgtccgccacttcgcagacgagatccacggcagtgtgcgagcggcctacgcaaaaggagacgctcgagctgatccggtcaatgtgctgcccaagtccaagtacggtggaatcaatacggtctctctggtcacgggcaccaccatcattggccagcagggagcccaattcgtgtcatccctgctttcgagcagccgcgtccctgtggaggtccaagtcatcgaagctggccaagatgacgagtacttccactcggtgctccggaacagaaccgccgttcatgtggacaatcaggcggacgcggaagccaagcagaaggcgctcaagatctgcaatgatctggacttgtacgtcttcaagacccggacacgcagctttcccggcttcaagtgccgctttccgggcgtggacatccagttaatcggtcagaacaacatgggtatcttcaacgaactggaatattcacccgtggagggagtggtggaggccctgtccgtcgtctcccaaaaaggcaatgacaagtatctgcggtacgcctttaaggcggctgcaaaggcgggccggaaacgggtgacgctgatcaacaaggccaaggagtggcccattagcgatggctcactggtggaagccgcacagcgcttgcactgccactacaaggattgcctggagctggagctcatggaggtggaggaggccatcagccggctgatgacggagcccacctacttcgattgcctcttcgccagcgaacgctatgccacattcctatccgccatctgcagtggagtctgtggcggggctaatctcttcagtgcggtggagatcggagatcaccatgccgttttcaaaccgctccagacgaaactatcgctgaccaattatgccaatctaagtgcatacggcatcgtgtccaccattgtggatctcttccagcatctgggccacgataagtgcgccgatgcactgtggtgcgagctgaagcgcaccatggacgaaggcattcgcaccaaggagttcggtggccaggataccggcgagtatgtcatttgcaacatcatcaaccagctgcgatgccgagcattgggtaaataa

SEQ ID NO: 17232 - protein, 368 aa, DROSOPHILA
MLARISVRHFADEIHGSVRAAYAKGDARADPVNVLPKSKYGGINTVSLVTGTTIIGQQGAQFVSSLLSSSRVPVEVQVIEAGQDDEYFHSVLRNRTAVHVDNQADAEAKQKALKICNDLDLYVFKTRTRSFPGFKCRFPGVDIQLIGQNNMGIFNELEYSPVEGVVEALSVVSQKGNDKYLRYAFKAAAKAGRKRVTLINKAKEWPISDGSLVEAAQRLHCHYKDCLELELMEVEEAISRLMTEPTYFDCLFASERYATFLSAICSGVCGGANLFSAVEIGDHHAVFKPLQTKLSLTNYANLSAYGIVSTIVDLFQHLGHDKCADALWCELKRTMDEGIRTKEFGGQDTGEYVICNIINQLRCRALGK

SEQ ID NO: 17233 - DNA, 3182 bp, DROSOPHILA
agatgcgaaatgcaagtttctgcatacggaaataaggtcacccacctctcgcagaagtaaatacccataggtgctagtaatgaccactttgtaggtgtgtatggccacgtgcagcaacatgtacacgtactcgggatcccagggctctctctccagcagcttttggcagataacgtacacgaagcaggtcatgatagtgaaatcataaaagataccagcagctgcggcgaatccaaaaactccgtttaactccgccaggagaaacgaacagcgcttggacatttcgaaaagataagcaatcctttcgtgcacctctgaactgtcatccgcttggtaaagttggtgaagcagctgctgcaccagacgcagacgaacccttataaagtccataatacctatgtgcacgaaacccagcaatcctacggaactggtcagcaaggtgtaggtgaaggccatcagcaaggtggacggtatgccgcatgtgcaacgcgtcgtatcgaagatcagtgagatggaaaaggagaaaaagcaaaagccgacaatcacagtgccataccaatacttcaagcgagcgcgtcgatagttccactgaacatgagggaacaccatcaaaacggaacgatcgaactcttgcatcctagccacgagtttcaggtgtctgtccttctgcaagtccagcgaaaggcagtactcaatgtaggtgaccgagcaactgaggcactcccaggtgaatattgccttgaccaacgggctaaggtgtccaaacatggcagcggacatctcgggatccctcagcttagtcatcacggtagccataaagcagataaccataaaggagcgcgtgaaaagggcatagcacacagtccacctgtttgaaaacgcacctccacgatcaggacttctcacccggattgtgaccaatccccagtagagcaggaggctgtacaagtttccgtaacagtagacaaagccatcgtcgcgttgcattgcccaagtaatgttagtttcgactggccaagccgtatagagctatttattcccgcgcaggggtaattattattgattacacatagatatgatcggactaattgaatacatcgttttggccgcctctacatgtctgtttgttatacatattgaaattcatctttaaacaaatgtgaactgtcgtgctttactacgtgaatttgagttcgcggtggtgctggtggcggtgctgtttgagttgggtgcagtgcggcgcagagtcttttgcagtacatgagcgtccgccggctcgatgcgcttatagtattgctccttggtgtcaacaatctcgaaaccaaacttcttatagaactcgatggctccgttgttgttgatttgcacatgtctaaaattataaccagaattaaaaaacatgatctaaagtattttcgaaataaacctatttcctccttagccaaaaatatatatattatgtattaaatggatagataaataagccagataggccggaattaaactttcccacttaaatagttataggttacattaaaatcgaactacattgctccccaggggtgtgtcgaaaacacacgaatcttaatgataagttttcttacagaaaaatgctgtcgaagtttccgtccttctcggcgaagttcataatgtgctcgaacataactgtgccgatgcccaggcgccggtacggggagaggcatcctagggtcatgatatacaggcgccgctggttctcagtgttgtcgatgcgacaacagacggcgcccactacaatgtcgttgtagtaggccaatttggccagttcgccggcctccaggacgtccacgtaaaacttgtcattgtaggagaccgggaaaaccacggtgttgagcttctttagctgcttgatgttgtggggcgtcacgtcgcccagttcgatgctgctcctgcaagcgggaaagggtaggaacatgggttagcttttccgacccaagcggcacttttaggttatgattccggtgcatctcctgcagtcacaatcctccaatggtccggcaaagatagccactcacctagtcatgttgtctgtacgatttctgttgatttagcaacgcgctttgcgccgaaaattgtaataggaaaatgtgttttaagcgcctcagctgttcctgattgttcgggttgcaggtcgcaagttatcgttatcggttattgacgccggccagaatagctattttatagcaagataaatttgattttcatatctaagactactaactaaacttttttgctcacactattttaagcaataaacaaaaactaataattaattaaaacagaactaaaaacactcaatgctaaatgaaacattacacatcgttttttatttgggatacgcatacactaaatgagatgacagctctttccggtcggttgacattagctatcacttgtttgacagttagaatatgaacgaacactttcaataatggccaacttttaatttcaaaacatattgttacctctactttttcgtagtgagttatgctatagatacacttttatgtatgtaacaatatgaaatattgggtagtccttgtttctaaactagttttttttaaagaattttttaaatttacagtacaacttttgtattttttagcaactcttagttatatttatattatattcgatattcgccatgggtacgcgaacgcaaatgtgagaaatctcctaacgggtttttcttcacaaaaagaaaacaattcgcggctgttcaatatttttctcccccaatatccatcgatttcgagtgccaaatgaatcccaacatgaacatgatgcccatgtctgggccacaaatgatgcaggtaatgcaatcctcgccatcgggacccccaggaccagtgcagcatcaacagcagcagcctccacagccactgcagcagcagcagcaggccgaaaaattggacaacatttccagggtgaagagtttgctgggaccactgcgggagtccatgttcctcaccatccggtcgagcgccttcgcgctgcagcaaaacaatctcgcggacaacttaaagagggacacgggtgcccaccatgttccgcggttcgacaagcacttggaagacttttacgcctgttgcgaccagatcgagatccacttgaagacggcgatgcagtgcctccagcagcag

SEQ ID NO: 17234 - DNA, 824 bp, DROSOPHILA
gataacttgcgacctgcaacccgaacaatcaggaacagctgaggcgcttaaaacacattttcctattacaattttcggcgcaaagcgcgttgctaaatcaacagaaatcgtacagacaacatgactaggagcagcatcgaactgggcgacgtgacgccccacaacatcaagcagctaaagaagctcaacaccgtggttttcccggtctcctacaatgacaagttttacgtggacgtcctggaggccggcgaactggccaaattggcctactacaacgacattgtagtgggcgccgtctgttgtcgcatcgacaacactgagaaccagcggcgcctgtatatcatgaccctaggatgcctctccccgtaccggcgcctgggcatcggcacagttatgttcgagcacattatgaacttcgccgagaaggacggaaacttcgacagcatttttctacatgtgcaaatcaacaacaacggagccatcgagttctataagaagtttggtttcgagattgttgacaccaaggagcaatactataagcgcatcgagccggcggacgctcatgtactgcaaaagactctgcgccgcactgcacccaactcaaacagcaccgccaccagcaccaccgcgaactcaaattcacgtagtaaagcacgacagttcacatttgtttaaagatgaatttcaatatgtataacaaacagacatgtagaggcggccaaaacgatgtattcaattagtccgatcatatctatgtgtaatcaataataattacccctgcgcgggaataaatagctctatacggcttggccagtcgaaactaa

SEQ ID NO: 17235 - protein, 184 aa, DROSOPHILA
MTRSSIELGDVTPHNIKQLKKLNTVVFPVSYNDKFYVDVLEAGELAKLAYYNDIVVGAVCCRIDNTENQRRLYIMTLGCLSPYRRLGIGTVMFEHIMNFAEKDGNFDSIFLHVQINNNGAIEFYKKFGFEIVDTKEQYYKRIEPADAHVLQKTLRRTAPNSNSTATSTTANSNSRSKARQFTFV

SEQ ID NO: 17236 - DNA, 4292 bp, DROSOPHILA
acctcagggatacctcccgtttcttccacaaacccctggatctggaacaatggcaatccggcagtaaaatgttatctgcgaaatcaacaggaatacagaagtgattgttatggtatgtgtggtaaatgcatcaaatgcatcatttatgtaattttcaaattgcaggagtgggttggcatccgacgacaatttgttaccgctgctgctactatgatcaaaacagaatcgccggatgcagtaaaattcaccgaggacggtgttcgtggtacgattatgctcgatggatatcaccgaatttctatgtctattaaataataacattaaaaggtggcgtaacattgaaattatatatgaactgtacatttctgtaataaaacaattgttatccgttgggtgtcgaacaaagaaaaggttttagtaatttactctcgaaaacttaagacaaagttaaaaaaaaaggtttaaatgcatttttatacatgttaattaatgttgaaatattgtttaaaatgctatgaaatattaattactacatacataaataaaaccaatttcacaataggttttcacaagaattgttatagcgtaggaacgttacaagtcgcttatatactttttatagttagctaagacactaaccatgacaaaaacttggtttgtccaccaaactccagatggctccaaaaaatagctctagacttattcggaaattgacttgaatcgattcaacgtttaatgaaattatgaatgtttgcattttcacaagctgtaaaattagaaactattagagaagatttcccactttcttctatttgcacaataggcctagggtgatatggaatttttcccatctgcatattaacttgagtaacactccttaaataaacaataatgtcctcagatgggaatctgtttttttacagcatttttattttatatatttttgcaaattaaactcattagccaaacaatgttttaatcaattattaaagaatcctagctaatccaaagtatagacattgcccaaattaaggaagcaatccttgagatgctgttggctctcgcagaagtcgggaaaaggaggggccaaaacttcatacataatccggataagatcaacaaacttggccagcgccttggggtactcccctgtttcgtacagcctcttcgctgtgcgcgtcatcatctcggtatcctgcattacctttaggcccttcaggatattggttatctcgccacaggtgacacacttgaccataaagtcgttgcagctgggcggcacttcaattaccgcggagcaattattcggtgcatcgcagcggaaacgaatcacatcccgaggcagatcatcaaacttgggccaattgtcaatacaggcatcgcaagagcattcgaaccagtagaggtcctttaaacgcgcttggcgctccgagcgttcgtcctgggtgtacatcggtccgtagttctcattaatcggtagtcctgcttcgatgggtcggacactgttgatatgaatggtggtgccgcggaagtaacgcaccacgccaggatcacaggagtggttaaacagggccagggtgggatagatggcgccgcctatgaagatggacttctcccttccggaggagctgaacttatggagctctgccacctcgtgggtgttgaactggatgaactgcagactgcgcagtaccagggagcaaattattgacacctcatctggcttgggctccgatccaaaataaccccctgcccgaagacagttggttaaaaagcgagccatcaggacgtgctgaaagaagttggatggctgacgttcaccctgatgcctctccaattgggcaactcttcggaagtcatccttgggcagactaaaaatgtttaaacgaaagaatactaaatattattaaatattaaataagtaaacacacctgattagctgttcaggggtcagctcctcatcaatggtgggtttcaacttgaggaaataatccaagggcttgctggcaatgatcctcagagcaatgtgattgttaatggatgcacccgatctccagataatgggcactataccacactcgtacttgtgatactttttagaggcctcctcacggcattgctccgaacaatatagcacatcggcacatcggggacaggcgacaggaaccacagttctagacaagatggaaggttttaaataatttaaggtattaacggatgatatgatacctcatgaagcagttctcgcagtgcgtcttggcaaatttctccaacaagacagagacaaaaggtcgctccactaagagctcctcgcctggctttacatctgctgaggctctggcaaaccgaccctcctgtcgattgctatcaattctcaccagaggactcacgaactcattctccagcttgactggcttggcctgatccaaagctatcttctgcttttgctgcttggcctcctgcttggcagtgcgtggatcgttttgcagcatcttaatcatggtcatggcatccaagttcagtttagcacgcttgtcagaggccagtgtggagtcatccatggcggtgatgcactttcttcgcgaaaattatgtggttataggataagttttaaaaacttaactaagtctcacttgaatgaatcaattgtgtggggataatccttaagggccatgtagcaacgagcctgtcgttcgtacagcttatagatcaaatctttcgaataacttagatctagggctcgctttatatcaatcagacactctctggaagcgtatattagaagtgtataaatgaaattctaaaattcttataaataaatttcccttaactacttactgatatttctgcatgtgatacaaggtagctgagcgattggctaaaacaacacgtatctccgccactgaagaagaaccaaaaaaacttgtttaaaataaataaattaataagaatgtgtcaaccactcaccattttcactaggcagagccacatagcttctggtataaagcatcatggcctccagccacttcttggccttaaatgcagaggtggcccgctctttgatctccgccgccagagaagcgttctttccggcgaactcctggttcaccaccaggttggcatcccccgcctgcacccagggcaacttttccacataggccacgcgctcctcatcgctcttgcacgctgataacttggcaatatccgactcacaatttggaccagcctgatccttgagcttgagatagtattcggcaaagaagcctgtcttctggctaagtggagttttcattttagctatattttcacctttaaattatgcaagtttatagactttcagaattatttctgtactctcggcacgaaaactgcagataaactgaatgggtatatcaggaaaattcgactacagcatgtggtataaagacagcatttttggggactttatttttagaagaagagagtgtgccaaagagaaattgagaaagcggcgaaaaatgatgagagaagagaacgctcgcgtttgtttactaacaaagttgttaggttgggatgtatttaccgaacaaggaaaagcatttttgattaattagaaattatactaaaataggcaactaaattagcaagaaaatttctaagtgccaagtgagatttttgacaacagcgggttgttcgcctctttagctcagtggcagagcactggtcttgtaaaccaggggtcgtgagttcaatcctcacaggaggcagatggaaatctgaatctttagctcgtcgaacctctcctttattttgttgatttcgtggatcaagaattcatacataaaatgaattaaatgtgatctatttaataccactaataacaaccatttttaaaaagaagtatggataatcatataatctatataatttaaacatataaaacaaattggtaaggcgcaagtaatggaagtcctaacgaagaaataaatatttttaacaaactatatttacaacattctgatatttagtaaatgtgatatccgaactatattctaaaactatattcttcgaaactattttttaaaacgaaaaatgtaattcaacaaccaaagtattgcatacgaaacataaagcccggaaatagcaattgcatacgaaacataaagcacggaaatagcaatgtaaaataatataattaatcaaaaaaaaaccttcgggttttcataattgcctcctgtgaggattgaactcacgacccctggtttacaagaccagtgctctgccactgagctaaagaggcttgagcaaggcgg

SEQ ID NO: 17237 - DNA, 1983 bp, DROSOPHILA
atgaaaactccacttagccagaagacaggcttctttgccgaatactatctcaagctcaaggatcaggctggtccaaattgtgagtcggatattgccaagttatcagcgtgcaagagcgatgaggagcgcgtggcctatgtggaaaagttgccctgggtgcaggcgggggatgccaacctggtggtgaaccaggagttcgccggaaagaacgcttctctggcggcggagatcaaagagcgggccacctctgcatttaaggccaagaagtggctggaggccatgatgctttataccagaagctatgtggctctgcctagtgaaaatgtggcggagatacgtgttgttttagccaatcgctcagctaccttgtatcacatgcagaaatatcaagagtgtctgattgatataaagcgagccctagatctaagttattcgaaagatttgatctataagctgtacgaacgacaggctcgttgctacatggcccttaaggattatccccacacaattgattcattcaaaaagtgcatcaccgccatggatgactccacactggcctctgacaagcgtgctaaactgaacttggatgccatgaccatgattaagatgctgcaaaacgatccacgcactgccaagcaggaggccaagcagcaaaagcagaagatagctttggatcaggccaagccagtcaagctggagaatgagttcgtgagtcctctggtgagaattgatagcaatcgacaggagggtcggtttgccagagcctcagcagatgtaaagccaggcgaggagctcttagtggagcgaccttttgtctctgtcttgttggagaaatttgccaagacgcactgcgagaactgcttcatgagaactgtggttcctgtcgcctgtccccgatgtgccgatgtgctatattgttcggagcaatgccgtgaggaggcctctaaaaagtatcacaagtacgagtgtggtatagtgcccattatctggagatcgggtgcatccattaacaatcacattgctctgaggatcattgccagcaagcccttggattatttcctcaagttgaaacccaccattgatgaggagctgacccctgaacagctaatcagtctgcccaaggatgacttccgaagagttgcccaattggagaggcatcagggtgaacgtcagccatccaacttctttcagcacgtcctgatggctcgctttttaaccaactgtcttcgggcagggggttattttggatcggagcccaagccagatgaggtgtcaataatttgctccctggtactgcgcagtctgcagttcatccagttcaacacccacgaggtggcagagctccataagttcagctcctccggaagggagaagtccatcttcataggcggcgccatctatcccaccctggccctgtttaaccactcctgtgatcctggcgtggtgcgttacttccgcggcaccaccattcatatcaacagtgtccgacccatcgaagcaggactaccgattaatgagaactacggaccgatgtacacccaggacgaacgctcggagcgccaagcgcgtttaaaggacctctactggttcgaatgctcttgcgatgcctgtattgacaattggcccaagtttgatgatctgcctcgggatgtgattcgtttccgctgcgatgcaccgaataattgctccgcggtaattgaagtgccgcccagctgcaacgactttatggtcaagtgtgtcacctgtggcgagataaccaatatcctgaagggcctaaaggtaatgcaggataccgagatgatgacgcgcacagcgaagaggctgtacgaaacaggggagtaccccaaggcgctggccaagtttgttgatcttatccggattatgtatgaagttttggcccctccttttcccgacttctgcgagagccaacagcatctcaaggattgcttccttaatttgggcaatgtctatactttggattag

SEQ ID NO: 17238 - protein, 481 aa, DROSOPHILA
MDDSTLASDKRAKLNLDAMTMIKMLQNDPRTAKQEAKQQKQKIALDQAKPVKLENEFVSPLVRIDSNRQEGRFARASADVKPGEELLVERPFVSVLLEKFAKTHCENCFMRTVVPVACPRCADVLYCSEQCREEASKKYHKYECGIVPIIWRSGASINNHIALRIIASKPLDYFLKLKPTIDEELTPEQLISLPKDDFRRVAQLERHQGERQPSNFFQHVLMARFLTNCLRAGGYFGSEPKPDEVSIICSLVLRSLQFIQFNTHEVAELHKFSSSGREKSIFIGGAIYPTLALFNHSCDPGVVRYFRGTTIHINSVRPIEAGLPINENYGPMYTQDERSERQARLKDLYWFECSCDACIDNWPKFDDLPRDVIRFRCDAPNNCSAVIEVPPSCNDFMVKCVTCGEITNILKGLKVMQDTEMMTRTAKRLYETGEYPKALAKFVDLIRIMYEVLAPPFPDFCESQQHLKDCFLNLGNVYTLD

SEQ ID NO: 17239 - DNA, 2570 bp, DROSOPHILA
catttgatgaattttgggaaaacttattttttagttaatgaaataaatgaaatgcttcctttcaaaattaattttattcaacatatttacgaagcatgttttacactgaataattggcgattcgctttatgaaaagaagacatatttggtagtgaaacaaaacataatatatatggtatggttatagtaatagtaagatatttttgtgaaacataaggcaattatcaaacgcatcaatagactatttttcatagccacttaatagtaaaggaaagatctgttcaattcgagttaatagtttgattcgacaactggctagacggcaaatgtcgtgtgcctgccaaggacttcaaatttccaggaccaaaggcaaccactgagtgccatgggcatcgaccatatgttggttcctaaccgaagtcaaagtcgggtcggtgcagctcagcacggcacagcagagtacagcatatggtcactagacgcgagccacaatgcagttcgccagcgggttaattgatggcccatgccaaccagtacagtagctcatcctcgcgagctccgagccccccacccctccacacgctcgtgtgccgttgagcgtgaaagtcacaaattatgggcgacagagggagagggagagagagagaggggaagatcccatggcatgatagtaccaatttggcaagatatgacgcgtgcctggcgcgaaagagatggcaacaggcgaagtgtaggcgtttcaccaccgagcgaaagggagggaaacatatctaacccctaagtcaccccagctcctcggggagatcctttggccgggccatggtaatagctgcgaggatcctggggccaggggtcatttgcgggccatttacacaaacttggtcagaacggcggtgaaaatatttgtagaatgcatctcgcgggggttgaccgtagtcaagtctggatccgatcggatcgtttcagttgcaacgaaactttcaagccgctcggatctgcaatgagctactactactcgtctgcctccgaggaggatggcagttcccagtacctgggcagtcccaactacaacttgacccagttgccgccagtttctggccaggattacggacagggggctttcttatcgccggaatggcaattcttggatgccgcaggcggaactcaaacggaactaggacccatcatggaggcgcaaggacagcacacccagccgcagaccaaacggcggagtaacagcttcacaggatcggacggtaggaagagcagtccagagcagaccaatctcagtcccacggtccagaaaaggagacgacaggctgccaatgcgcgggaaaggaagcggatgaatggattgaatgcggctttcgagcgcctaagggaagtggtgcccgctccgtccattgaccagaaattgtccaagttcgagactctccagatggcccagtcctacatcctggcgctgtgcgatcttctcaacaacggggacgtggaagtggatgccgctgcatacaccatcttcggcgacagcgatagtggatttggattgagcggaggatccttgtcatagatggatgatactagactaaagttatgtgattttcttcttactgtagattaagttaaatatgtaatgaaataaattgaaatgtttaattgaatgctaaaaataatttcaatttcaaaggcattattcatggaacgcatcgcttgattgtgaaccaagtgttcaatccaaaatgagctactcatctaaccctttctaccaattataaccagcccactactattcacagatccccagattcaattggccatcagatcgtttggctacgcctcaatgatttcaaaaacgatcataaattaattactcaacagttcattgataggcgtacttcaagttttggtctaaccccgaacgattccgaaactgcgaagccaccacagtgggcggtgtagcgtgacacccctgaactcctggccaaaactcctctcattgaataaaaaaggcagctgagtccttcggcttcggttgggtgctgtttttttttttttatgacgagagggcgagtttgtgtgaggacataacagctatggattgatcaccgatgtccttttgggtttcgtaggtggcgtgggtggcacgggcttcacaacggtatcttcgttgggcactgtgatgtgctgcacctccacttcgcccttgctgaaggagtttttcgatggccgaaagccaggatccggcggatgcaggacaataacttctcgattgtgatcgctgaagctcaagtttcgaaagggattgctggtgagcagcagggttctgttctccttcagaatgggagcattagctttgtgggatggacgaagtactggtctccttggccttgaaatcggtctggtcataagaatgcgccgcatccttctgggtggatataatgcttctctttctctggcatctggcttttgaagcacggtgttcctgtggagatgctctttgatgatgcccagcgctgtgctggccagcactggtggaatcctaaaggagcccagtatggaaaggccaccac

SEQ ID NO: 17240 - DNA, 570 bp, DROSOPHILA
atgagctactactactcgtctgcctccgaggaggatggcagttcccagtacctgggcagtcccaactacaacttgacccagttgccgccagtttctggccaggattacggacagggggctttcttatcgccggaatggcaattcttggatgccgcaggcggaactcaaacggaactaggacccatcatggaggcgcaaggacagcacacccagccgcagaccaaacggcggagtaacagcttcacaggatcggacggtaggaagagcagtccagagcagaccaatctcagtcccacggtccagaaaaggagacgacaggctgccaatgcgcgggaaaggaagcggatgaatggattgaatgcggctttcgagcgcctaagggaagtggtgcccgctccgtccattgaccagaaattgtccaagttcgagactctccagatggcccagtcctacatcctggcgctgtgcgatcttctcaacaacggggacgtggaagtggatgccgctgcatacaccatcttcggcgacagcgatagtggatttggattgagcggaggatccttgtcatag

SEQ ID NO: 17241 - protein, 189 aa, DROSOPHILA
MSYYYSSASEEDGSSQYLGSPNYNLTQLPPVSGQDYGQGAFLSPEWQFLDAAGGTQTELGPIMEAQGQHTQPQTKRRSNSFTGSDGRKSSPEQTNLSPTVQKRRRQAANARERKRMNGLNAAFERLREVVPAPSIDQKLSKFETLQMAQSYILALCDLLNNGDVEVDAAAYTIFGDSDSGFGLSGGSLS

SEQ ID NO: 17242 - DNA, 2711 bp, DROSOPHILA
atgttataggtatcgtacaacttttgcgctcggcatgggcgacgtggcgtcctccggtagcgggtcgttgttttattaatttaaattaggtcttggcgcaacataggtttacatttttattttagaaattttacaccttttattgaattatgcaatatttgttgcgccccgggatgggcgtagttccccccggcagcgggtaattgctattttatcattttatacacagctcacgcagcacttctttttcatttatggatttcagatcttaatctgacttatgcacaccaccactatttttacgcacaaatttccacaattttttcgtatcacttttatcggccggacattgccggtccctgttcgggcgccagttaacgcaagttccacttgcatcagggttctcggcactcgctgccgcatacctcaccttgatatgacaaccaacatgctgtggttctccaaataatagtcaagatagttaagagggttcgagtttacgattagctttattttaagattcagttcgcgatctgctagcggttccgttaggtgtccgttcgacactggggcctcttctcccgccccgctgcttttatatccgcttcccccgttgacccctcaccctgagtgcgaccaacggcacttgttccgaatgcacacatacacaaacatgttcctagacaggccccgagtcgcctgctgacggggcccgaaaacacgagagccgagcgctggtgagtcctgacgaagatcgcaagaagagggttcgtaacttacacgaacatgttactagacaggccccgagtcgcctgctgacggggcccgaaaacacgagagccgagcgctggtgagtcctgacgaagagcgcaagaagagggttcttaacttatatatctcgatcgggggaagagtcttgccagactttttgtagccaatggaaaaccttgagagcacggagagtgctgacacaaaataatgaaatagtggtcaattcatataggattatatgtatattcgtaaataaagtcttattccaacttgttcgttttgaaataaacattatacttatttcctccataaaccatgtggtaaatgtcagatatcaaaaactaatattaacttcaaagagataaatatttttgtattatatttcaatagatttttcgcaaataaaatagagattggcaaaacatgagttatcgttcatggtagttttcccattgaatgttcggatatccacacactctccatcttttgtgggttccccatcggcccaactcaaaaaattggccttcgatcctttggtcacagaaacgaattcactttcgttgaactgattggtcacgtcgatccagtagcgattcaggccattaagttggttattgaatctatccaattcctcctgactttgcagactggccagatggccacccattttgtggcatttatccaaagcatcgtgccagtttagcttctcttccttttcgatgtagtagtatttgcttcccagttgttggaaaatttcgttttcttccagttttctgcccattgctgtaccgtgtgtcagcagttgttgcgaagtattttgattttccagctgcaagttcgttgaagtgccaaaattgtccagtcttcggtcatttagggctattctcgctattgcaacagctgcttcacaggcttcaacccttcgttgcaaattgcccatgctcgcgatgcagggattcaagacaccgtagcaatatgcagcacattgggaatcgctttcaacgccctaagaagatatgtgaatgtaaatatttagcatttctaaaccacttctctacttcactcacctcgcaggctgctgaataacttgaactcagacacaacgggagtaccaaaaatataatagatttttgcattgctgcgattctgagatcttttaaatccgagtgccaaaaacagactgacttaaatgcttcgaaaccaagtatattagaaagaaatccaataaagaaagaaacagaaaatctgacgctgcatgatgataagagataggtactatgtacgacttatcgctctgcacagcatgtgggtatagttatctgcatacacagaaaaacataatgcaattcataattcataaaaattaaaaatatatttaacattttttaattagatcggcttagaactaaaaagtcacatagtgtaattaacccattcgaaatgcgtaataaactcgtagcgtaatcacataggcctaactcgattagagccatatttcatcgatgactcacgtctaagttcagtcagtccgtcattcgcggttttcacacgcagccggtctgtcgatctcgattgctttcgttgcatatattaaatttaattatgggtttcgggctcgacaataaatttgattaatttcacgactcttcgagtgtgtgcagctaagacgagtggaggcattgagtcgagaacaataggcctaaactattgtggctaaaagctttagatccaaacgattaggtcaggctgagtggcggcagcaaaggcggcaacttagtcttagtatagacgaagtcgaaattgcgctgcacgcatgcgcataaccaaaatgtcaagaagttgttcgagttgtagtggctgctcggatttgtggcctattgccgtttgggccgcaaaacgcgactcgaacttgctcttggcggcatttgtaattagcgttt

SEQ ID NO: 17243 - DNA, 711 bp, DROSOPHILA
atgggcaatttgcaacgaagggttgaagcctgtgaagcagctgttgcaatagcgagaatagccctaaatgaccgaagactggacaattttggcacttcaacgaacttgcagctggaaaatcaaaatacttcgcaacaactgctgacacacggtacagcaatgggcagaaaactggaagaaaacgaaattttccaacaactgggaagcaaatactactacatcgaaaaggaagagaagctaaactggcacgatgctttggataaatgccacaaaatgggtggccatctggccagtctgcaaagtcaggaggaattggatagattcaataaccaacttaatggcctgaatcgctactggatcgacgtgaccaatcagttcaacgaaagtgaattcgtttctgtgaccaaaggatcgaaggccaattttttgagttgggccgatggggaacccacaaaagatggagagtgtgtggatatccgaacattcaatgggaaaactaccatgaacgataactcatgttttgccaatctctattttatttgcgaaaaatctattgaaatataatacaaaaatatttatctctttgaagttaatattagtttttgatatctgacatttaccacatggtttatggaggaaataagtataatgtttatttcaaaacgaacaagttggaataagactttatttacgaatatacatataatccta

SEQ ID NO: 17244 - protein, 134 aa, DROSOPHILA
MGRKLEENEIFQQLGSKYYYIEKEEKLNWHDALDKCHKMGGHLASLQSQEELDRFNNQLNGLNRYWIDVTNQFNESEFVSVTKGSKANFLSWADGEPTKDGECVDIRTFNGKTTMNDNSCFANLYFICEKSIEI

SEQ ID NO: 17245 - DNA, 7014 bp, DROSOPHILA
cgcacgcttcacaaggatcttcgtcttcctctggcttgcaacgaacacagtacgcagtgggataccaccgatcattgccggacgtagatctttcatggtgcacacctaagaactcttcatttggtggctcaggctctagaatcatcttgtagaaggtgtacccgcacctggtttcactgcagctgggacttaaaaaagctagaggcgatatgaatgtgtcctccgaaaaattgggtgggaaatgtccttccttaatgggacagttagcttcctcctgtgtaaaaatagaagataatggttcactattcaatatccagtgcaaaaaccatccactcacctccaagtttcccaagaaatgcaagtcctcgaagtaggagtaccttggactataactataaccctcaatttgactatttcggatggcggccaattccttggagtagtagtgccgcagaccgagcacctgcagctccacctggtcaggagtcaggccgcagttcatccgccgggtgatttgtcgccaggcgtcatccttcgcagaaccactatggaaaccaggtgactttggattccagaggcactcgttcgatcgataaagtcggatgagcttctgcgtcttcttcaatcgctccaaattcaaatacgacgtaatatccttctgtgccatcgtgcccctctgttctccacaatcctttccagcgactcggtgatcaatcttccatagcgttttcctattgaacctacagaggttgtatgcctagtttggagctatatattgcgcccaagccgaaatatttggacaggaaaaacaaaagtgacaataaacaagcaattttgaataatttttgaatgatttttaaacggtatcgcttaattaggaatattatatgccgttaccattttcaagatctgcagggtgtctcatacattcgaagcttttgagagtattaattcagtattattgtgcaattaaatggcgattggtatttagctgggcgagcagaacggtcacactggcgcacagtagcgaaaataatagtcgaataataaaatagttttgagtgcaactaattccgacctactaacgtatgcgagtgcatttagcggctgcacttaatcattccgggcaaaaaagtgcaaaacagtacgacgcggagcagtcagaatcgaggttgcgctccagcgttatcgccatttgaccaattcaacttttgtgtctggtataaccacaaaattttcactgcatcttcttatttgagccgcccccaacccaattttcgcgagtgtgtcggaatcagcagagaatcggaacaaaaggggccaaacggagtaccagaatcggcacaagcaaacagtgaacagcagatagtgcggacgatagcgagtccgttgattatccacgtaaacagtgagctgcatgcgcagaggtcgcgcccagagctgcagaaatccaacaatctccgccagaaagatctatctccgccctgtaagcaatgtccgcggaacgagagattcccgccgaggacagcatcaaagtggtctgccgattccgaccgctgaacgacagcgaagagaaggccggctccaagttcgtggtcaagttccccaacaatgtggaggagaactgcatatccatagcggtatgtgttccagatctatagttttcgccagcccccagtgccttttccctatgtgttatgcattaatctcggcgtgccgcgccatgacgtcatgcctattagcgtacattacccttccccaaaattgccgaccaattggaatgccaggcgataaaaagagagaggcactaaagttacccatgaataattgcacaaaacaaaactagatgtacatatacatgtatatgatgaaaccaactaactttactccaaatcaatattgctttgcaccaaattgattttcccccagtcgaaaaagaatagggtgtgtaaatcgaaagaagcgcgatgacggggtggagaaatgccacccactagacggttttctgctaaaagcgggtgttccattcttttgggccgcataaatatgcgcttttctagtttccagtccgccttcagtgcttacctcacttacatttccacacaaacacatacacacattgacggtagcccccgctccacttccactcccctgtccgcgcgccaatgagtcatgcacgcaaagcatacaaaaaaaaaaaatatgaggaaaaacaataagagcaactttggaggcaatggaatttggctgtattgcttttatgccacatgaaatgttattgctttgtatgctatgctgaatttcccgcttttccgccaggtgtaatccgtcatattcctggtaaagcttgggcaattgaaccagttccaaaaaagtcagcactaatatagtgcctccatacacagacattatcattacgctctctctctctctctgactaactctatctatctctctttcgctgtggctttcttctggcgctcgttattcactattcttcccccttccacttaacatgtcttaatgctcataattacaatctgcttcgcggccatgcgttgaaaatgattcaaaggcagtcagcgggaaaagatcggggacagggggaatgaatctccgaaagaaatttcaccgcaactgacaccagtttatagctaatgtaactggctgctatgtactaaagaaaaaaacacattatactaaacctaatctccatcgtctgcagggcaaggtgtatttgttcgacaaggtcttcaaaccgaatgcatcccaggagaaggtctacaatgaggcggccaagtccattgttacggatgtcctggccgggtacaatggaacgatattcgcatatggtcagacgtcctccggaaaaacgcatacgatggagggcgtgatcggggactccgtaaaacagggtatcataccacgtatcgtcaacgacattttcaatcacatctacgcgatggaggtgaacctggagtttcacatcaaggtctcctactacgagatctacatggacaagattcgagatctgttggacgtctccaaggtgaacttaagcgtgcacgaggacaagaaccgggtgccgtacgtcaagggcgctacggaacggttcgtctcgtcgccggaggatgttttcgaggtgatcgaggagggcaaatccaatcgtcacatcgctgtgacaagtgagtactaattaaaatcgatggtcaggaccatttcagccaaacaagtctaggagttattccagcattcgctctgacctcgattgtagtgtttcatgtaccagatcatcttttataacgatttatccatcctttcagacatgaacgagcattcttcgcgatcccactcagtattccttatcaatgtgaagcaggagaacctggagaaccagaagaaactatccggcaaactctacctggtggatttggccggttccgagaaggtttccaagactggagcggagggaaccgttcttgatgaagccaagaacatcaacaagtcgctgtcggccttgggcaacgtaatttcagccctggcggacggaaacaaaacgcacatcccctaccgtgattccaagctcacgcgcatcctgcaggagtcgctgggaggcaatgcacgcacaaccatcgtcatctgctgctctccagccagtttcaacgaatctgaaacgaagtcaacgctggacttcggtcgtagagccaagacagtgaagaacgtggtctgcgttaacgaggagcttactgccgaggaatggaagcgacgctatgaaaaggagaaggaaaagaacgcccgactaaagggtaaggtggagaagctggagatcgagcttgcgcgctggagagcgggtgaaactgttaaggcggaggagcaaatcaacatggaggatctcatggaggcaagcacgcccaacctggaagtggaggcagcacagacggcggcggccgaggccgctttggccgcccagcgaacggctctcgccaatatgtccgcatcggttgccgtgaacgagcaggccaggctggctacagagtgcgagcgtctctaccagcagctggacgacaaggatgaggagatcaatcagcagagccagtacgccgagcagctcaaggagcaggtgatggagcaggaggaactcatcgctaacgctcggcgtgagtatgagactttgcagtcggagatggcgcgaatccaacaggagaacgagtccgccaaggaagaggttaaggaggtgctccaagctctcgaagagctggctgtaaactacgaccagaaatcccaggagatcgataacaagaacaaggatatcgatgccctcaacgaggagctgcagcagaagcagtctgtgttcaacgccgcctccacagagctacagcagctcaaggacatgtcctcacaccagaagaagcgcatcacggaaatgctaaccaacctactgcgcgaccttggcgaagtgggccaggccattgcccccggcgagtccagcattgacctcaagatgagtgctctggctggcacggatgccagcaaggtggaggaagatttcaccatggcgcgtttgtttatcagcaagatgaagacggaggccaagaacattgcccagcgatgctccaacatggaaacacagcaggctgactccaacaagaagatctccgaatatgagaaagatctgggcgagtaccggctactcatttcgcagcacgaggcacgcatgaagtcgctgcaggagtcgatgcgggaggcagagaacaagaagcgcacgctcgaggaacaaatcgattcgctgcgcgaggaatgcgccaagctcaaggccgccgagcacgtttccgccgttaacgccgaggagaaacagcgggctgaggagctgcgctccatgttcgattctcagatggacgagctacgcgaagcccacacccggcaggtgtccgagctccgggatgagattgccgccaagcagcacgaaatggacgagatgaaggatgtccatcaaaagctgctcttggcgcaccaacagatgacggccgactacgagaaggtgcgccaggaggatgccgagaagtccagcgagcttcagaacatcatcctcaccaacgagcgtcgggagcaagcgcgcaaagacctcaagggcctggaggacacggtggccaaggagttgcagacgctacacaacctgcgaaaacttttcgttcaggatctacaggtaaagtttaagcaatcctatctattattgctacgtacagatcttaaaatgtatttcccttgtgccaacagcaacgaatccgaaagaatgtcgtaaacgaggagagcgaggaggacggtggatcactcgcgcagaaacagaagatttccttcttggagaacaacctcgaccagctgaccaaggtgcacaagcaattggtgcgggacaacgccgatctgcggtgcgagctgcccaagctggagaagcgtctacgctgtaccatggagcgggtgaaagctctggagacagcgctcaaggaggcgaaggagggcgcaatgcgggatcgcaagcgctaccaatacgaggtggaccgcatcaaggaggcggtgcgacagaagcatctgggcagacgtggcccacaggcacagatcgccaagccgatccggtccggccagggtgcaatcgccattcgtggtggtggcgccgttggaggaccatccccgctggcccaggttaatcctgtcaactcgtagatccaatcaccacctgtcgccgcccagttcagctccgctttaaactaaactaaatggattacgttatacatacttaacataactgataattgccttcgcttagatgagatgtgtcgcgatcatgtgcagcgctttaaatatacatacatataatttaattaaataaatgaaaggaaaccggaaattaactaaattttacaaaccgaaaataataaaacccacagatatgtaaggacatctatatacgttaagagtatttataaacttttcaaacataaacctaaataaaagtcgcagacaaattaaggtctctttagtttgattcttattgcagttcaaaaaaattatgccgattatttggctattggttgttattacatcgtctgctgttacaatcgcatgttgtaacctgtcccgcgtgtgttatggtgctcccaatcgtctggagaattgaccacctgccattcgtaccacactttggttgcatccacgcatcgccaaaactggatggatatagtctgtccctccctcagagttcttggacgctgagtagtaaaaatatatattaatgtagcagttatcaaaggctaactaatcacatcacacgtaccgttgcgaagaacatggggaaccaggagaacatgccaggcgtatgggtcagaggattgatgcttaggcagatgtccttgtacaaatgggtatcaaagtatccgccgattccgtgcagcacgcaatctttattgactttaaatgaaaccgtcttgcagcgagtattgtcaatattttccgctcgattaggatgtacgaattcaaacagagcctgcggctcgtcaatatggtaaatattctttagcagcgacacatagccgtagtcgaaggcaggataggttggtaacaattggcagacattttggtgcagcactgctgacatcagtggattaatgtaggaggtggatttgtagggtatactgattccatccggtttgagcagcttcagtgctccatcaaggcactcgggcgaaagttcattatcgccaaaggaaccaagtaactccgaaaccatgatgtcagccagctctggaggggaaaagtcccgcatgtcctttgaaaaaatgtgaacatctgaaagatttgttgcggattaagactggattaaagcaaggtgtttttttttttcttattcttacccttatcggcccaaagcgttttaaccatgttggagagggtgcggatggcattgggattcttttctatgatgtagaggcgaactttgcgcttcgttaactcggcagcattgaa

SEQ ID NO: 17246 - DNA, 3720 bp, DROSOPHILA
cagaacggtcacactggcgcacagtagcgaaaataatagtcgaataataaaatagttttgagtgcaactaattccgacctactaacgtatgcgagtgcatttagcggctgcacttaatcattccgggcaaaaaagtgcaaaacagtacgacgcggagcagtcagaatcgaggttgcgctccagcgttatcgccatttgaccaattcaacttttgtgtctggtataaccacaaaattttcactgcatcttcttatttgagccgcccccaacccaattttcgcgagtgtgtcggaatcagcagagaatcggaacaaaaggggccaaacggagtaccagaatcggcacaagcaaacagtgaacagcagatagtgcggacgatagcgagtccgttgattatccacgtaaacagtgagctgcatgcgcagaggtcgcgcccagagctgcagaaatccaacaatctccgccagaaagatctatctccgccctgtaagcaatgtccgcggaacgagagattcccgccgaggacagcatcaaagtggtctgccgattccgaccgctgaacgacagcgaagagaaggccggctccaagttcgtggtcaagttccccaacaatgtggaggagaactgcatatccatagcgggcaaggtgtatttgttcgacaaggtcttcaaaccgaatgcatcccaggagaaggtctacaatgaggcggccaagtccattgttacggatgtcctggccgggtacaatggaacgatattcgcatatggtcagacgtcctccggaaaaacgcatacgatggagggcgtgatcggggactccgtaaaacagggtatcataccacgtatcgtcaacgacattttcaatcacatctacgcgatggaggtgaacctggagtttcacatcaaggtctcctactacgagatctacatggacaagattcgagatctgttggacgtctccaaggtgaacttaagcgtgcacgaggacaagaaccgggtgccgtacgtcaagggcgctacggaacggttcgtctcgtcgccggaggatgttttcgaggtgatcgaggagggcaaatccaatcgtcacatcgctgtgacaaacatgaacgagcattcttcgcgatcccactcagtattccttatcaatgtgaagcaggagaacctggagaaccagaagaaactatccggcaaactctacctggtggatttggccggttccgagaaggtttccaagactggagcggagggaaccgttcttgatgaagccaagaacatcaacaagtcgctgtcggccttgggcaacgtaatttcagccctggcggacggaaacaaaacgcacatcccctaccgtgattccaagctcacgcgcatcctgcaggagtcgctgggaggcaatgcacgcacaaccatcgtcatctgctgctctccagccagtttcaacgaatctgaaacgaagtcaacgctggacttcggtcgtagagccaagacagtgaagaacgtggtctgcgttaacgaggagcttactgccgaggaatggaagcgacgctatgaaaaggagaaggaaaagaacgcccgactaaagggtaaggtggagaagctggagatcgagcttgcgcgctggagagcgggtgaaactgttaaggcggaggagcaaatcaacatggaggatctcatggaggcaagcacgcccaacctggaagtggaggcagcacagacggcggcggccgaggccgctttggccgcccagcgaacggctctcgccaatatgtccgcatcggttgccgtgaacgagcaggccaggctggctacagagtgcgagcgtctctaccagcagctggacgacaaggatgaggagatcaatcagcagagccagtacgccgagcagctcaaggagcaggtgatggagcaggaggaactcatcgctaacgctcggcgtgagtatgagactttgcagtcggagatggcgcgaatccaacaggagaacgagtccgccaaggaagaggttaaggaggtgctccaagctctcgaagagctggctgtaaactacgaccagaaatcccaggagatcgataacaagaacaaggatatcgatgccctcaacgaggagctgcagcagaagcagtctgtgttcaacgccgcctccacagagctacagcagctcaaggacatgtcctcacaccagaagaagcgcatcacggaaatgctaaccaacctactgcgcgaccttggcgaagtgggccaggccattgcccccggcgagtccagcattgacctcaagatgagtgctctggctggcacggatgccagcaaggtggaggaagatttcaccatggcgcgtttgtttatcagcaagatgaagacggaggccaagaacattgcccagcgatgctccaacatggaaacacagcaggctgactccaacaagaagatctccgaatatgagaaagatctgggcgagtaccggctactcatttcgcagcacgaggcacgcatgaagtcgctgcaggagtcgatgcgggaggcagagaacaagaagcgcacgctcgaggaacaaatcgattcgctgcgcgaggaatgcgccaagctcaaggccgccgagcacgtttccgccgttaacgccgaggagaaacagcgggctgaggagctgcgctccatgttcgattctcagatggacgagctacgcgaagcccacacccggcaggtgtccgagctccgggatgagattgccgccaagcagcacgaaatggacgagatgaaggatgtccatcaaaagctgctcttggcgcaccaacagatgacggccgactacgagaaggtgcgccaggaggatgccgagaagtccagcgagcttcagaacatcatcctcaccaacgagcgtcgggagcaagcgcgcaaagacctcaagggcctggaggacacggtggccaaggagttgcagacgctacacaacctgcgaaaacttttcgttcaggatctacagcaacgaatccgaaagaatgtcgtaaacgaggagagcgaggaggacggtggatcactcgcgcagaaacagaagatttccttcttggagaacaacctcgaccagctgaccaaggtgcacaagcaattggtgcgggacaacgccgatctgcggtgcgagctgcccaagctggagaagcgtctacgctgtaccatggagcgggtgaaagctctggagacagcgctcaaggaggcgaaggagggcgcaatgcgggatcgcaagcgctaccaatacgaggtggaccgcatcaaggaggcggtgcgacagaagcatctgggcagacgtggcccacaggcacagatcgccaagccgatccggtccggccagggtgcaatcgccattcgtggtggtggcgccgttggaggaccatccccgctggcccaggttaatcctgtcaactcgtagatccaatcaccacctgtcgccgcccagttcagctccgctttaaactaaactaaatggattacgttatacatacttaacataactgataattgccttcgcttagatgagatgtgtcgcgatcatgtgcagcgctttaaatatacatacatataatttaattaaataaatgaaaggaaaccggaaattaactaaattttacaaaccgaaaataataaaacccacagatatgtaaggacatctatatacgttaagagtatttataaacttttcaaacataaacctaaataaaagtcgcagac

SEQ ID NO: 17247 - protein, 975 aa, DROSOPHILA
MSAEREIPAEDSIKVVCRFRPLNDSEEKAGSKFVVKFPNNVEENCISIAGKVYLFDKVFKPNASQEKVYNEAAKSIVTDVLAGYNGTIFAYGQTSSGKTHTMEGVIGDSVKQGIIPRIVNDIFNHIYAMEVNLEFHIKVSYYEIYMDKIRDLLDVSKVNLSVHEDKNRVPYVKGATERFVSSPEDVFEVIEEGKSNRHIAVTNMNEHSSRSHSVFLINVKQENLENQKKLSGKLYLVDLAGSEKVSKTGAEGTVLDEAKNINKSLSALGNVISALADGNKTHIPYRDSKLTRILQESLGGNARTTIVICCSPASFNESETKSTLDFGRRAKTVKNVVCVNEELTAEEWKRRYEKEKEKNARLKGKVEKLEIELARWRAGETVKAEEQINMEDLMEASTPNLEVEAAQTAAAEAALAAQRTALANMSASVAVNEQARLATECERLYQQLDDKDEEINQQSQYAEQLKEQVMEQEELIANARREYETLQSEMARIQQENESAKEEVKEVLQALEELAVNYDQKSQEIDNKNKDIDALNEELQQKQSVFNAASTELQQLKDMSSHQKKRITEMLTNLLRDLGEVGQAIAPGESSIDLKMSALAGTDASKVEEDFTMARLFISKMKTEAKNIAQRCSNMETQQADSNKKISEYEKDLGEYRLLISQHEARMKSLQESMREAENKKRTLEEQIDSLREECAKLKAAEHVSAVNAEEKQRAEELRSMFDSQMDELREAHTRQVSELRDEIAAKQHEMDEMKDVHQKLLLAHQQMTADYEKVRQEDAEKSSELQNIILTNERREQARKDLKGLEDTVAKELQTLHNLRKLFVQDLQQRIRKNVVNEESEEDGGSLAQKQKISFLENNLDQLTKVHKQLVRDNADLRCELPKLEKRLRCTMERVKALETALKEAKEGAMRDRKRYQYEVDRIKEAVRQKHLGRRGPQAQIAKPIRSGQGAIAIRGGGAVGGPSPLAQVNPVNS

SEQ ID NO: 17248 - DNA, 23306 bp, DROSOPHILA
ttatggatttattaaattatcaattgttttaattatgcgttatttctttgaaacttaatatgtatagataactactgatcgagccactgaaggcgcccgatgataacacgatctatagataatcagctgtacaaataaaatggtcacatgcactagtggtaatacattgttattccttgaatttaagttaaattggttttcatgtatcgctttgtattgttttttagtgactacgtggtatgcttaattactagatacgctgcacatctggcttctgggtgattatgaattgcaagatcgttagtttgttggctggctgcttggttggttggttggttggttgatattgattgattgtatgatccacggatacaatttaattcaagctcatatcgaaatacaaatacagatccatacatacatacacatacatataaatacaaagatcgctaaataaaattcaagatcatcgttacaaaattagcaacttcttttggtgttttattgtggctactataaaataatgatttgggcgaaaacaccacgcactttagttcagtttagatcgttttagttgagttaggcttaagttaattttactttttgcagttatatctcacgttcacttcatcagtgatatttgtttgtttgtataactataattgcgatacgcatttaacataaatatatatgtagtttaggtagtactcgtaggtgtaatatttagtagttaatataatccataatcgtgacagtgacagcaatggtagtcaggattctttctgatcattgcatttatcatatctttgtttcttagtggatttctgtttgtatcggtttcgtttcggttttaatttgtataattcattatttattttgtattgccttttgctggtcgcggtcgctcctcgcatcgttttacaaacaatgaaaacaaagggtttcgtaatttctgtttgtggttgctttacttttaaatatatgtatatgtatctttaatttatataaatttatatgtataattagttaataattgtaataaaacataggcgtatttgtgaaatttcaattaacgcaacggaactcaacgttgtcggtgttcatttgaaggggttcgaatcgaaaccggaaacggatctgaactcgaaatggaattcgaaagcgatttcggatcggcaacggcaacgtgaacagtatcgtttcccgatctgatccgatccgagcgatccgattggattcgaccatatctgtgtctgtctgttcatatctgaacctctccgtcacgcgcgtttactctaggggaatcgtttgtttcagtttcagttttagaactattaacaagaagtagttaatgcttgttttgttaattactggtttggcctaaaattaaagaaaaaattttaaacaaattattcacggctggaaaaaatattaataatgggtaaaacaaataccagaaatgaaaccaaagaagacagataagaataaaacggaatatgggtaagtttcatttttcatgtttcttcatagaaaaagaaaagtaaacgcaatcgttcttcaactgataagtacattgcacattgtacatttcaacaatttttgtctttctatttgtcaaagagcataatcgtaattaattgaatcatgtatttaataaatgaaagaaatagacaagaacaaaagagccttcctagcgtgaggtgatataatggaagtacatagttgtacaaagcaaacgtggatatacaggatttgaaaaactacgtaatatttatatatgctttttgtaagaaatcaatcgagaataaaacaaactaaaggttgtgacggagattttgagagcgtagagaggaagcgacagacgtcatcagattattattatcagattatatattggattggattcagttccgtataacatgtactttttcgcacattgtcacatatgcttgtatgtatagttttgtatttgtttagcacctgaatcaaaggcggatttctattttggattcgaatattgatattgcaatcggtgtgatggtttgagttccgtattatttttcgtttatagtaattgatcgatcgtattatatggtacatcccaaccgaataatagccagtcgttcactgtttctaaggctgagccacattcagagtatatttcacaaataacatatgtaagtagtatggtacgtatgctaactaaatatggataggaataaaaatgttttttagcaatgcattgcgagcgtctaactaatcgaccgaaccgacatatgcaccccacccattgtcaccgatccactgatccaccgatccacaatcaccgaacccaatggaaccaccacaataaattaggggcaaatagtgagtgcatcggaccgatgtggtgcatatgcggtatgttggcggtcgtttttaagcaaaagtcctgggtgtacgttaaatgtgtgttgttaggtgtttattgtatatacatagagagtacatactttcctgctgaaagtctttcagttcaacaaatggaaaaaaaaggtaacaaaacagaagaaaaaaagaaaagaaattccatatacaaaacatgtgcatatcattagtggaggataatcaactgtttcataattatgagttagcttttcggattaaaacaaaatatagctaattatctcataacgcccattacactttttatccatcatgcattcgaatgcaagtgctggttgtcatttaattagtaactatcctaatcggtcgaataacttgcgcagttgcatagctgttatgttggctgatatggggaactttttttttaggagttgctaactttatttatcctgaaaattgaagctgcttctctctctttctctcgataaaattattaatttaacagggtgcagttaagtagtttaacatcgtgattcttgtgagagggtgagggggctagacatgaatatccaaaacattgaaactatagtgcacgttatttaacacccttccaagtggcaatacagtgcgattcagtccataaaaataaaacttttaaatgcagaaattacgaaacgtacttgtcaatcatgatgcccggattactacaatcgccaatactgtatacttatacaattttcccaactaaacctataccttttcatctcaaatgttgtctgtggttcctcttcgcctgtccttccttagagctaagctcaaaataagcatttaactatagtctgttttgatttggaaaattctgcatatccaacgggtgtttttgaacgagattttttagttatgtgctcgatggacatggcattgcaacttctttggtagcgattacttttggggctggtttcagtgatttattggcggactctcagaatggactcggtacgaaatacaaacatgagcataataaacacacatgggtgtatgtgcggcagatatgcaattaaatgaaacataaatatgaaacataaaatgataaacgagaaaaaatcaaacaaacaagaagtaaattaaaaaagaaattaataaaccaaattgatgtaagaaagaataacaaacgaataataaatgtatcgaattgcagtttgcatttgcttttcttgtaatattccattaactgaagaaatgaatttgccactttgtgatatcttgaagccactacttaccgtttgctaaaacgtgaggagagtttggagaagaagctcatgcgacccggatgggaggagtcgccggaggcaccgctggtgcccgagtattccagcgctgtgttgtttcgtgctctggtttgacctagggattgcaatgattccatagttagattcggatcgctaacgcactcaaggatgtgtacacgaacacagactaaatgctaactgattccatttggtttgtaaactagggtattactaaagtaactccgagtacgcacatacggttccactgctgggctcaaagtgcaatgcgagtatattactaacaaataaatgctatttgctaaatgaagtgcttaacaactattttactcactgggaaaatctaaaggtatcgcaattttacgaaatcaaaacttatcttccaattgtatttatgttagctattactatctttaatatattctttaaactctcccatactattgacttcaattgataacatatactagtaatctcattgcactttgtcccatatgcaaacatttttcaattaactttattttagtgaacacgcgattgttaaatatagacagacaaatgtccgttctcaattgtacagttattttggtcgctatgaatagttttccatccgtatttccaaatacacaaatatattaaatatttacaggtgggcggttttggatgggatttggttgattcgatgcataataggcaaacgaactagatttacgaatccacttagacaaacgtgcagaggggtgcggcattggatcgcggaaatcataagcgatgcgatgcgtataaaaacataaagtaaacattcagttaaatgtatcgatcgagttgattatatagtaattaatcgcttgacaacctaaaagaaaataatagaggcgcgtttgatatgcattttgtatggagaagaggtgcagtgcgggatacaattgaattgttctagtggatgcagcatgaaaacgggttcagtttcaaaaataatatcaaaaacatcactcgacaacgcgttaacatctactaatgagtttagcctagttcggccttaaattttttttaaatgttttagtagaagaaggtggggataaaattaaattattatctttaaaactaataaaaataagtgaacagaaaactcaccagagtgaaaggttgaacgtgatggaacattccttggaaagtgtctgcttgatttaacagccgatgccattctaagtcgatcgaacagactatatatgtacaattacgatacatatgcacacataggtatgaatggaaatcaaatcagtatcgaatcagttcgtcggagtacattcaaatccaatgaatcgcatttcgggaaacgaatatggttttatcagtataagattgttgttgttttttttttttttttagtttagtttggtttgtttgtttttccattaaatatttgttgattgtttttagttgggaaatgtgtaatcgttcgtacagaaccgttcgagcgttcgtcccgtgttatgatcgttaaagataatggtttggtgaatggaatgagtaatggacgttgggtcatcatcatcaaatcgaaccaaatcgtatggagtttcgaagcgttacccatgttgcgtcattggccaattggtagtttttagattttggtcggtagggattggatttcatattgggttgtatgtaggatggcggcaggcgggtgtagatggtcagagcagcgcgaatcaagcagttcgtttgtttgatgtgacaaattgatgatgttaaccaagggtttatggtttttgtatattgttttatcgatcacgtcgcagacataaacaaaatgaaaagaaaaaaaataaaaatagatcatgtaaattttcttaaaaagacaagcacttaaaaatacgtttcttagatattaaatcggatacgacaaacttcgactgtttcgttctttgtatgggtatgaatatatgcaggaatgtagagtatactcgaaagctcggcaaacaagaagatttgatccttcaaactacatgaaagcattatttgatgggacatgcgttcgactgactatcgagaatccattttgtaaacgttcttgtactttgggcggagcaatttatcaacttaattgttatttattagcacagactagaaagctcgtctaaggcattatgtcctaatacgatacgcgataaacgtagaaaagtaggagttattattattcgaggtagtacgcatatagtagttatacggttagatacatgaagatcgtacattggagagcatatagtatttaagaccaggtacaaaagttacaacagcagcacaataacagactatataaaactgagttgttaagtatcggtaggtaataacattaacaataaacgaaaacacacaataatggaaaaaattcaattatactggcgatggtagcagagtcaatagagttttactgacagagacatacatgcatgaggaaacaaacagaataatgagttcttattttagaaacttgaatttcgatcgctaaatttcgggcgactgattggacttttccaatgcgaatacgaaataaaaaactattcacttgataatgggtgtaaatctggtagttcctatcagtttactggaacaccaagcgggctaaggtcgagcaatatgtcttggcatcgccgtcaattgaatttcgtttaaatgaatcacaaaagtataccaacaaaatcagaaaaatataaccaaaccgtacgctagttgtacatacttaagcaatatatcattttatggaaagggtcgtgttcgcttacgttacttcttacgcaagaattacgtgaaaaatacaaataagctgtagacatcaagtctattagaaaataactacaatacttcgattatgctagcaataattgcaacgtaagtgcaattattgggtatttgccacgcccacgacccttagttcaatgaggcacaataaatatctcttaacgtaagatgcattttcactcaccgaatttgttcgattggtttagttcgattcgaatccaaattgaattcagttcaaaccacattcatatcattatttgcatatggattttcaaatcggattggtttggttgtcgattcggttagcaataattgttgaattgttggattgttattgttggttttgttcaggttttcaatttgcattacgagtacgatcgaaaaggtagtaatagtagagtagtacaataattgagcgagcgtcgataggaggacgaaggaggttgttgcagattcagattcgtaggttgtggtgttatttgttgttgcggatatagaacgccacagagaatggatgtacatatgtggtagtgtagtagttatcaaaattagacatttggtttgtaaacagacaatgttcaaaattgtaaaaaacatgaaaagataagaaatttacattattcaattgatcaaattggttaggtcgttataaatacactggataaatagataaatacaaaacgaatagaacaaaactaggataggccaacgctataaactaagagaagagtgaacggtaaacaaatcaaacagaacacctaataaatacttataaatacggataataatagatgcttagtaactagcctaacgaccatcgctgggttccattcgaggtcgtaaaataaacacatttaatcaaagcttttaaaaatctaagcctgggtcataaccattaatttgtaatggttaccaacagccaagttttaacatatgtatcacgcacagaacaaatacctctagaaagttgaacactttttgtaacatttttaagcatttaagtaataatgttattatggggctgttacttttataaaccagttcatctagtatctacttcttttgcaaaacatcaaaggcagattgggattcagacggaacaatggtcatgtatagattcaaaagtgcttgctgtctagttgtttttgttttacgatgacgggtcaacaaagttctttgtgaatgcttctgagttaatgattcatgaagatgaaacggcgaaatgattgtcaaaatgcacaataattctcccaaacaaataaaatgccagccaatattttaaataataaaaaagaaaccgaaatcagttgaatttcaaagaatgcgttaatcaaactaagagaatttggtttgtttggttgttgcgttttttttgttaattactcaagtgtatacctcgttccgagcgggtcatttgagaccgagacgcagccgtctgtagaggggcgagggctcgagacagacgcgcttttggtatgaccttttccagcgggagctgccgatccactgctggtaatttgcatgttttaggtttaggccgaaaagtggtaaaatcgtaatcgtaagtatgactttgttttggtttggtttggaaagagtttcggtttttttaagataaccaaatgaaacgatgggtaaatgataaacaagtaatttttgagagtgcccaaggcacggcaactaaagagaactgaactgtgcgtgactatatacaattaaatgtcgttcgatcttccaacgatctgctctacgtttttgtattgatgggattataagctgctgtggtatctaaatgccatctaacctccggattcgatctgattagattagatcgttttgcgtgcgaaccaaaggcaaataatatgtatatatattatattattatatatatataataatatatatatatatataattgtggcaggctccatcgctaccgactgactgaacaactaaataagcctgccaagtggggaatgttatgatgcaaacaataactgggtaactcgtacagcagtttaagactcaaactagaacttataatcagaactagcttaactctcacgtactttgtctctgcaggaataacgttggttttctccgtcgacgaagtcttttcataaagcgtggtggagcgacgtggaatgatgccacttgtgccgctgaccgtgcgattgccattcgtcggatcgtacttcgttgccgttcgcggcttggcgggactgttcagtgctgtgaattcagtattaatattagtctctttgctcatttcatcaatcattatattagcacttactggtgtctgccgtggtgagcatcttttgtgtggccgaagcgggtctctgattttgagcggccagtcgcgctgtgttctccttaatcgtagccgagtcgattgtgttctgtcgcttaaagttgctgccactgccgagggcaattttaagtgtaaaatttatagcacataatttgtcaagctacttacactgatgctcgatccgccgctgatcctgcagcattgtagttattgcttggattaaccgcaccaacggctcccgtggccgccgcaactgttgctgccgcatttgtcggtccaacacctaaaaaaaaacattttatcgtacattaaaatgggtacttccgcacattggcacaaagtttaaccttagtaaaaaatttcttgggcaaaactactgacgattgacgattaactagcgcatatcggattagttattttaaaaggaaaggttagactaagctttctgtacaaatgtcggtttcctaatcctgtagttcgaccaagaaagtttttactcttgattaaatatagatgaatcgttagccccaaagtgggacttacgcaaagtttccgcaccagacgaggctcggcgacttggcttcgtgctagacgccgatatgctcctgtggactcctctgtgcgtgggactctgaacactcgcactaccagcattggcgcccgcatcattacccgagatgttgcgcagtgagagcgaggagccagaccgcgatccgtcactttccggctgcgtggaaggaaatagtcttttagcacttctgttgttcggaatgtgaaggccaccaacttacgtctgtactcttgcgacccagcagcaaatatgtggcgaaaacatcgtcgtagcgcacctgggagagcgaagcctcgatctccgatcgattgtagcccatcgcgactagagcttctaaacatcgcgatgcgaaaatgacagacaatttgattgtgagtgaaaggtttttaaagacattcaatggagattttaatacgattaggtaacgcatgcaaatttattacagttacattatatatttggctatgaaatcaccgatactcgaactgatatagttcgatgtcgagtagccggaattgtgtgttcttttggccttcaactgaacaattggcagtaagaacgttggataaaaagaaatcaggtatatatgtatgtatttagatcatgcagttagcgaaattaaataatacaattatcatcggcgtgacaggacccaaaccggatgcaatctcgaatttatctcagagaacctcatttatttgtttgttcgtatatttgtgcacatatcagcagatatttacactcgcaacaagtaaaataaaaatcaataaaagataacaagatcatacaacaaaaattcgattttcccttggctggctgttcaagattgatttaattttaagattatccgttctcttgagctggtttgatatcttccttgacggtctgtttgtatgtagaattttgaggacagaaagtgagaaagagaacagagagttgggggttaatgcggaactctggggatcgagcgttaacgtttccactacacagattgcatacatttttaggtggacccttccgctcgtcgatcagaaagttgaccattaacatcaaggtgtacgcactacgccgaatcgagagcgaattcttggcaccggtttgtgaccccgcagctatgtgagaatttacaaacaaaacaccatgaaggtaattgaatttaaaatacaaacatcaggataacgcaacactgggagaacccaagtaaaaggaattctgtaagcaacattcaactacaaaatgaaaacaagttgataaagaaagagtttacaaaggaactagtagtattacattacataaacaaagatcgcttgataacagcaataaaacacaacgagcaattggcaggcaaaactccattccacacacaattcgttaataatattagtaataaattttgtatacagtacccgtcttacctatccgcttgggatcggctaaatcggctttgggctcaatatagggcttgagttcgtcctcctcaaaccccatgttcatccacttgtcgcccatgattgtttccagactagcacgctttgcgggattcagtactaagaatttgcggagcaagttttcgcagtcagtcgacatatagaagggaattctgtggggataagcggtttggtttagttccatttactttcattttatcttgcaacacttacctatatttgcctctgagcacgcgttcacgcaactccctcaaggtggagccgtcgaagggcagggaaccgctcactaacgtatacaggatgacgcccagcgaccaaacatcgacctccggtccgtcgtactttttgccctgaaacagctccggtgccgcatatggcgggctaccgcagaacgtgtccagctttgagccgggtgtgaactcgttcgaaaagccaaagtcagcgattttgatgttcagttcgctgtccagcaaaaggttttcagcttttaagtccctgttataaataaataattccggttaataaggtgccaactataataatgggcctttggtttgtcctagcctgtttatataaatcatctgattttaattagcattgattactcttacctgtgaattattcttttttgatgacaatattgcacggctgagacgatttgtcgaaacttaactcgcgcctccttctccttcatgcgtccgtggagaaccaggtagtcgaagacttctccgccagatgcgtactccatgatcagatagagcgtcttctccgtttcgattacttggaacaatttaactatgttggggtgatccagcatcttcattattctaacctgtgggcagagtacgattagtaaataagtcaaggtattcttttaagctaagtacaaacctctctaaagagtttctgtagtgacccaggattgagttgggtcttgtcaattatcttgatggcgacctccttgccagtgggcaggtgtttcgctagtttcaccttggcaaaattgcccttgccgatcgtctttatgagtttgtatttgccaatatgctcctcagtagcacgccatcgcataggagcactactccgcatttgcatgttaggcgaaccctgtaaaaacaatggtcaggggtaagtaaagttatgtattttggtgtgcatcaggtgtcggttataatttatatataaaacccaacatttctgtgacaatcctgatttatgaccctttaaaaaccgcattgctaacgattaatagttatattaaatgcgattttaaaccacagtggtattgctttctctgaaccaaatgatgaaaattatattgaaatatggtagataaaaatggattttggtttttatcccgtttacctgcgcagcattgttgctgtacacattgctgcggtttgccaccacgctgggtacgcggctagtgggatgatgtcctacaggcgggtgagttgaggctgttcctgacctcgactcgtgtcccgaatgggatcttggatcaacgctgtgtctggtcgagctggtcacatgctctgctcgactggaattgtacggaggaataggagccacaatcggccggtccgaacgtcttttcgaactggctgcattacttcctgttcccgaggcaccagatgctccatgacgatgtgaggatttttgggccaacaaagcttcaaattgtcgcaaattctcctcacgccgcttagacgctgaaatggtagtggccgtaagcttagatggagccactccatccaccacgctgctgctgctaccgccacgactggccgagccggaggtggacgtggtggaggaggagctcctggccgccggagtgggtccagtgccagctggtcgccataccgctggctgtttctcgtcctgcaagtgctgcttctgcttaaaagtggccctcatggccagcaccgtatcattattcttcgtatcggaggcagtacgtgccagtttagccttcacagcatttgctccgtttgcggcagcagccgagttcttggaataggctccgatcgagttacgaccatcgctgccgcgctggaattccgataacatcagctcattgctgtcatccagttctcctgcccgcctgccgcccaaatactgaaaatcattctcggaggacatgtcactaatgcccggtcgcagaaggttttccgtttcaccgtagcgcttgctctgcttgcgcttgatctccagtttcatcacgtccatcgatgattgggattgttggttttgctgctgttgcttaaagctctcctccacgttatggatgtgcttctcgatggagccgagggcaaaggacacaccggcatcgtcttcggtggacagaaggcgtggcattggcggcttttggcgttctttgggcgtgggatgcggctgtagggtgggtagagccgatacggctatcctgggcaatggagtggcttgggcatcacgtcgtcgaagctccactatgctgtcgtcttcggtggctccatcgagatccttgttggcaagatgtgtttgacgcagttccatttccttttccgtttccggcaagttactgctgctattgttgttgttgctgctgtggttgctgttctggttactagatggcgccacactgagcttgggcggcgcaggtgccgcccccttgcgggcggcatacagccggacactcttcctggtggcatcgccgcgattcaagtcaggtgttgtggtagtggtggcctccatagctcctccgttttgctgctgatttcggtttttctgttttttttctcttaaatttttttgtcgtggcactcttcccttgagtgtgttggtgcacaagtacttgttgctcggagagatcgcaactttttcttttttcttatttctttttcaagttgcgcttggcgtgtttattgttcttacactgtgagtttggggaaaattattaaattggtcttggggcttcggaagtacaatgcagctcacaccgacaggagtaagtgcttgtgtgtgcgttcgtttgcattgggctttctaaattctcaacgttacttttgtttgttttttgtcgtctaaccaacacacaacaagtcgcagttgttgcgcattaaaacctcgaaaatgaattaaacacacagctagcaacttccatttctacgtatgtacatatgtatgtacagatgggcggacgggaagcgtgtgtgcgtgatatttacgacaacaggcggacaagagctaatctgtctccccggtgacactgaaataaacacacggcaggcgatgtggggatgtgaaagggagggcaatatacctaaacacacaattacatacatagcaaaagagagtgcgcgagagagaaaagcgaagtggcacctacacacctgtggtggaggtgagctcttgtgcgtgtgtttgttttcggtctctctctaaattgctctctcctatttctactgctgttgcacaagctcagctgagatgccctcgctctctctcgtgtgtgtgtcacgcttttcctgtccccacccccaccctcctctcccacgctctcttttcagttttatgattcatttgccttttcgctattttcctttgttgcttttaattactgtctaaatagttacgatgtggagatctacaagtatctgaacaattcgtccgtacgagtcgtttagttgctggctggttatattccatttttattcgtcgctgcttcagtgagcaaagcgaaaagctccaatgcacacacacagacacacacatgcacggtcgcaccaacacattgaagcaaatgaactacttttagacaattgagccgactttttcactgctgaaaaacacagttaggctatatacattggtcgtttgatagtgtgtgagtattttctttctttttttttcacttggtctgtggactataaaaaatcacatttcgcgcaaatcccgattattaaaaggttcgtttcgttggccggaggagttctttaaccacacacggttatcttatcgcagaggcacgcggctttcgcaatttttcgcactcattttacgtgggggtttgggtattcgtactaaattatagctcctcctctgcaactctgacgtaaacgtcgtcgacaggctacgactacaactatacgatttacaccaacaaaaaacagcaaaacacagaagacaccgaaaaacaaagctaaacagggctcagcagccaaagagccacttggccactcagcaactggaactggagtgccggagagcgagagcgcggagtattccaaaagcacggaatcgcttcgagcagcgacgtcgactgcggcagcggcgtcggccttaatacaccaacacaccagcacaagcacacgatcagtgggcagctctctccactggtggagcactactaccattaatacagtatctctatccgtatctgcatctgtgtacttgttctcccacaaagagaagccccgtttggagctcgaaagttttgagagtgtatgagtgtgcgagtaccactgagcgtaacgctgggaaagaaactgttagccgtgtttgctgcagggtttagtgttctgcgcatgtgcgcaatatataagttccaccaagttacgcaaagcgcttcttccctgatttactgcgattaaagtaacattcggttggactttggttttctattaaaatcaatcaattacccaataagttcaactgcttcctttaaagttaatcagttgattaggtgatgcattacgtaagagttctaagtaataaaaccaaaaggacatgatgtctgaagtctgagtcggaattctacggtcgtcgcgaagatttcactaatcaacttcccccgttcccctgttttactctatatcaatcaccagaatacaaagaccgaggaatacacacagtttggtactaaaaatgcaatcccgaaagaacattattatgaacatcttgtcgtcaaataattgtaagtcatttgtcagccgacacaataaaatttgtgaataaaatatatagagacacgagtgatacgacataaacgaaacacattaggtatacttaaaaataaataatctggaaaatagagaaactctcattttaagatatcaaaaagtgtctcatatgaaattcgatcattctgtcaatttgtaactcgccaagtttggttttaatttattcatacgaggtatcaagtagctgagcctgtataaagtgtccgtattaattaagctaattgaataacttgcagcttaatctacattaagacaagacagcgagatttcagtcaagcctttcaggtcccaaacaaaaacattaaagatagaatttcatttttcgcatgctagctaacaggaaaatctaatgaggtcaactattatgaacttgtcctccggacaatgcaatcgtatagttatagaaacagagagcccgtaatccctataatcccctaatctttaaacgtatttgcgttgggtttttatgtagcacttgtgcgattagactgaaaatatatattagtttccatatggattataggaattcaatgtggggtaacaaaaatctgaaattaaacaaaatccgtaatcaaaataatagaaatcgttattcattcgattgtggaaaaaaaaccaaaaaccgtgacagatacagacaaaaacgaaacagcgattacgattagattgaatgaaggtggcagcacaacaacgataaatttgcaatgttcataaatgaatggggaagtgtgagagaccgacaaactttaatcacaacaaatataaccttattgccccactcttttgaaatgaagtagcaaggtcaagtgtagttttgctcaagagcctaggaaagtttctaaatcacataattgccaatatcgcaagctcccaatataaatcctcctatatcttctattatattaattatgcaatagtatctaacgggttaccgttaccgtcgatggatttcgataaaatgtaagcaaccatcgataatatcgataaatttatatccaatattacataccctcgagttgcgagccttgtcactggatgatgccgactccttggccttgggcctttccgccttactggtggccacaatgggcaagccgccgttttcgatcattgtcaccacaatcttattgttccgactgcttacggtgccaccaccaccaccgcttgcgtaggatgagttcgccgccgcagctgaggctgcatttgtggccgctagattcttctgccgcagggcgttcgatagccgttgcttgcgttccgctcgggcctcctccttttcccgctgcaacttggcaatagtggcgggcgtgtggctcttggagcgctttagaaatctcatcagttggctcttaacattggtggcggcacttccatttccctggcttgtggcatcgcctatttcctctgccctgctggatcttcgggatatttgagccttggtgggtacctccaggcgacggaagaccccatcggccattcggacgaaacagccctccgacatcttgtgaaaggagtcggatggcagtttgtgaaaatcgccattgggactgcgatagtagcagtgatccgtccgatgatagccatctcccacaatataaaactcattgcgcccctccttgggcgccacagctgctgctgctgaagccgaggattcggcagccaggtcgtcagtcttggcacttcgatccacgggcagttggaaggccattagttgggtgatgctactactgctcccaccagcagcatcctctgctgtaataggcaggacactacccgaagtcccctgcccggtattaactggtttcagctcactgatcgttaccggacgacgttccgggttcttgcgcataatgcttccattgcgcagaagtgaatctcgcaggagagagagctcatccttacgcaatggttgcaccaatgtggggtaatgtttcgaagacgaagtcgatttgcgggtagaggttcgacgatttccaaactgtgaagccggttgtggtggttcctccttgttgttgttattgctactgtggtgcatctgccggtgactggaagtctggcccatggtaggtgctttggtggttttgcggtgggtggttcacttggttgtttcgtggttgggttgcggtggtatttcttcgttctcgacgcgactcggtgttcacggtatacggattattggcccagttgcaacgaaactgagacacatattccctcgttcttcgctttggcaattatcacagcgaatttcgtgtgtaaacattgagagatgcgcgcgtatacgtgtgcataaaagtatgaataaattttgttcgttttgtgtattttgtggcacaacaatcacaattcaggcgcagctttgtcgcttttatttcgaaaagaccatcttgttaaattctattagagcacaatgagtgaacattggagaagcaatcgcagtaaaagtcacagtctctcggtcactaaattgcaaacacattcaccgtgccaatcttactgagcacaaataattgggattcgcaatgcacagagtaaaacaataacaatcataagaactgataggtccattaagcaagccgcttattcagttaaagaaggtatggagaattttgaatagcacaactaaattttcttgttgaatatgaaagtaccacatatatctttgaatcttatatgaacgtatctagtcttgtcattcacaaatttatggttatatgacaattgtaaattcttttctgaaaagtttaaaattgggactaataagtgttgctaaatatttgtgtctctgtgcatgaagaatatgttatctttgctttcttctaggatatttgtaaacttgttgcttacatgacgcgtaagggggttttaaaaagtgaagggtgggtgcttttagataacaacacatgtctcttatcagttatcgcactttacacatctctctccgtgtgagtgtctccgttttttttttgtggacacaagacactcgcgataagttccacaaccgttccagctgggtttgcttttgaatggctaaatgtgtatttgagagtccgtcgctgtgcggtttgtggatcgtaagccttggcacgcccgatacagatacgcagatacacagatagtagaagaccagcaacaaaaacaacaacaacaaaataagcgttaaagagacaacgatgaagccccacacattgctgttgctatttctgtgattccctctcgctctctacgcttccccgtgtcactctttccctctgtccagtagttgttgctattcttctgctagttacctcgtttaagcgttacttacacgcacactagcgcacagcgactgttgcttttgcgcgtgtgtgttttgggtaggaatttgttcgtttttttccttttcattccgctttcgttcttttcgcttgcactactactgtttttcttcattttttttttttttttgtatttcttgtcataccgtactttataattaaattaacttatcacccgcaattggctcatttctcaatgtatctgcgagttgaagtggttggctcaaaaaaagctggatacatttcactggaactgcaacacacacacacacaaacacacacaaacacacatttatatgcgcactcatacacagcgagtccaagctggaaatttataaattaaacactatttaaccgaatttatttataaacacacgtgcgtgtgtacttagtcagttagagtgtgagagcgactgtgacttttcctacgtcaattcggtttattttaagctgcgtactcatgcccttgatttcattctaagtgagcttagctgatcggattagccagtgacgttgttctttatcgcggatgttgtaacgcctgcgatttggattcggatcacaacgatgacaactgcgcttcagcttttttgcaatctcttcgccttacttctgttgtttttttctttatttttcgcgttttgtattgtttgacgtaacgcccttgtgcttgtgcgataataactggtcacaatggcaaacggcaaattataaattgaaagtaacaaaaataacaacaagaataccaggggagtcaactcatcgcggggcgataacgatacaggctaggcgatatagcaacgatatcggcggagagcgacggttaatgacaacagaaaacagcgcgacgacggtgaccacacgaatgaagtggaacttaatactaaaacaagctttcgaccatcgctgctgtatgctggctacttttgccattgtggctgccgccactgtggattgtaattctgtggatgtggcgagcgagcgagcgagcttggcatttttgccaaagttctgcgtctgggaaggtcgttgttgttgttgttgctgtagctactccaagacaacaacgacacaccctatgaaaatcgtatgcaatctgcaggtaagtgcaggtgattcatacacccacacatgcacacttactcaaaaaaactggtagaaaccacacatatttctcgaaaaacattgaaaaactttaaagagaaggagagagaactcggaagagctttggcaaagggatccccagtttgggaacctgtctgcgagccgagcttaaagcccacataaacatcaactcagcataatttaaaaagacttccactggaaattccaagatagagaagtaaagattccagtatgtagcttcttaaggaatcgaaatctttaaagatttgaaaagaatctgtcaaaaatgaatattccatgcgtaaaacaaatcattttttaagataaccttaaaaatgtaatttttgtaatatttttagtgttataaaaacaataaaattgaagttaaaacaagatagaaacccaacaacttttgtaaaacttcggataagtatatgatcatcttgatcttcatcacactaagaagaaggaattaaagaggatataactagccaaagaaaagacgttataagttagtcactcacgattccacacctaacgtccacaaaggcaactagttaagcttatttacctacaccacgtaaactattcaagtgtatgcatgtcggatacaaacacacaaactaaggcaaaaaattatttaaaatcaaaacagttatatgattgtgcggagaggagtacgaatcacacggatttgttgtggacaacaaagataaaggcagagaaacagagaggagatagaacgaccgacgtgatgtgattattgagaattgtttaaatactataattgcacttctgaatggacgtcgtcagctgtattgactcagacttttagtttttcgaatgaagcaaagtccactcatttagtatgtacgtatatcatttaaactaccaattatcaagtacccaaaataaacggtaacagtaccacccaaagttttcgtaaaaaggtaaataaggtgacagttatatttttatatgtccaactcattaaataggtcccagatatagaatattcttggataccaacccatttgtcgtgttaaaggagttcactgaacttgtcgatttaaaactgtagcacggtacacaacgatatagattttatttaactgtgttcacagtgatgatgatacatatatgtaagaaaaacaatgagatgtatacgaggtttcgattactcataatatgagacatcagttattctagataaaattcagaaaactaaacgttactgtataagcagacagatttataattctgatatatgatatgatttttaaaatacgtttttaaaatgcatttatatataaatttcccccacctgacaaaacacagcgttacttttcgtacgacacatttgacacacacgaaggcgaagcttagattcgaatcagttatatccagcagtatggtatttcttattcaacaagctgattgaaactttaagagtcttcacttcaccttcgacaggctaccttcccttgataccctctataaatggaccacaagaaaactgatgacccaagccacattgcaggagcaaacaagagatgggttgatgaacaaggcccccaaaaaaacggactaggggacgtggggacgggtgataggtacggacactgacgaaacccaaagaaggactcaccttggcggacgaggttcgttgcttgatcgcggagggatgagccgagtgggtgctaagcacgttcttgttgacggtgggcgccactccactgccgggggtgtggtgatggtggtggttaatcgctgagctcgccaccaccgccgaattgttgctggacaagcgggcaccgtcggtggtcatgttgttggccacatggtggtggtgttggtggctgtgctggtgcgagtgattggtgttggccgctgacgccgaaacggtcgctggaccctgggaaacagatcccactccacctgtcgctgccgcccccgaggccggcgtgggcgtggccgcagtgctattgctggtggccgaattcgaggacgttacaatgggcatcattgtgttagtgttggcgactggcgttgtcgttggtggcagtgacacaatgtttgcattggccgaatcatgctgctgctgctgctgttgctgctgctgatccttgaccgaatgcgaggatgtgctgatcgagttggtggcgtaggtggcggttgtgctggagacggcggccagtggtggcaccgcgtttgttgcgctcgatactggcgccgccggtgctgctacattggatgctgtgccattggacacgctatccgctggcagggcctcaggaactgactgcagtgtggtgcgcattgctgtcgacatatttttaaacagtccaatagggattcttagagattctgcacgtgagattcgagtattttcgggagtctttcaggtttcggtgcttaaaagtagtcaaatgcccaatgggtttctatcatccgtggtactccttcacatctgcaagaaataaatgcacgcaattagtatggatctaaacaaagcagactacttgtatctttcggcacctataatatgactggccattcacttgccattatcaaaaacgtagccaattaccggctccgattaccgacctcaagccataacactttagaggcacaataaaaaaaataatctcctttgtctgcttgagtttactggcttcgtccacacaaagtaatgcagaaaatcaagttgaccactcaatacgaaacactagaagcagattactcagacattacgagtgtaaattactattatccgttatccaaatattaaaattatgttttctaaaggcaaggatcttaaggtactttaatattaattagtcgtaatattatattgacgttattaaagctgcattgaaattaaacattacattttataacataagcaacaaaatcggaatcccaatgaatggggaatttaattattaaattactatcttaattaattcaaatattaatggaaagctgattacgcgaactaacttttacagtactatttttaggagtcttatggtatctt

SEQ ID NO: 17249 - DNA, 2601 bp, DROSOPHILA
ccaacactaacacaatgatgcccattgtaacgtcctcgaattcggccaccagcaatagcactgcggccacgcccacgccggcctcgggggcggcagcgacaggtggagtgggatctgtttcccagggtccagcgaccgtttcggcgtcagcggccaacaccaatcactcgcaccagcacagccaccaacaccaccaccatgtggccaacaacatgaccaccgacggtgcccgcttgtccagcaacaattcggcggtggtggcgagctcagcgattaaccaccaccatcaccacacccccggcagtggagtggcgcccaccgtcaacaagaacgtgcttagcacccactcggctcatccctccgcgatcaagcaacgaacctcgtccgccaagggttcgcctaacatgcaaatgcggagtagtgctcctatgcgatggcgtgctactgaggagcatattggcaaatacaaactcataaagacgatcggcaagggcaattttgccaaggtgaaactagcgaaacacctgcccactggcaaggaggtcgccatcaagataattgacaagacccaactcaatcctgggtcactacagaaactctttagagaggttagaataatgaagatgctggatcaccccaacatagttaaattgttccaagtaatcgaaacggagaagacgctctatctgatcatggagtacgcatctggcggagaagtcttcgactacctggttctccacggacgcatgaaggagaaggaggcgcgagttaagtttcgacaaatcgtctcagccgtgcaatattgtcatcaaaaaagaataattcacagggacttaaaagctgaaaaccttttgctggacagcgaactgaacatcaaaatcgctgactttggcttttcgaacgagttcacacccggctcaaagctggacacgttctgcggtagcccgccatatgcggcaccggagctgtttcagggcaaaaagtacgacggaccggaggtcgatgtttggtcgctgggcgtcatcctgtatacgttagtgagcggttccctgcccttcgacggctccaccttgagggagttgcgtgaacgcgtgctcagaggcaaatatagaattcccttctatatgtcgactgactgcgaaaacttgctccgcaaattcttagtactgaatcccgcaaagcgtgctagtctggaaacaatcatgggcgacaagtggatgaacatggggtttgaggaggacgaactcaagccctatattgagcccaaagccgatttagccgatcccaagcggataggtaagacggaagctctagtcgcgatgggctacaatcgatcggagatcgaggcttcgctctcccaggtgcgctacgacgatgttttcgccacatatttgctgctgggtcgcaagagtacagacccggaaagtgacggatcgcggtctggctcctcgctctcactgcgcaacatctcgggtaatgatgcgggcgccaatgctggtagtgcgagtgttcagagtcccacgcacagaggagtccacaggagcatatcggcgtctagcacgaagccaagtcgccgagcctcgtctggtgttggaccgacaaatgcggcagcaacagttgcggcggccacgggagccgttggtgcggttaatccaagcaataactacaatgctgcaggatcagcggcggatcgagcatcagttggcagcaactttaagcgacagaacacaatcgactcggctacgattaaggagaacacagcgcgactggccgctcaaaatcagagacccgcttcggccacacaaaagatgctcaccacggcagacaccacactgaacagtcccgccaagccgcgaacggcaacgaagtacgatccgacgaatggcaatcgcacggtcagcggcacaagtggcatcattccacgtcgctccaccacgctttatgaaaagacttcgtcgacggagaaaaccaacgttattcctgcagagacaaacagtggatcggcagctcccgctggaaaaggtcataccaaaagcgcgtctgtctcgagccctcgcccctctacagacggctgcgtctcggtctcaaatgacccgctcggaacgagagcacgaaacaacacagcgctggaatactcgggcaccagcggtgcctccggcgactcctcccatccgggtcgcatgagcttcttctccaaactctcctcacgttttagcaaacggccaaaccagtaattaacaaaacaagcattaactacttcttgttaatagttctaaaactgaaactgaaacaaacgattcccctagagtaaacgcgcgtgacggagaggttcagatatgaacagacagacacagatatggtcgaatccaatcggatcgctcggatcggatcagatcgggaaacgatactgttcacgttgccgttgccgatccgaaatcgctttcgaattccatttcgagttcagatccgtttccggtttcgattcgaaccccttcaaatgaacaccgacaacgttgagttccgttgcgttaattgaaatttcacaaatacgcctatgttttattacaattattaactaattatacatataaatttatataa

SEQ ID NO: 17250 - protein, 739 aa, DROSOPHILA
MMPIVTSSNSATSNSTAATPTPASGAAATGGVGSVSQGPATVSASAANTNHSHQHSHQHHHHVANNMTTDGARLSSNNSAVVASSAINHHHHHTPGSGVAPTVNKNVLSTHSAHPSAIKQRTSSAKGSPNMQMRSSAPMRWRATEEHIGKYKLIKTIGKGNFAKVKLAKHLPTGKEVAIKIIDKTQLNPGSLQKLFREVRIMKMLDHPNIVKLFQVIETEKTLYLIMEYASGGEVFDYLVLHGRMKEKEARVKFRQIVSAVQYCHQKRIIHRDLKAENLLLDSELNIKIADFGFSNEFTPGSKLDTFCGSPPYAAPELFQGKKYDGPEVDVWSLGVILYTLVSGSLPFDGSTLRELRERVLRGKYRIPFYMSTDCENLLRKFLVLNPAKRASLETIMGDKWMNMGFEEDELKPYIEPKADLADPKRIGKTEALVAMGYNRSEIEASLSQVRYDDVFATYLLLGRKSTDPESDGSRSGSSLSLRNISGNDAGANAGSASVQSPTHRGVHRSISASSTKPSRRASSGVGPTNAAATVAAATGAVGAVNPSNNYNAAGSAADRASVGSNFKRQNTIDSATIKENTARLAAQNQRPASATQKMLTTADTTLNSPAKPRTATKYDPTNGNRTVSGTSGIIPRRSTTLYEKTSSTEKTNVIPAETNSGSAAPAGKGHTKSASVSSPRPSTDGCVSVSNDPLGTRARNNTALEYSGTSGASGDSSHPGRMSFFSKLSSRFSKRPNQ

SEQ ID NO: 17251 - DNA, 13037 bp, DROSOPHILA
aaaatggctgtatcgattatatataatacataaatatttgttttgtttttatatattgtataatttccctttgtgttttacgtttacacttcatgcaaaagaagttgaaaactgttaagtacatataaaaaatatgaatattcagccttgttctgaacacagcttgcaaacgaatcagaaaactaatgaatcccttagaaatctcaagaaatattgtgcttttggatcaataataaacttagttttaatgaaaagaaatatgtaattacggaattaatcttaaagagcaatcggaattcagaccaaggctggttattataactatttacagatattgtaaaatacttgacaaaatgagttaaaaaactcttacaaagtcaaagctatgatttcatggattcttactaaatttctgctcaagatccttaagtttgttttgcatcgatgatccgaaaatggaaaatggaaagataaatgtttactcggatatcagacagtcggcattaatcgtatttatgtttatatacacagctataattcacattatatatttcgcttactaatttgttatatgttgactggttagaaagagtttcgtgttcgtctttacccgtatttgctgttgcagaagtgtcaaatcataaatgttgtacgcatcacaatcggtatataaaatggtttatgttttatgttttatggaggatatgattaagataaaggaaggaccgaagaagacaagctgtggccatcgtcagatattccgatactacaaatttaaggtacgagatgtaagatgtaagatgtaagatactaacatgcaatccctcagttagaggtggatttggagaatctgatgagggggttcgagtgctgaaactgaaaatggtaaaatgggaaaccaaacagataatgataatctcgctatcagttgttgctgcacgaatttcggattaatcagagttttgctcggtttaagtttgcaatttgttttccattttattatcgctcttgcttacgctcttaccgatctacaatttacaatctacgaaattacatcgctacataattattgttaaatatttttgttttttcgttttgctttactcggttttgttttggattttaaaatattatcgttatcattatagtttatattatatctttattattatgatgcttatgctgtcgtatctcttgccgccatcgcataaacatgcttttatgtttgcagttacgaatacaattaaaattattaccttgtacaaaaaataataataataatagcatacaatagtagttttcttctgcaactccctacatctctctcagatcagttgcctctgaagttccattccttagttaaaaaaactaaatgtagtttaatgtgttttctttccgtttaagttacaggataagttaatttaatttacgtacattgaaaaatgttgttattactcttttgtttttgtttttacgggctgccctgacttgcctcgccccaacttttgggttcggggtggtgccggatggggccgatgggtcgtcggtggagcagcccggctaaagcgcgtggttctgaaacggcgtaagccggagagaagtgctttcttctccatcgttacaactaatcgtatcactaaacatagttttattacaagtaattcttgctgttatcttgtgtgtttcgcaattattatcgaatatttacagtttgctatttaacacttgagtttttgctgtggttgttggtgttggacaggagtgggagaatggagcttggataggattggttgacatctgtagcccaagagaaagagccaagttctctgtatgcattttcatatacattgtacatatatatatatattttgttttattattttaattcttattatggttttagggttaggcgatcttgaaaaataagacctacatcattatacacacatatgcttctatatataggctatagaaaatcaaattaagcgaactttgttaatggtggcattcaactatacaatatctcatattcatcccgctctcttggccctttctactctggctaacagattccccttctgatgtttacatttcgcttctgaataagcttttcagaaaatcgtattttattcacaccaacaaggtggaaggtttcgtgggagtgcgcgggttttgtgtatgcgtatgaacttctgaaaaacatactaactgattggctttagaccagctcgctcttgttcaccaaacaaacggtgcagctgcagtgatgctgctgcaggagctggcccaaggccacgtgggcgtccgccaaaggcatggatatggccaccgcctgggtttccgcctccgtttgcgttgatgccaaactgagcagagggccgttgggcacttgcaagggttgtgctcgatgttagctgttgctgccgctgccatccgcgtctcatctgttgatggttgacgtcacaccagctcccccaacacccgcgcctgtagatcctcctccgccagctcctgtggcattgacaccgctgttcaaaggtcctccatttccgccagctccactgccattgttgttattattgttgttgctcgtgggcagcacaactcctccgttgttagcgctggctatcacctgctccactgtcagggctttccccacttcctttgcactaagtaggttgccatcttggctgctcacgttgttcgcattcgtggtaaccaactgcctaatagtcgtggtggtaggacctacagcaccgccggtactgttaacagttgtgcccagcggcagcgttctagtaatgatcgctgaattgttgagtcgtccacggagcacctgttgcaatcctcccggtcccagttgcatctgcatctgaccactgttgttcttctgcagcggtttcacattcagcagactggtgtacagcactcgcttatcgccctggccagtttgagaatttcctgtagtggccaacgttttcagcttttgatgctgctgttgttgctgctgctgttgggatttgttcagcagcactgttgtggcgcccacctgctgcgtttgctcacccgtccctgcactgctcacaaagttcagcttgaggttggagttgggcagctccttgtagtgaagcttttggccggctgccgccgcctgcagttcgctggcagtggcgatggtaaagttaccagcggatccgccgccaccactgttgctgctggtcaagaagatcttgttggcctgctggggtgtcgcctgggcggtgatgatcgccgttgaggcagggtgcaggctgtagttgtgattagctgcaatcgccgccgcagagttgggctttaattgttgctgctgagcttggccagacaccgactgctgctgctgcagacttacatccgacacgagcagtggaaactgcgacatcttgatcaccttgctgagcttctgcagctgctgctgttgttgctgctgttgctgttgttgttgcaggccgtcgccggtttccatctgatcgccactgttgcccgtcgatgtggccaccaagtcatccaactcctcatgctgcaccaattgttgaagctgctgctttgtcagttgaatctgttggtgctgttgttgtatttgctgcttgcgcggcaacttccgattgagaagaagtttgttgatgtctgcaatataaattaatgtttgaatatatgatggcagaagtataaagtatcaaacgacaaaaaaggaatttaaccgaaaaagtttagaaacgcaattgttattattgaactgctaatgtctaattgaaattgataacagaatcctcagggatttataaaggtaataaccttaaaataggaaggattcggacaacaaactattaaatgacattcgaaaggcgaattggttttcataaatcttaaatcgcgatccttggaaaccatctcttacctgtgttctctggcccgttgagctgccttttttgcgtggcccggctggtccagaggatctggttggttaccgccttcggcgaggagtccaccgtggtggagagcactgctgtggtggccaccgccgtgttcgttccgctcacctgccgccaaacaatcggttgctgctgcaccaactgctgctgttgctgctgcacattgttgcgagtgggtgtggcgacaagcaaaggcgtactggtggtcacctgttgcacctgttgctggccctgctgttgcataccggcaatgctgtgcacggctaactgctggccactggccgtgttgatgatgttcacactggatcctgagttgccactaccaccagaggagatatcatcgttctgcacctttacattggacagcgtgattactgtgttgggtccaattgaggcggtggttgctcctccacttgagacaccggctttctggatggcatatgtgaccttctgagacgcagaagctgcagctcctgctgtgacaatctcgccgcagcttgttgtgtagatcaaatggttgccagtggcgccagcgccggcagcttgtaggggcgtcagggagcgcgagggatcccgctgcatttggaagagtaactgctgctggggattctgattttgattggggttttgaggtgtcgcctgtcgctgctggacggtcacatttcggagttgagcctgtgccaattggtgctgcagttgttgctgggcggtgagtgtggggagtggactgctccccgtgtgcggggttatggtcactatatcgcccacagctgctcctccgccgtattctgtgcgggcgatgatctgcggaccagcgttggcaaactgattgagcaattgcgtcacctgtggctgctgatgctgcttttgcgtgcttatctgggcgggtatgttgatcagctgcgtcgtgggcaaagtaatagcctgcggctgaagctgttgcggctgtggggcaacgggaagaacctccgactggggtttctcaaccgcctcaaccttcacaggcaaattcgctgtttccttgaccacaacttccggcagttcaacttctgctggcgttttctctttgggcgggacttcaacaggcggagcttgactaaagaaaagttcacgttccttcagagtctccgccgtgggacacacagtaaatgcggagctacccactggagcttggatcaatcttgccttgcggttgcgacccgcgcgcttcgatgtatcggctgcacccaccttagatttcttctcgtctatacaatccaacagctgatcggccatttccacttcgtccacggctgcctcgccatctaggataccgttccaaaaattagtagcttggttcaatgccttgggatcatccatggcgcactcctgcaggatgttgtctagcatatgctcgtggttgtcgtcctcgtcgtcacagcccaacaagttgttgatatcgtttagggagtcaccaccactgagattaaactctagcgcagatcctgagcctgacccagagcagtttggactcttgctgctgcctcgagcgtagtcctgagcttggaccgtttgcagcaattgggcatctgactcgagatccctgtatttaaagccactgctcaaaaagtacgagctagaatcgctttcctctgcttctcgctttcctaagcgattgagttccacacttatgggcgtgtcctgcgtccagtcgacagcgtgactatcacacgtcttacccacttcgcaatcttggctatcggacagctcatctgtgggagttttgggccggaagtgtagccaatcgcgccggatctccgaaagcagctcattgcagatgtctagccgctggctggaagtgggcgacagtccacccatgtagtctgcattgaattcttcatcaacaggagcttgtacaaacaggtccttcggcctcgcatgcacttggctgttgcggatatttcgcaagcgaatcacgtcaggcagctggttcagacagggagcggcttcatcctcttccatcttcctggcggcctgcatctgttcatgctgtacttgttgctggtgctgctgggcctccagttccttcttgaccgccgtatgccggatgatactgctcagctgggcgagattgacatcgtcctcagcttcatcgtccatgagttcggagacagaggtctgcgtggacagcatgacagctgctgtacgaatgctgctcaggggctcgttggagtcgtcggcatcgatcatctcgcgctttatcgtcttcgccacctcctccagcgatggacccggattcggtgccgcaagagtggttgtcgatgaggctgcctccgctgcagcggctgcttcagcggcacgagcggcggccgctgccgccgaggtggaagctaccggttgatcctcgcatttgccgccgacgagctcctccgcctcctgctttatcacattgattttttcgctaatgctaacatccttattcataacgttactactactactattgttgttgttcaacacggtattgttgttgttgttgtggttggaacggtggtgttgctgatgattggctcgcgggggctgcagctgctccggatcattcatttccagcaactctggcgccacattctcggaaacttccgtgttatcatcctcttccacctttagtttttgtcccagaatcaatgccaaacgctgaaggtaagccctgggtaatggacgcagatctggtttagtatcctcgtcctccagttgaacatcttcagcggttgccaccgcttccgaagacctctttagacgctttgcggcattaagttctcgcaactgttgcttcttgcgacgcaggcggcgacgtttctggcgaagatcagcacaactttggggtaacgtaaccgctgaactgtagattccaagccgtgacacattctcatcgtcactggctacgaattcatcatctacatcgttctcaaatttctcctcaagctcccgttctttgctctcccgcccagattccgtcgcagcaacaggcttttctgtatcgcttgacggctcctcctttatcagttcaggaacaggatgctcaccatcgacgggctttccagcgggaaccagatctaccaccgtgggcggtgagctgggcttgcacagctgatcgggatcccgttgcttgattttatccctacatttgttgaccgtcacgctttccatcaccgtgtagtcaagctgcgaccaaaagtcgtcgaaattcgttgtggcccggtccagcaggatgcgaccgccacgacccaatcgacgacgtgcgaagccaatgcagcgtggtctgtaaaattagcccgatttggagtgagtatgggcatttacattggccaaagagaatggcaacaaacctgggataattgagggaggtcagtgtgtaacggtatttagcatccgaacaagcaccactgggcgccatatcctcgtcggctgagtcccacggatagcggccatctcgttgtcgagtctgttgtgcaaatgaaagcaattaaagtctgcgtaatctttagatccaagcacggattcaaaacacttaccggtaggtaaacacagcttgatctgcgcctaaatgcaaacggcgtctcctcctcgctctcggagcccagtttgtttccattctgggcaccggcgccaaagtagtcctcctcctcgctgtccgcaatcgagtcgttggctgccggcgaggcactctgctgcctgctgaggtggtgcagatggtggggcaggtggtgcgcgggcgagactccggcgccaccagacgccggcaaatactgttgttgctggtgctgctgcgtttgctgctgctggtgctgctgcttgtcgcggggcaatttgtgcttgcgcttcttgtatggacgcttctccttgcgactgctgtttccattcccactgccactgatggcatctagaagagcaattgaaaattcggttaaacagtgtgtgacaaaaataattttttctagagatggctttaagatttaggaaagaggtggacaaacaagctaaacaaaatattttatatttaaattaagaaaaggaagataacacgatatattaagaaaaactaacacgatgtatatgaaattaaaaaacaatgattatctatttttaaaaggcatattaataccaaaatggccaaataagttagtcaagcggacattgttaattattccacgacaatttcatttctgactgtatattccctgagcgatttaaagcagtgtgattaggacatctgcaattaaatactagatgtaatcccacccttacccattgtcagattcgacgagttcaggtactgggacgctgagccgaagacatttgcattgcctgccgctccagcaccgcccggcagcagacccgtgggcagggcggctagaatggcaccagccgttcccaccgccgccgccccttgtgagtattgattcgtatacaatggattatacgcgggtctgcaaataaacaaggagtatttcagtacctttcttcataagtaaaaggtgtccgaaaacgcaccttgtgttcttgtactgagaattcagctcggagtagacagcaccgttgaagtcgcgcatctcaacgcgcttctcgaagatgttcaccgtcatcttgagatgatcgcgcttcgtctcctcgcgtcgcctcaccatctccagtatagtggtggcgcgctgcaggtcacgtctagaggacagggaaagagtggattagttagggtcaggtatgaaaagctgggcaataaaatatgctggctaacgaaaactacctggctttttataaacaaaatgttgtatatgggaaaattcctgattaaggatatcatgcataaaaaacctgcatttaaatcgggcaggaattgaatttatatgatacagagaaagaaaatgtttgcaagttctgtgtccagtaattgcagtgtagcccgattagccagcatttaaaaatttctcaaccgactttaggcaaacttcactcgattcttaccgcagcttgagcatcttttcgtaggaggcctcatcgttctttcgatttttgcgggtttgcattttctcggtgcgacgacgaaaagccaagtacggattgttggagctggcgcctggtcgactctcagttttcacagtgaggatcagcgggtgttgctagagaatgaataagatagttgatttagtatattgccgtagccaatagccaagctaagtgtttattaccatcttgaggcgtttgttcagccagtaatcgtagacggatatgctggtctcgtcgtcctggttaagcagcgacttggcctcgttcagcgtgaccaccgtttggccggagctcttttctagccggtccatcatctgctcgaacttgagttcggtaagctccaggcgctgctgctgactgagccagtcctcatcggcactgtccatgtcgtagtcagggacctcggtatccagcccaagagctgagagttaaacaattgtaaaaaattagtccaagaataatacgaaactacataagttattgcatttcattcaatattgatatggaatttaaaaataatgttctaagcccgaaacgaaacgaattattctgctctagtagttgctttttgcttacgttgcatgtggatcatttggcggggcattttgtagtccggcggatagtaggcatcgtagaagggctgatccgtctgcagcacctcgggcgtggggatgatcagacccgtgcatatcgctcgctgcaagtggtgctcctacaagggataagggacaaaattagtttcatccaaaataaaggatcactgagaaacttcctaccgactcctcctccttctccatgccactgggcatttgaggcactgcccggttgatggctgagtactcggggaggtcgggcagctcctccgccaagtagatgggcatctgcttggacggatccaaatggcgggctctgaacgacagcttggacatcttgctggcttttgtttgggttttggttgtgggtggttttgggttgggttgttgtggtgtgtggaacgtttctatttgctgttgctgtggctgatttgagagtttgcctagtggaatcgactgcttaggtggctatggatgctaaggaggctacgattgctccggcggtccaactgcagtgggcaggactagtgctgcaactgctaatttggattctggaggatctactccgattcgtggtcggcgttgtgttggctcctctactcgatgtcgagggggctgtatacgttagctggagatggggcttgctggggtagaaaaggtgctgctgcttctgatcctgttcctgttcctgacaccgatcccgatcgtgagcaccggggctgcggtggctgtggctgctctgccagctggttaacgcagcccctgtgcccgttgccctggccgaagacgtagtgctactgctagtgaggattgggtgtggattggcgactatgtagggcgtgtcctcctcctccccctggacactctcccggcggtccgcctgccgctcgtcctcctcctccgcctccctctcctgtcgtcctccttgatcctcgggagctctggctgacagcgccgacagcaggacaatggccaaggaaacgatctggtggcaattacgacgacaacgcagtggtagcaacaacagtgacagtgaatgcagcaaatgtgtcgacgacatttttcacgttgaaatcgaaggttctgtgtgaattggcataattacgttcatcaaatttgcacatttcagttcatcatcgttttaggttaaatcaatattgtgttcttctttcttttgcttatttgttgacttcctcttcttgttattatttattattatttcgccttggctgtcgtgttatcggttggctgataaaaaatctagaattgataacaacaacaaaaactagtaagtaaacaactctcacacacacgcatacattgatatgtgagggcggcgcgcgcgggaaaaaactcacaaatccacatacatttgtatatttctttgcttttgcattaaattaatattaacacgcacaaaaacacgatccgcatgagtcatgattttttttttttatttaaatgcgataaaatgcaaaatcatagaaagccgagacgaagaaaaaggcggcataaacaaacacacgcgcgcaaacacacatctcaaacaaacgcggcgaatttaatactgccttttccgcgagatatttcactttgcagagccctgttagctaacattttgtttgtacagaactctgttaagtgagaaaaaaaaacgcaatcaaactccgcctcatgtgggttttgttttttgcttttatctagttaattagtaatcagccatcgagtgcgtatgtttttctgggccagcgctaattttttacacactttaccgcacttttcatgcatcagcgaacgcaatctggttgataaatcgcccgaaaaatttacacatataaacccgattttgcgtatagcgtggtttcgctggaaagcaataatggcggccagagagccgaacaccgacgacgccgcggacagcggggccgcgatttatttgtgccgtcggcggcgataacgataagcggtcgtcgatttaattgccgcaatttcactgcagggccctgtcatatatgggcaaaaattaaatatttactgctagaatttttaaattgctctaacatgacgttttcctttcaaaatatatatttcaaaaccgctacggttatcgattaatcgccgttggcagcgctaaatagccggcctcttattccgatgacactccgaacagtttgtcagcgccccctggcgagctcttcgagcactatgcccaacgctgcatgatttttttttcacaaacaaaaaaatcgattaagattttttcacgcacttttttcacactctttgccgggcgttggggcctcttatatgattaaatgatgtggttttcagcgtatttaccactgccgcaccgtttacagctaaattcaagcaattggcttagcgcaaacgcgtataatcgttcttcagcagcgggacacgtttttacttatgggcggccattacgaatgaaaattcggagttgtcggagtcgaacgaaatcgtcgccacagtggcgaaattattttggctaggcctccaggcgaaatagttaaccgttttgagtgcggttttcatctaaatctgtggaattttgtgaggggtcgcatgcatacatttggatagccggggccaagctgcatttatttattttgttgttaatttacgcagccccattcaccaggtgcccagctagtggtgtgcaaataattcggagtgctcatgcgctagtgcatttcgtgcgagctatcggaaacactcacaattgcggcatcggcaaagatgtgctaacgcatgggctttaacattcgaaatttataaaaaattgttaattcaaatttgtatttacaacttgtttgctgaacagtcgacattatagatatagttattaaatgagtaaaacaatttttgttttattttgtgtgctggatagcttagaattttatttggattctttaaattaaacttgtgcatacagcatacaaataataataactccactttgtaacttcctttaaatgcttttgttttattataatctcttacaaggcttttcgtactcgctgttttgcttaactttgtttatttgctggttacaatgtcttgatagtttcaaatgtgctcgttgacttaaagtttgctcaatttatattcgagaatacgattaaaatttactcgctagtccttaacaatttgtgggggtaatgctgatttggccaagcgattttgaatggtaacttatgtcgggcatttgtccagcaaagcgagttggaagcacctgcttagtaaaaagaaagcctcaaagccttatgcttgaaaagccccaagcagaagaagctcgatttgccaaaatcccgcgccgatcctccaacgttatttcagctgctttcgtatccttagttctttggcttctcattcggttcgttcgatcgtattatgtaatcatttttgggcaatg

SEQ ID NO: 17252 - DNA, 8603 bp, DROSOPHILA
gcccataagtaaaaacgtgtcccgctgctgaagaacgattatacgcgtttgcgctaagccaattgcttgaatttagctgtaaacggtgcggcagtggtaaatacgctgaaaaccacatcatttaatcatataagaggccccaacgcccggcaaagagtgtgaaaaaaattttttatcagccaaccgataacacgacagccaaggcgaaataataataaataataacaagaagaggaagtcaacaaataagcaaaagaaagaagaacacaatattgatttaacctaaaacgatgatgaactgaaatgtgcaaatttgatgaacgtaattatgccaattcacacagaaccttcgatttcaacgtgaaaaatgtcgtcgacacatttgctgcattcactgtcactgttgttgctaccactgcgttgtcgtcgtaattgccaccagatcgtttccttggccattgtcctgctgtcggcgctgtcagccagagctcccgaggatcaaggaggacgacaggagagggaggcggaggaggaggacgagcggcaggcggaccgccgggagagtgtccagggggaggaggaggacacgccctacatagtcgccaatccacacccaatcctcactagcagtagcactacgtcttcggccagggcaacgggcacaggggctgcgttaaccagctggcagagcagccacagccaccgcagccccggtgctcacgatcgggatcggtgtcaggaacaggaacaggatcagaagcagcagcaccttttctaccccagcaagccccatctccagctaacgtatacagccccctcgacatcgagtagaggagccaacacaacgccgaccacgaatcggagtagatcctccagaatccaaattagcagttgcagcactagtcctgcccactgcagttggaccgccggagcaatcgtagcctccttagcatccatagccacctaagcagtcgattccactaggcaaactctcaaatcagccacagcaacagcaaatagaaacgttccacacaccacaacaacccaacccaaaaccacccacaaccaaaacccaaacaaaagccagcaagatgtccaagctgtcgttcagagcccgccatttggatccgtccaagcagatgcccatctacttggcggaggagctgcccgacctccccgagtactcagccatcaaccgggcagtgcctcaaatgcccagtggcatggagaaggaggaggagtcggagcaccacttgcagcgagcgatatgcacgggtctgatcatccccacgcccgaggtgctgcagacggatcagcccttctacgatgcctactatccgccggactacaaaatgccccgccaaatgatccacatgcaacctcttgggctggataccgaggtccctgactacgacatggacagtgccgatgaggactggctcagtcagcagcagcgcctggagcttaccgaactcaagttcgagcagatgatggaccggctagaaaagagctccggccaaacggtggtcacgctgaacgaggccaagtcgctgcttaaccaggacgacgagaccagcatatccgtctacgattactggctgaacaaacgcctcaagatgcaacacccgctgatcctcactgtgaaaactgagagtcgaccaggcgccagctccaacaatccgtacttggcttttcgtcgtcgcaccgagaaaatgcaaacccgcaaaaatcgaaagaacgatgaggcctcctacgaaaagatgctcaagctgcgacgtgacctgcagcgcgccaccactatactggagatggtgaggcgacgcgaggagacgaagcgcgatcatctcaagatgacggtgaacatcttcgagaagcgcgttgagatgcgcgacttcaacggtgctgtctactccgagctgaattctcagtacaagaacacaagacccgcgtataatccattgtatacgaatcaatactcacaaggggcggcggcggtgggaacggctggtgccattctagccgccctgcccacgggtctgctgccgggcggtgctggagcggcaggcaatgcaaatgtcttcggctcagcgtcccagtacctgaactcgtcgaatctgacaatggatgccatcagtggcagtgggaatggaaacagcagtcgcaaggagaagcgtccatacaagaagcgcaagcacaaattgccccgcgacaagcagcagcaccagcagcagcaaacgcagcagcaccagcaacaacagtatttgccggcgtctggtggcgccggagtctcgcccgcgcaccacctgccccaccatctgcaccacctcagcaggcagcagagtgcctcgccggcagccaacgactcgattgcggacagcgaggaggaggactactttggcgccggtgcccagaatggaaacaaactgggctccgagagcgaggaggagacgccgtttgcatttaggcgcagatcaagctgtgtttacctaccgactcgacaacgagatggccgctatccgtgggactcagccgacgaggatatggcgcccagtggtgcttgttcggatgctaaataccgttacacactgacctccctcaattatcccagaccacgctgcattggcttcgcacgtcgtcgattgggtcgtggcggtcgcatcctgctggaccgggccacaacgaatttcgacgacttttggtcgcagcttgactacacggtgatggaaagcgtgacggtcaacaaatgtagggataaaatcaagcaacgggatcccgatcagctgtgcaagcccagctcaccgcccacggtggtagatctggttcccgctggaaagcccgtcgatggtgagcatcctgttcctgaactgataaaggaggagccgtcaagcgatacagaaaagcctgttgctgcgacggaatctgggcgggagagcaaagaacgggagcttgaggagaaatttgagaacgatgtagatgatgaattcgtagccagtgacgatgagaatgtgtcacggcttggaatctacagttcagcggttacgttaccccaaagttgtgctgatcttcgccagaaacgtcgccgcctgcgtcgcaagaagcaacagttgcgagaacttaatgccgcaaagcgtctaaagaggtcttcggaagcggtggcaaccgctgaagatgttcaactggaggacgaggatactaaaccagatctgcgtccattacccagggcttaccttcagcgtttggcattgattctgggacaaaaactaaaggtggaagaggatgataacacggaagtttccgagaatgtggcgccagagttgctggaaatgaatgatccggagcagctgcagcccccgcgagccaatcatcagcaacaccaccgttccaaccacaacaacaacaacaataccgtgttgaacaacaacaatagtagtagtagtaacgttatgaataaggatgttagcattagcgaaaaaatcaatgtgataaagcaggaggcggaggagctcgtcggcggcaaatgcgaggatcaaccggtagcttccacctcggcggcagcggccgccgctcgtgccgctgaagcagccgctgcagcggaggcagcctcatcgacaaccactcttgcggcaccgaatccgggtccatcgctggaggaggtggcgaagacgataaagcgcgagatgatcgatgccgacgactccaacgagcccctgagcagcattcgtacagcagctgtcatgctgtccacgcagacctctgtctccgaactcatggacgatgaagctgaggacgatgtcaatctcgcccagctgagcagtatcatccggcatacggcggtcaagaaggaactggaggcccagcagcaccagcaacaagtacagcatgaacagatgcaggccgccaggaagatggaagaggatgaagccgctccctgtctgaaccagctgcctgacgtgattcgcttgcgaaatatccgcaacagccaagtgcatgcgaggccgaaggacctgtttgtacaagctcctgttgatgaagaattcaatgcagactacatgggtggactgtcgcccacttccagccagcggctagacatctgcaatgagctgctttcggagatccggcgcgattggctacacttccggcccaaaactcccacagatgagctgtccgatagccaagattgcgaagtgggtaagacgtgtgatagtcacgctgtcgactggacgcaggacacgcccataagtgtggaactcaatcgcttaggaaagcgagaagcagaggaaagcgattctagctcgtactttttgagcagtggctttaaatacagggatctcgagtcagatgcccaattgctgcaaacggtccaagctcaggactacgctcgaggcagcagcaagagtccaaactgctctgggtcaggctcaggatctgcgctagagtttaatctcagtggtggtgactccctaaacgatatcaacaacttgttgggctgtgacgacgaggacgacaaccacgagcatatgctagacaacatcctgcaggagtgcgccatggatgatcccaaggcattgaaccaagctactaatttttggaacggtatcctagatggcgaggcagccgtggacgaagtggaaatggccgatcagctgttggattgtatagacgagaagaaatctaaggtgggtgcagccgatacatcgaagcgcgcgggtcgcaaccgcaaggcaagattgatccaagctccagtgggtagctccgcatttactgtgtgtcccacggcggagactctgaaggaacgtgaacttttctttagtcaagctccgcctgttgaagtcccgcccaaagagaaaacgccagcagaagttgaactgccggaagttgtggtcaaggaaacagcgaatttgcctgtgaaggttgaggcggttgagaaaccccagtcggaggttcttcccgttgccccacagccgcaacagcttcagccgcaggctattactttgcccacgacgcagctgatcaacatacccgcccagataagcacgcaaaagcagcatcagcagccacaggtgacgcaattgctcaatcagtttgccaacgctggtccgcagatcatcgcccgcacagaatacggcggaggagcagctgtgggcgatatagtgaccataaccccgcacacggggagcagtccactccccacactcaccgcccagcaacaactgcagcaccaattggcacaggctcaactccgaaatgtgaccgtccagcagcgacaggcgacacctcaaaaccccaatcaaaatcagaatccccagcagcagttactcttccaaatgcagcgggatccctcgcgctccctgacgcccctacaagctgccggcgctggcgccactggcaaccatttgatctacacaacaagctgcggcgagattgtcacagcaggagctgcagcttctgcgtctcagaaggtcacatatgccatccagaaagccggtgtctcaagtggaggagcaaccaccgcctcaattggacccaacacagtaatcacgctgtccaatgtaaaggtgcagaacgatgatatctcctctggtggtagtggcaactcaggatccagtgtgaacatcatcaacacggccagtggccagcagttagccgtgcacagcattgccggtatgcaacagcagggccagcaacaggtgcaacaggtgaccaccagtacgcctttgcttgtcgccacacccactcgcaacaatgtgcagcagcaacagcagcagttggtgcagcagcaaccgattgtttggcggcaggtgagcggaacgaacacggcggtggccaccacagcagtgctctccaccacggtggactcctcgccgaaggcggtaaccaaccagatcctctggaccagccgggccacgcaaaaaaggcagctcaacgggccagagaacacagacatcaacaaacttcttctcaatcggaagttgccgcgcaagcagcaaatacaacaacagcaccaacagattcaactgacaaagcagcagcttcaacaattggtgcagcatgaggagttggatgacttggtggccacatcgacgggcaacagtggcgatcagatggaaaccggcgacggcctgcaacaacaacagcaacagcagcaacaacagcagcagctgcagaagctcagcaaggtgatcaagatgtcgcagtttccactgctcgtgtcggatgtaagtctgcagcagcagcagtcggtgtctggccaagctcagcagcaacaattaaagcccaactctgcggcggcgattgcagctaatcacaactacagcctgcaccctgcctcaacggcgatcatcaccgcccaggcgacaccccagcaggccaacaagatcttcttgaccagcagcaacagtggtggcggcggatccgctggtaactttaccatcgccactgccagcgaactgcaggcggcggcagccggccaaaagcttcactacaaggagctgcccaactccaacctcaagctgaactttgtgagcagtgcagggacgggtgagcaaacgcagcaggtgggcgccacaacagtgctgctgaacaaatcccaacagcagcagcaacaacagcagcatcaaaagctgaaaacgttggccactacaggaaattctcaaactggccagggcgataagcgagtgctgtacaccagtctgctgaatgtgaaaccgctgcagaagaacaacagtggtcagatgcagatgcaactgggaccgggaggattgcaacaggtgctccgtggacgactcaacaattcagcgatcattactagaacgctgccgctgggcacaactgttaacagtaccggcggtgctgtaggtcctaccaccacgactattaggcagttggttaccacgaatgcgaacaacgtgagcagccaagatggcaacctacttagtgcaaaggaagtggggaaagccctgacagtggagcaggtgatagccagcgctaacaacggaggagttgtgctgcccacgagcaacaacaataataacaacaatggcagtggagctggcggaaatggaggacctttgaacagcggtgtcaatgccacaggagctggcggaggaggatctacaggcgcgggtgttgggggagctggtgtgacgtcaaccatcaacagatgagacgcggatggcagcggcagcaacagctaacatcgagcacaacccttgcaagtgcccaacggccctctgctcagtttggcatcaacgcaaacggaggcggaaacccaggcggtggccatatccatgcctttggcggacgcccacgtggccttgggccagctcctgcagcagcatcactgcagctgcaccgtttgtttggtgaacaagagcgagctggtctaaagccaatcagttagtatgtttttcagaagttcatacgcatacacaaaacccgcgcactcccacgaaaccttccaccttgttggtgtgaataaaatacgattttctgaaaagcttattcagaagcgaaatgtaaacatcagaaggggaatctgttagccagagtagaaagggccaagagagcgggatgaatatgagatattgtatagttgaatgccaccattaacaaagttcgcttaatttgattttctatagcctatatatagaagcatatgtgtgtataatgatgtaggtcttatttttcaagatcgcctaaccctaaaaccataataagaattaaaataataaaacaaaatatatatatatatgtacaatgtatatgaaaatgcatacagagaacttggctctttctcttgggctacagatgtcaaccaatcctatccaagctccattctcccactcctgtccaacaccaacaaccacagcaaaaactcaagtgttaaatagcaaactgtaaatattcgataataattgcgaaacacacaagataacagcaagaattacttgtaataaaactatgtttagtgatacgattagttgtaacgatggagaagaaagcacttctctccggcttacgccgtttcagaaccacgcgctttagccgggctgctccaccgacgacccatcggccccatccggcaccaccccgaacccaaaagttggggcgaggcaagtcagggcagcccgtaaaaacaaaaacaaaagagtaataacaacatttttcaatgtacgtaaattaaattaacttatcctgtaacttaaacggaaagaaaacacattaaactacatttagtttttttaactaaggaatggaacttcagaggcaactgatctgagagagatgtagggagttgcagaagaaaactactattgtatgctattattattattattttttgtacaaggtaataattttaattgtattcgtaactgcaaacataaaagcatgtttatgcgatggcggcaagagatacgacagcataagcatcataataataaagatataatataaactataatgataacgataatattttaaaatccaaaacaaaaccgagtaaagcaaaacgaaaaaacaaaaatatttaacaataattatgtagcgatgtaatttcgtagattgtaaattgtagatcggtaagagcgtaagcaagagcgata

SEQ ID NO: 17253 - protein, 2023 aa, DROSOPHILA
MSKLSFRARHLDPSKQMPIYLAEELPDLPEYSAINRAVPQMPSGMEKEEESEHHLQRAICTGLIIPTPEVLQTDQPFYDAYYPPDYKMPRQMIHMQPLGLDTEVPDYDMDSADEDWLSQQQRLELTELKFEQMMDRLEKSSGQTVVTLNEAKSLLNQDDETSISVYDYWLNKRLKMQHPLILTVKTESRPGASSNNPYLAFRRRTEKMQTRKNRKNDEASYEKMLKLRRDLQRATTILEMVRRREETKRDHLKMTVNIFEKRVEMRDFNGAVYSELNSQYKNTRPAYNPLYTNQYSQGAAAVGTAGAILAALPTGLLPGGAGAAGNANVFGSASQYLNSSNLTMDAISGSGNGNSSRKEKRPYKKRKHKLPRDKQQHQQQQTQQHQQQQYLPASGGAGVSPAHHLPHHLHHLSRQQSASPAANDSIADSEEEDYFGAGAQNGNKLGSESEEETPFAFRRRSSCVYLPTRQRDGRYPWDSADEDMAPSGACSDAKYRYTLTSLNYPRPRCIGFARRRLGRGGRILLDRATTNFDDFWSQLDYTVMESVTVNKCRDKIKQRDPDQLCKPSSPPTVVDLVPAGKPVDGEHPVPELIKEEPSSDTEKPVAATESGRESKERELEEKFENDVDDEFVASDDENVSRLGIYSSAVTLPQSCADLRQKRRRLRRKKQQLRELNAAKRLKRSSEAVATAEDVQLEDEDTKPDLRPLPRAYLQRLALILGQKLKVEEDDNTEVSENVAPELLEMNDPEQLQPPRANHQQHHRSNHNNNNNTVLNNNNSSSSNVMNKDVSISEKINVIKQEAEELVGGKCEDQPVASTSAAAAAARAAEAAAAAEAASSTTTLAAPNPGPSLEEVAKTIKREMIDADDSNEPLSSIRTAAVMLSTQTSVSELMDDEAEDDVNLAQLSSIIRHTAVKKELEAQQHQQQVQHEQMQAARKMEEDEAAPCLNQLPDVIRLRNIRNSQVHARPKDLFVQAPVDEEFNADYMGGLSPTSSQRLDICNELLSEIRRDWLHFRPKTPTDELSDSQDCEVGKTCDSHAVDWTQDTPISVELNRLGKREAEESDSSSYFLSSGFKYRDLESDAQLLQTVQAQDYARGSSKSPNCSGSGSGSALEFNLSGGDSLNDINNLLGCDDEDDNHEHMLDNILQECAMDDPKALNQATNFWNGILDGEAAVDEVEMADQLLDCIDEKKSKVGAADTSKRAGRNRKARLIQAPVGSSAFTVCPTAETLKERELFFSQAPPVEVPPKEKTPAEVELPEVVVKETANLPVKVEAVEKPQSEVLPVAPQPQQLQPQAITLPTTQLINIPAQISTQKQHQQPQVTQLLNQFANAGPQIIARTEYGGGAAVGDIVTITPHTGSSPLPTLTAQQQLQHQLAQAQLRNVTVQQRQATPQNPNQNQNPQQQLLFQMQRDPSRSLTPLQAAGAGATGNHLIYTTSCGEIVTAGAAASASQKVTYAIQKAGVSSGGATTASIGPNTVITLSNVKVQNDDISSGGSGNSGSSVNIINTASGQQLAVHSIAGMQQQGQQQVQQVTTSTPLLVATPTRNNVQQQQQQLVQQQPIVWRQVSGTNTAVATTAVLSTTVDSSPKAVTNQILWTSRATQKRQLNGPENTDINKLLLNRKLPRKQQIQQQHQQIQLTKQQLQQLVQHEELDDLVATSTGNSGDQMETGDGLQQQQQQQQQQQQLQKLSKVIKMSQFPLLVSDVSLQQQQSVSGQAQQQQLKPNSAAAIAANHNYSLHPASTAIITAQATPQQANKIFLTSSNSGGGGSAGNFTIATASELQAAAAGQKLHYKELPNSNLKLNFVSSAGTGEQTQQVGATTVLLNKSQQQQQQQQHQKLKTLATTGNSQTGQGDKRVLYTSLLNVKPLQKNNSGQMQMQLGPGGLQQVLRGRLNNSAIITRTLPLGTTVNSTGGAVGPTTTTIRQLVTTNANNVSSQDGNLLSAKEVGKALTVEQVIASANNGGVVLPTSNNNNNNNGSGAGGNGGPLNSGVNATGAGGGGSTGAGVGGAGVTSTINR

SEQ ID NO: 17254 - DNA, 4243 bp, DROSOPHILA
ttaattagcttatttacgtaatccgcgtactggcacaaagccttatcgttgggatttgtggagatgatgatgttggcccgtaccgagatgaagtgcccgacgatgagctgccactccttcttcagcacacagtagttggagcggtttctgacgaacagggaagacggaatgatgattgcctcgattggttcgcccaaccagcgacgcactgtttccttgctgggtcgatcagcatcgtttagctctatcacaaccttcactttggtgctgtgtttggtgaccatgcgcaggttattccaccagttccacgggtcattcgattccgcttcagccacctcctcggcggtggcatcctttcggtgctcgaatgtggccagttctggattggtgatgggcacttggatgaaccagttccctgaaggaaaatcatctaacaaacaatttgagaatccgcttcggtatctagatgcttaccctttgttttggccagcacaatggaggccagattctcgttttccggaccgcgcagccgtaccatcaggttgcccacattttgcaggtgctccgcccaggccacgtccctcatgaatacctcctttgcgtgttcgcgcagcttgtcattcggcgagtccacattcacgtcggacatggtaaatatcaccttggaattccagtcgctgccgctcaaaattgtggccggatatgtgggatccgattcgtgtggttcgaagggcaacatattggcgttgatagaggtggaaaccacattatagttgttcgcgaaggccttctcgattaacttgggtatgctattaacaccctcctggtgcagacagacgtagtaattcatctttcaatccgcacaccgcctcttcaaaaagtccaaaaaatgcggtgaccggcagcagtgtgaccgtctgcggcggcaattcaaatggaacgattggtgtgaacgcaaggtaattgccgaaaaatcacacattttagccaatgttgttgacaatttttgtgtcgtttgccaatttttgtgttttcccgactttgtaagataagcaatagctttcgggccttaaatagcatgtaattgtgattgttcatggctaaccgcgatgtattctcaaagatcctgccaaatgtcaagttgggcacccgctacgacgaggatgggcgtgaagttcaggtgagtgcatcccatccagccgggaatccccagctcaatttgatttccattgcaggtggagcgtcgcgaggactcggatgccacggccaaggagcaggacaccttcgacatactggtggcagccggatattatcgtgcccgcatcaagggcttatccgcattcgataaggttgtgggcggtatgacttggtgcatcgaatgctgcgactacgatgtggacgtggaccttctgttccatgagagtctgtccattggacagaagatgtaatgtatatcattgatggcttaagcgcatatcatcatttatatatccttatatctacagtgccttggtggagaagatcgtagccgtcctgattgacatgaagtgcccacacagcctggaaccccatcaagtgcagggtctggaattcttggccatacatcccgtcatccagtggctagttaagacctctgtgagtagtcggaataacgtacaccttgtacgatttaatggaaactccttattaaggtggaaaaccgagcggagcgtgggcagcgcttgaagagatttgccatcggccagtttcataatcactatcagtacaaaagcgacaaggacaatctcactaaaatacgcctggcctccacaaacattaaggctatacaggatctgtacggccccaggaggcagtacgaacgccaagaagctcctgatgatgatgatgatgtgtccagggtgcgtcttactcttttagaatacggagatccaggaccgacctttaggagcagcgctgaaagaaaggcggatcggggtcctggagaaaaagatgaggtgggtattagtttaaggtgcgaaatattaatatatatatatgtacaagctttctttattttacagctcgatctggaggagtatcttcgcagcttatctctcatcaaagatgacccgacgggcactcaaaagcgcattgatctcgatcctacagcacggcaagagcttcaacagcactatgctgaattcaagctggaaatggagacggatgcccaagagttgaaatcacaaaaccaacaaaaacgtctcgaggcggccaaaattgctatggaacataagattagacgttactgcaaggaaaacgaacagctgcaagatgctgaaaatgagcagaaagaaaagaccaaggaagtggaggaccaattgaataccttaaatactgagctcaaagcacacaaagatacacaggataaagcagatccaaagtgggtttatttaaacaatatatagtatagtcttttaattggatgtatattttaaggctcctcgaaaaaatacagagtttgctgcaacaacatgaagagctgaagaaaagcgaggcggaattcaaggaatcttgtcgcaccgatttggccaatctacagctgcaaatcgagtaagttagcatttcattttcgtatcgaggacaataattaattattattctcttgtttttcaaagtgacctggaatcatttagtgcccaagacgcggaagcacaagccgcagcattggccggtgaggagcaacgtctgaaggagctgcgcctgcagttggccaagagaaatcgcggaattgtggccatcgaacgaaaacttgatgccattcctgatcgcacagagctggcccaataccagagacgtttccacgaactgcacaacgagatgagcggcaagcatctggaaaccaagcaatattacaccctgtacaacacactcaacgacaaaaagcgctacatggaaaaggaactggccctacttaactccatctgcgaagcgtacaacgagggtatgatgagtccgcacggccgcgaggactttatccgccagtttgagtccatcgtggacggcgttaagagtgcccaggacaaggtgcgtcacaagtacaacgaggagcggatgcgtcgcgacgagctgaacgaggagctgcaatcgctgctggaactgcagcgccagtatgctctggctgtcaagcagctaacccgcgagtgccagcgctgcgagcagctgcaactgcagctcaggtcaattaggggcaggacccagtcctagcccattttaactattgattactaaacacgaaacactcttagcgtattcgttcaataaattataacgccccaaatagccgtgcaattatccgggaatccaatcaagcaatccaatgtgttagccaaggattttcttcaagctcgattcaagtgcgcacatttgtcaagctcaagttcgacctttagctctcttttgattcccatatatttcacgttccaacatattcgagtatttatggaattcctgtcagtgcgctgggtcagcactttatttccatatagcgcgcatgcacatggtactcctagctagcacctagagaaatttgcgtatttgcattgctgccgccagcacactatattccattccatttggtgctctaattaatatgcggcccgcttagtggcatgccgagcaatcagagccacttcaggatccccatggtccagggaactgcagctgctgcttgcggttaattaatgtccttgcaccttaacattgaattcaagctgagccaatgcaattacattttattgcgtggcaatcaattccattcaacaagtgacattgagacgggcagcacgagcatgagcatgaaaaaagcgtaggaattgcggccaacttcctgtcgcattcgtccacacagccttcgtccatttggccaagatgaatttgcaccgtatgacaaatacttaaagcgctagaccttcggcaaaggttaaaccgaagtccttggcagacatttaacaactaagtttatgagaactctgctcccggctgccaatgcctgctcattccacgaccaaatcggccttatcgaactgaaaacagagccatatagagtcagtcaggcattccgcccatcttactacaatatatagccagtataaatatgtgtaaaatgggtgttggtgggttgggtggttcgtaggttgggattccctgactccggataaaagtgaaagccagcgatggtggctatatccccgtatcccgcgtttcc

SEQ ID NO: 17255 - DNA, 1884 bp, DROSOPHILA
caatttttgtgtcgtttgccaatttttgtgttttcccgactttgtaagataagcaatagctttcgggccttaaatagcatgtaattgtgattgttcatggctaaccgcgatgtattctcaaagatcctgccaaatgtcaagttgggcacccgctacgacgaggatgggcgtgaagttcaggtggagcgtcgcgaggactcggatgccacggccaaggagcaggacaccttcgacatactggtggcagccggatattatcgtgcccgcatcaagggcttatccgcattcgataaggttgtgggcggtatgacttggtgcatcgaatgctgcgactacgatgtggacgtggaccttctgttccatgagagtctgtccattggacagaagattgccttggtggagaagatcgtagccgtcctgattgacatgaagtgcccacacagcctggaaccccatcaagtgcagggtctggaattcttggccatacatcccgtcatccagtggctagttaagacctctgtggaaaaccgagcggagcgtgggcagcgcttgaagagatttgccatcggccagtttcataatcactatcagtacaaaagcgacaaggacaatctcactaaaatacgcctggcctccacaaacattaaggctatacaggatctgtacggccccaggaggcagtacgaacgccaagaagctcctgatgatgatgatgatgtgtccagggtgcgtcttactcttttagaatacggagatccaggaccgacctttaggagcagcgctgaaagaaaggcggatcggggtcctggagaaaaagatgagctcgatctggaggagtatcttcgcagcttatctctcatcaaagatgacccgacgggcactcaaaagcgcattgatctcgatcctacagcacggcaagagcttcaacagcactatgctgaattcaagctggaaatggagacggatgcccaagagttgaaatcacaaaaccaacaaaaacgtctcgaggcggccaaaattgctatggaacataagattagacgttactgcaaggaaaacgaacagctgcaagatgctgaaaatgagcagaaagaaaagaccaaggaagtggaggaccaattgaataccttaaatactgagctcaaagcacacaaagatacacaggataaagcagatccaaagctcctcgaaaaaatacagagtttgctgcaacaacatgaagagctgaagaaaagcgaggcggaattcaaggaatcttgtcgcaccgatttggccaatctacagctgcaaatcgatgacctggaatcatttagtgcccaagacgcggaagcacaagccgcagcattggccggtgaggagcaacgtctgaaggagctgcgcctgcagttggccaagagaaatcgcggaattgtggccatcgaacgaaaacttgatgccattcctgatcgcacagagctggcccaataccagagacgtttccacgaactgcacaacgagatgagcggcaagcatctggaaaccaagcaatattacaccctgtacaacacactcaacgacaaaaagcgctacatggaaaaggaactggccctacttaactccatctgcgaagcgtacaacgagggtatgatgagtccgcacggccgcgaggactttatccgccagtttgagtccatcgtggacggcgttaagagtgcccaggacaaggtgcgtcacaagtacaacgaggagcggatgcgtcgcgacgagctgaacgaggagctgcaatcgctgctggaactgcagcgccagtatgctctggctgtcaagcagctaacccgcgagtgccagcgctgcgagcagctgcaactgcagctcaggtcaattaggggcaggacccagtcctag

SEQ ID NO: 17256 - protein, 595 aa, DROSOPHILA
MANRDVFSKILPNVKLGTRYDEDGREVQVERREDSDATAKEQDTFDILVAAGYYRARIKGLSAFDKVVGGMTWCIECCDYDVDVDLLFHESLSIGQKIALVEKIVAVLIDMKCPHSLEPHQVQGLEFLAIHPVIQWLVKTSVENRAERGQRLKRFAIGQFHNHYQYKSDKDNLTKIRLASTNIKAIQDLYGPRRQYERQEAPDDDDDVSRVRLTLLEYGDPGPTFRSSAERKADRGPGEKDELDLEEYLRSLSLIKDDPTGTQKRIDLDPTARQELQQHYAEFKLEMETDAQELKSQNQQKRLEAAKIAMEHKIRRYCKENEQLQDAENEQKEKTKEVEDQLNTLNTELKAHKDTQDKADPKLLEKIQSLLQQHEELKKSEAEFKESCRTDLANLQLQIDDLESFSAQDAEAQAAALAGEEQRLKELRLQLAKRNRGIVAIERKLDAIPDRTELAQYQRRFHELHNEMSGKHLETKQYYTLYNTLNDKKRYMEKELALLNSICEAYNEGMMSPHGREDFIRQFESIVDGVKSAQDKVRHKYNEERMRRDELNEELQSLLELQRQYALAVKQLTRECQRCEQLQLQLRSIRGRTQS

SEQ ID NO: 17257 - DNA, 3159 bp, DROSOPHILA
gcccagagaaaaacacatggaagtttgaggtgctgagtaaactatttattgcaggcaattcccgatacactcttactatttatagccgcttatttttatcatttgtagaaggctgtagctagtttgcctttaactggctacaagtcgattgatagtctaatattctagtgtttggctagacatcccttttgtggtcaagaagggttgattggtagcaaggtggactcacctggggcataaagcactttccacattaattcaacaactaccagagcagaaaaatcactaaatatcactaaaaacactagttcacattaaattcaaatagaacatcatcctttttggtacttttttggagggattcctttttgagacaccaacaacaacaaagatgacaatcggtgcacacacacagacgcacatacatacgcgcagggccacacgcacttactcgctgcattttcgcaggataattcacatattgtaaacttcggacattaatatgcatgctgcagttagccacatttaagccacaacaccttttgttaactatagacttgcaatttgtttgacaaaaaacaaaaactcagcgaacacaacacggcgaaaaaataacaactacaacaaaaatggcgtgccaacagcagcacaagcagtgctgttagcgaagctatcggttatcggctgttaactgtgtttgaatcgtaacgtattttatttttacatatctatattttactgatattcttgctatattttttttattttcagaattcgcattgtcttatatctgaaaaattccataaatgtaagctcatagctcaacaatcgatggtgtatcaaggcaagaagaagcactattactatgagaacatgtattctaatattacagaagcgatcccttacacattttttcctgctaatcccttcgactgataaataaatataaatgattttgcaaaataacatatttagccaaatagaaaagcactaatcgataatgttaggtgccaaacatcgataacatagtgagtgccagctctaaagtacagtgctcttcttctttaaaccgtgtttttcgtgcattaaatattttattttatatatttgtacattactccctgcttgtaaaccaataaaatacacaagaaccagcaaaagaccttccacagttgttttattttaattttttcgcccgaaaggcccaatcttacccagatgttctaacctgttgcgtttgattctccaattgacagccgccacatccgcatctgcaactaagattccaccacgtaaacgcggcagaccgaaaacaaaggttgaggatcagacgcccaagccgaagctcctggaaaaactacaggcggctaccctgaacgaggaggccagcgagcctgcggtgtacgcctccaccacgaagggtgagtccgaatcctggctagaagccaaaatcctgatccatgataaccaagctaattcacgctccattcgcaggcggtgtcaagctaatcttcaatggtcacctgttcaagttctcgttccgcaaggcggactattccgtgtttcagtgctgctaccgtgagcacggcgaggagtgcaaggtgcgggtggtatgcgaccagaaaagagtctttccttacgagggcgagcacgtgcacttcatgcaggccagcgacaaaagctgcctaccctctcaattcatgcctggcgaatcgggagtcatatcctcgctgtcgcccagcaaggagctgctgatgaagaataccaccaagctcgaggaagccgacgacaaggaggatgaagatttcgaggagtttgagattcaggagatcgacgagattgaattggacgaaccggagaagacgcccgccaaggaggaagaagtggaccccaatgatttccgtgaaaaaatcaagcgacgactgcaaaaagcactgcagaacaagaagaagtgacacggaatatgccttagatcttcaaactacaccttttactatataaacttaactaagatcgagaaggctcaagaaggcccaacagtacaagatctgagctgcctaagggcttcacattatactttctatatccatttgggtcttaaatagccctaataattctaaataattaagtttttcgtaataaaacgatgtcaataaatcggaccttaaaccatttcactagctagtaagatctaacttaatacgtagctgtactcaaaaccccatttaaatgataaataacataagccctttcatgtctttcagtgacccaacacgtccgcaactgtggtcctcagatgttcctgatcagccgcaagggcggcactctgttgaccatcaacaactttgtgtaccgctccaatcttaagttcttcggcaagagcaataatatcctgtactgggagtgcgtccaaaaccgatcggttaagtgccgcagtcgcttaaagaccatcggcgatgatctctatgtaaccaatggttcgtaaagcgaagtaagcaaatgcaaaggccatttaatggcttctttccatcttcagatgtgcacaatcacatgggcgacaacaagcgtattgaggcggccaaggcggctgggatgctgatccacaagaagttgagttccctcacagccgccgacaaaatccagggttcctggaaaatggacaccgagggcaacccagaccatctgcccaagatgtagccgcttcctatacattcccaacccaaacgttcgtgttctgttagggctaagctaatgtattctactattgttcttgagcgtatatcattgatttagactgagtgtcccgagcctagttaggatgggtaagtagcctgttcatctgggatctcaaagtaccatttttgtaattcttaaagtcccgggtcatattatttattctgttctcattgcttagacgcttttggccacggcactgacttaaacaatggcttgtgttacgtacaaaatatgaactcttaataaaatcagatgaacatctaaacgaattggaattatatgtatgatctcatcataatatagaagagattctttcatgcgttctaaatagtgtttattttgtgcactaaacgtatttgcgttaagagatcttatcccgttttttgaaagttttatgaattaatcaattctcgtgggtccata

SEQ ID NO: 17258 - DNA, 840 bp, DROSOPHILA
atgttagccgccacatccgcatctgcaactaagattccaccacgtaaacgcggcagaccgaaaacaaaggttgaggatcagacgcccaagccgaagctcctggaaaaactacaggcggctaccctgaacgaggaggccagcgagcctgcggtgtacgcctccaccacgaagggtggcggtgtcaagctaatcttcaatggtcacctgttcaagttctcgttccgcaaggcggactattccgtgtttcagtgctgctaccgtgagcacggcgaggagtgcaaggtgcgggtggtatgcgaccagaaaagagtctttccttacgagggcgagcacgtgcacttcatgcaggccagcgacaaaagctgcctaccctctcaattcatgcctggcgaatcgggagtcatatcctcgctgtcgcccagcaaggagctgctgatgaagaataccaccaagctcgaggaagccgacgacaaggaggatgaagatttcgaggagtttgagattcaggagatcgacgagattgaattggacgaaccggagaagacgcccgccaaggaggaagaagtggaccccaatgatttccgtgaaaaaatcaagcgacgactgcaaaaagcactgcagaacaagaagaagtgacacggaatatgccttagatcttcaaactacaccttttactatataaacttaactaagatcgagaaggctcaagaaggcccaacagtacaagatctgagctgcctaagggcttcacattatactttctatatccatttgggtcttaaatagccctaataattctaaataattaagtttttcgtaataaaacgatgtcaataaatc

SEQ ID NO: 17259 - protein, 211 aa, DROSOPHILA
MLAATSASATKIPPRKRGRPKTKVEDQTPKPKLLEKLQAATLNEEASEPAVYASTTKGGGVKLIFNGHLFKFSFRKADYSVFQCCYREHGEECKVRVVCDQKRVFPYEGEHVHFMQASDKSCLPSQFMPGESGVISSLSPSKELLMKNTTKLEEADDKEDEDFEEFEIQEIDEIELDEPEKTPAKEEEVDPNDFREKIKRRLQKALQNKKK

SEQ ID NO: 17260 - DNA, 4280 bp, DROSOPHILA
attctagaaaaggtcagctgcgagggctatataatatgggattactgctgcttgggcgtatggaatagggtgccttcgatgatatgattgttgtttaccatccacgacgcgggcacgctcaacttacataatatcagatcggttgggatcgctgtggatcgtttgttgtggttcggcggagtggaggaggtggtgctagaatcccagagctcctcggaacacctcgcggccgctagaagccgttgaatccgtggaattcgccgcgaggacagcgcattctctccgggatgcggcggatggcggtgtggaccgttgccgttcgagtttcgacgttgggctgctcacttatttgcgaataaatcgaataaaattgcaattaaactaatgcaactaaagtcaactcaatgtcacacagtgtgaccagcgtgcgtgcggacgataaagctgctctaaaaataccggcgaaatactgtttttcatttatattttgcgtagtgaacaaatttgcaagtttaagaaaacataatttggaataatatatgtaggcagggtgacagtcaattactgttacatttaatcaagtaccttaggattggttatttcttaaatacattatttgcattcctattaatttaacggaattcaacggagtggtataacactacaaaaaaggtccgctagaaagcttattggcaaaagagggtcactttattctttgattataggcgccaaaaagatggtcatcatattttaaaagtttctatcatactattgcttattttgtattatattctagatccggaagccagtatccttgctccctcggcttataccttctcccgcatggatgcgcacgtgaagagcaatcaaaccatcgccgtatgtggtcacaccactgatctttcactgaccaatctgtgattctggatcggatgtgtgctgattgaggttcctccaagcgcacttatgccaaataacccgtaattacacattcatgtttatgtcaagatcctgtgattattattgaaattctcgccaagttgttggagtagttaaaaaaaacgtttgtttggttggtgaatggtgaatagtgtttgcaatgatgatgatgacgatacaacgatgattggtaatcctcacgctaaagcttttgtctaatcgcgcttgctgcgcttgcgatccgaatggctgctgcgctcgttgttcttctcctcggcacgcttgggcgcctttttggccatgttcaagaactgatcgagaccgaagggatcctcctccttctcgaactcaacgggtccactcctctggccagcggccgcctccttggaggcaccggagaactgcttgtctggcacgaaacgcttggtatttacaatggcatccagatcaccgccgtagttatcgctatccgcctgcttgctgggtcggtagatgtgagcgcccagtgtattggaatcgcgccacggcttgtcgtacacattgtacgcttcgtcatcaccgtaaccggagtccatgcccttggtggtgttgaatagacgctgatcgaagagcgtttcaccgttgccggcactcttggcgggcagacccaaagcgatttgctcagaaatgtcacgctccctctccttctgcagtttcgatcgcttttcgggagccgcccgctgcaggtttctatcccgctggcgctccctttgccgctctgcccgcaagtcgttgcgttcacgcacctcggatcctgtagctccggaaccagatggctcggctgcctccggattgcgtagtcccgctcgctcttcgcgagcccgctgcgccatcatacgcagcatatcctccttcttctccttctccttttgggccagcttcttttccagctgggagctgtgcctccaccgcctcgcgcgccttgcgatcggctatgtacagcgcctcggccatcttggcgaacttctcgttgatgtgcacctgctgcagaccgcgtccatcggctgccagacgcttgtccagtggaatggtgtaacctgatatcgaggcaaagatttaattaggataatgaagaggattctagttttacattagctcgcacctttggcgttcttccagttcgatatgcagggcgggatcttccactccttttgctccttgaccgtcaccttgcgcgatggtgagtggaggacaggtgccggcggcgatggtggacctcgtggaatctttttgttaatgcggaacttgggcggctccatcggatcgagctgcgcctccaccatccggatgacacgctgcttggcgcccgaattgaaggtatcgccctgctgcgagggcgtgtaccgaatgtactgggcgggacccgccttctgggcatggcgcacgggcagcgctgaggtgatcttctggttggtcagcttctccagcgccaggcgcgtctcctccgtcgtctccatcaccgtttcctcgtccgggcgctgtagttcatccgcatcttcggccaacacctccgccggcagcagttgcgaaatggacgagtacacaatcttgtccttgccatgtccttggcgtgctatggcatcgtatttaacctttcccttgtcgtccaggcgaacggccagagcatccgacttcttgccaacatttcctggtgctcccagacctgtcgagaagatgaagaagacgcagaaattgtttcaattgaataagccacgcttcaaaatgctgatcataaaatacaaaaatacaacattctacagcaaacgtttaacttaatgtggtggaaattgaagccttctcgctgtacaatcacccacatataagaagctaatggttatttcccttacgaggacaccattaccaacgaaaaaccgcgacaacattgtttgcaagcacagagaaagtgggattagcacgaacgggaacccacctagtggatattgcgccacatggatctccgggaaggcgccgccatcgccaaagtccgcatccgtatgtggtacccaatccttacgctgtccgtacggcggagcagcgattttggcggagaccagggctccgatctttggtgctccgcgggcgaccaggcgacgctcgtcctcccgatcccagatcgcgttcgtcggcgtgggcagcaggcttgatagcgacatagcttatctgttatttgtggcgaatcaattcttatgtgaaatcacttttcaatatgcaagccacaaaaactataatggaaaagtcgaaaaaaaaaacacgcacgcacacggacacacacaagcgtacgggtgtgtagggttgccagactgctaataagaaaatgctatagagtatggtcccttttagggatggattgcatatattgcgtttttcttaagacgtaagaaaaccaaattggtagaaataacaaagcgatagctttttccaaatttgaacgcgaatcggtagtggattggtaatggtcatcaaacatcatcaaaatttgcaaaaaatggtcaaaaaattgaatttgcatttttgaacacagtttgatttgaaattttattacgagcttaacgaggtatgacattccatatttggaccattatttcgaatgttcttatcaaaatactacaatatggtttataaaaatcaggggcaatcagagaaaatttgaataatttatttttattaccttaacagaactgtgcaatacttaaaaatataatttatagacatccccctaataattagatagatataagtgacacttgcccgatcgatactatcgcatcgccctagccgctggcagtgccatcgctagcagttcagtcaacaatttaagtttttgtttttgttggccaaaaacacaatacaatgtacacattgatgcacggcttctacaaatacatgactcagaaggacgactactgcgtggtaatcctgggcctggacaatgctggcaaaacggtaggcagctgaatcatccaatgaaagcctcatgtccaatcggaaactaacacctgtgcccacgtagacttacctggaggccgccaagaccacgtttacgcgtaactataagggcctcaatccgagcaagatcacgacgacggtgggcctcaacatcggcaccatcgacgtgcagggcgtacgcctcaacttctgggatcttggtggccagcaggagctgcaatctctctgggataagtactaccaggagtcgcatggcgtcatctacgtgattgattccaacgacagggagcgcatggaagagtccaaagcgatatttggtaagcgaaaacagtcttcgaactaatcccttgaacaaa

SEQ ID NO: 17261 - DNA, 1948 bp, DROSOPHILA
agtctggcaaccctacacacccgtacgcttgtgtgtgtccgtgtgcgtgcgtgttttttttttcgacttttccattatagtttttgtggcttgcatattgaaaagtgatttcacataagaattgattcgccacaaataacagataagctatgtcgctatcaagcctgctgcccacgccgacgaacgcgatctgggatcgggaggacgagcgtcgcctggtcgcccgcggagcaccaaagatcggagccctggtctccgccaaaatcgctgctccgccgtacggacagcgtaaggattgggtaccacatacggatgcggactttggcgatggcggcgccttcccggagatccatgtggcgcaatatccactaggtctgggagcaccaggaaatgttggcaagaagtcggatgctctggccgttcgcctggacgacaagggaaaggttaaatacgatgccatagcacgccaaggacatggcaaggacaagattgtgtactcgtccatttcgcaactgctgccggcggaggtgttggccgaagatgcggatgaactacagcgcccggacgaggaaacggtgatggagacgacggaggagacgcgcctggcgctggagaagctgaccaaccagaagatcacctcagcgctgcccgtgcgccatgcccagaaggcgggtcccgcccagtacattcggtacacgccctcgcagcagggcgataccttcaattcgggcgccaagcagcgtgtcatccggatggtggaggcgcagctcgatccgatggagccgcccaagttccgcattaacaaaaagattccacgaggtccaccatcgccgccggcacctgtcctccactcaccatcgcgcaaggtgacggtcaaggagcaaaaggagtggaagatcccgccctgcatatcgaactggaagaacgccaaaggttacaccattccactggacaagcgtctggcagccgatggacgcggtctgcagcaggtgcacatcaacgagaagttcgccaagatggccgaggcgctgtacatagccgatcgcaaggcgcgcgaggcggtggaggcacagctcccagctggaaaagaagctggcccaaaaggagaaggagaagaaggaggatatgctgcgtatgatggcgcagcgggctcgcgaagagcgagcgggactacgcaatccggaggcagccgagccatctggttccggagctacaggatccgaggtgcgtgaacgcaacgacttgcgggcagagcggcaaagggagcgccagcgggatagaaacctgcagcgggcggctcccgaaaagcgatcgaaactgcagaaggagagggagcgtgacatttctgagcaaatcgctttgggtctgcccgccaagagtgccggcaacggtgaaacgctcttcgatcagcgtctattcaacaccaccaagggcatggactccggttacggtgatgacgaagcgtacaatgtgtacgacaagccgtggcgcgattccaatacactgggcgctcacatctaccgacccagcaagcaggcggatagcgataactacggcggtgatctggatgccattgtaaataccaagcgtttcgtgccagacaagcagttctccggtgcctccaaggaggcggccgctggccagaggagtggacccgttgagttcgagaaggaggaggatcccttcggtctcgatcagttcttgaacatggccaaaaaggcgcccaagcgtgccgaggagaagaacaacgagcgcagcagccattcggatcgcaagcgcagcaagcgcgattagacaaaagctttagcgtgaggattaccaatcatcgttgtatcgtcatcatcatcattgcaaacactattcaccattcaccaaccaaacaaacgttttttttaactactccaacaacttggcgagaatttcaataataatcacaggatcttgacat

SEQ ID NO: 17262 - protein, 360 aa, DROSOPHILA
MSLSSLLPTPTNAIWDREDERRLVARGAPKIGALVSAKIAAPPYGQRKDWVPHTDADFGDGGAFPEIHVAQYPLGLGAPGNVGKKSDALAVRLDDKGKVKYDAIARQGHGKDKIVYSSISQLLPAEVLAEDADELQRPDEETVMETTEETRLALEKLTNQKITSALPVRHAQKAGPAQYIRYTPSQQGDTFNSGAKQRVIRMVEAQLDPMEPPKFRINKKIPRGPPSPPAPVLHSPSRKVTVKEQKEWKIPPCISNWKNAKGYTIPLDKRLAADGRGLQQVHINEKFAKMAEALYIADRKAREAVEAQLPAGKEAGPKGEGEEGGYAAYDGAAGSRRASGTTQSGGSRAIWFRSYRIRGA

SEQ ID NO: 17263 - DNA, 8352 bp, DROSOPHILA
agcaaagcctgggaaaatctctaaaactgatcagcttactcactatgtatatccaagcttaaattgatcttaaataaatgaaatattactacgttataaagaacgctaattcttcagcacttaaaaacatagccactgatagaattacaatttttgaaatcatttaaatgctaaaatgtgtcaaaaaacgttattttttggtgtaaatttacaatatatattgcgaattcttcagcactcaaaataatggtacatatataataaaatctagttttctgtgtttaaagataagcaaccgaaaaccgaatgtaactgaaatttgctcatgtaaaatcgacctgagcactgcaactcgagtttctgttatcagataaagatatagtatatgaagtaggcaacctatttttaattaaaaaatcaattaatatggagcactttttcagttttgtgtaattgcgcgctatctaaacattggttttacccgcctaaaacggaacgatcatcgtgctcgacaataatcgatgaatgttatgcaagcaacgagcctttccttacacatttccgctttctgaccaccgatcccgtccagcaacgagaccggagtcaaggtcagtcagctaaggtagtgcaaatacatgtatgtataagtggacagctagtgcctgcaaaatcgaattcattacgtattcgccccattgtgccgtgctcaagtgcggccaaactaaactattgaacccagcggcgctgtcagcggttctaatgacgccgcactccgtgtaccgcttgaccccgcgcccgcgaccactttcgcggtgaaggggggctaaacagtagtttagttcactggctccggcgactttcacgctctccggatacctatttgtttgctcaggttctctttcgctgctggcgctcgcaaggtgcgtgctgtccgcttcgcagtcgctgccgactttcaagtcagcagcgctgccccgagtccgtcagtctgagaccgtcggacttaccatacagtcgacgctccaatacgttccgcgctacaacgattcaacgattgaaccattcgggatccattcctcgatttccagcgtccatatatatatttatatatataaacaaacatccacccacccataaagtccctataaagcggaccgcgcgatccccagcgaaagtcagacgcgtgccaccaaccgcgagtgcaacatccctcgaaacaaccaactaagatcctacaggataaacagcagagcatagttagtagccatccaaagccaaagtccaagatgagccaccactggggatacaccgaagagaacggtaagctctctccagcttcggcttgtttgtttgtttgttttcgctgtggacagcctgcggattccggttcccgctttcggtttttggttttcgtttttctgttttcggatttcggtttgtttacccgtctggccttccgtctaatcagacatcgtcgtctgcggtgattccgacattttgactcatttgcacacgctgcgcatgcgtgttgccaaaaaaaaaaacgagatcttcactcggaattttctatatactgcaattgtcttgttttaagcaaagatcccttatcttttaaggaatttcgaaccatttagcttttatgaccaactgaatctatctgacagcaaacgtcatgttttcgaatcagacatctggcgataagatattggctagatatagtcgtccaaagacgtagcctagccttacccaataaaatgggcaaaaccataaaaaaaaacaaggcgtgagttgctccttaataaatagccaattagtcagataatttaacacttagaaatcattagtcgttcatgatttgcgttatcacaaagggtttagattgcagagaatcgctaagaaaatagctttcgtaggggattactgattcgattgcacaatactcgcaatgcccttcacttcgatttcatgcctcataagctgaatcgcacaaacagacttggtcattcgttactcatgaataatgggcattaattaaaatgcagggaagcgggtttttgtgtttttacggatcggggagtttcacacgagctgggtctcgtgatctggtaatgtgtatggtgcttcccactaaccaaccagtcgccggcggagtcaaccgcctcgactggcaaactagttctccaccgaccaccagcaaccagcgatcgattgtttttcgccttgtctttgctgtttttgttttcggagcacccggtgcccctcactctgcgccgcttcgaaggctagtcaagtgcatgttcttcgtctggtgaggacacatgccggaccggtttcaatgtcttgggcgtatacgtaatatcttatgtgtgcggtatgcatataacactagcatgtagaatgtatatcgaatgggctgcgttagccagcatatcaatttagaattgaaaaaaaaaccactacttcagtttttgacaatttcaattgatttgcttaactggttgtgattgctctgattgattcgatactgataccgatactgatactgttactcattgcgattccgattctgattttgattctgattttccggcgccgccctggtaactttccagcgcaagaagaaccttatcagcatgctgctcctccagagtcgagaatgcccacattaaacacgagaaactctctgccatacatattcgtatttttcgtggagattgcacatgtgtatagacccatccttatcaagacgctcaggttgtgtctaacccctgggcactgacagaagcgtctgaatgttggttgacacgcttccatctagaaaccactgattacaactcgcgtgtttacgtgagaggatcaatcagatgtcccacctatcgtctgattcaatcgccagttctagttcgcaaagctattcttggatcaattgcatcgaagcgaaacttgctttattttatcatttagaaatctcaacccttaacaacttctagaatttcttaccaaaaaaaaaatactacatgtctatatcattaatgtgtcatagtcataatgatcgatggatttataatgttccacaccgatttatttcgcgtgacttatcagattttgcagttagataaaacttacttaaggaatacggaaaggtttcgttctaaagtttactttgagtatatatttttcgatatgccagatatcagtccgatcgaaaccaggccccttcattaatggtcaatatttattggcggtttggaatagcaaaaaatagaactgcgaaacgatttctcacgcaaggaaaatcatcagattgatattatttttggccagctatatagatactgtatcacctgacttgccagtccagctattttatatagcaaataaaatttgataatttatgcatttgtgcatatattgaaaaatatctggacatgcaagaaaaaacagctcaattaattttcagacgtgcctaaacatttcattaggccacaatgcatttcagttagctaaacttttacggccattcgagtatttcatttgcgctttattgtcaccatttcccaccacatgcaaacaaataattattggcgaaaattttagcagatgattgaagggttgcatggtttggattggtggtcgatagccaaatgtcgtggcagtccaagggtagagaccatttctggggcttcttcaagccaagctgggtgataaatatagcaggggtagttgcctttcagcccggtcaattgagtggccataaaaaacagtataacccagagacaagtggcccccctccccacgaacagcagttatacaatatatcatccggtactgactcagaactcggaacttggaattccggggtgcggctgggggcactttccccaaacgagttttttgtccgtacttccttgcgatcgccgccaggaaagtggggaaaaaacacgcgagaaactcatgcctccatccaattgggatgatattatcatgcaaggctcgcttagaagcgctcggctcgtaaattcgtaaatgctaattgccacattttattttgtcgtgtttttaagcgtttttcttctttttttttgcactgtcgtaacgagaatttcttaatttgtctctccggttttacatgcgctttttatatttttaatttttttttttatatttcaaattgctgctttgtgtatttaaatgttcggagaaatcgaaatcactatactcaggggcaattttcgatggatttcgtaagaacgatcattatacattatagattctatatagagatcaagatcttaacgtttccggaacaagttctcccagacagctacgggttttcgtttttccgccggcgaatatacgctataaatggatgtgggtaattcatttgcagtaattcaattaaaaaatcattcggattttatggcagcattaatggtcacaattgtttcaaagcttcgcttttgttccatgtcatccgaattgaaacgaaattaagtgcaaaacgatgatgaattgtttaatatacatataactttgcagttagtaaacgcgtataacaaaggctcgtttgatcagctttaagggacccataatgtcaaccggttatatccgatcgagttttgtttgaacaagtgcggcatttccttgttttcgtttactttcttctactttttttttattaaagtctgccaattgttatcacaggcactgtgaaatgccgccaggtgatcttaaagtatttacagccaaagtcggcagcaaactcgctgggtaaataaagccagtaagtaagcctatacatttaaatgagtcgcactatatttatttctacatatacatatatacagtaccgacttcggagatatcttaataactcgattgttgattataaaaaggtaatgtgctaaatgcggcagtaaattcgcacttggctgctaactcacaaaaggatcgtgcaactccaattgcctgcttctttgtatgctgccccacacggcgtatacgtgacattcatacgccatgtgctgcgtcagtcacatgcacacactttttgcacccgaatggtgaataaggctcttgatttcaactttgataaatgataaatgcatttcacctgacttttgttatttactatcagcattatgaaggactttgagaatcggcgaaataaatataggaagctacaaagctgttgacaccttaagctcggcgatctatcaaatgacaaacgaggctttgcccgttcgataagaaaacccctgccgatttctgggtaccattaccaacggcaaatggttcaatatttgctccgattcaggcaaacaatcatatattatacatattctgattccaattcccataaacttttgcggtttatctgcagcgatcctatcacatgactcgggtctgcggtcttccgagtgattctactggcacgtgacgcggttctctgtgtcaatgtttgcgccaccagtaattaaaaagaagaatccacatacacgcacataaatcgcaacaaaatgcagcaaacaggggaacagcaaatacttgtattgcctcagccggttggtcagataaaaggtctatgcaaatattattatgactgccagttgggcaaacgattgtcaactctggcgacatgttcataaataagcatcttacttaatgcttcggtaatcgcgagtataagcagccataaaaatattaagtctttgattcatttttattcccatttattagcttcaaagtccagattctagttgaaatatatacaatctttcatgtttttataatagaaataatttgaatttaacagcaaattgtaggaataaatgaatttgaaatgattttcgctgtcttctgaaattactagtaccatataatagtcgccctaattatcgaattaatggattaaacgaaattcttcaattccttccacatttattagcttctattttttcggacattaatcaatttcctgaccagcctaatgagtttttaataaaccccaatggagtactccaatgaattgattttagttgatttattgttccttatcgacacagcgaattagcacttagttaagttggtaaattcggggaaagcaaatacctaatgactttgccgcacgtttacttacccgccccattcaatgttcctatttcaggacctgcccactgggccaaggagtacccacaggcgtcgggacatcgtcagtcgcccgtggatatcacaccctccagcgccaagaagggcagcgaactgaatgtagctccgctcaagtggaagtatgtgccggagcacaccaaaagcctggtcaatcctggtaagaaattcaaagttaacgtactgtattctactgaaatattaatccttaccatttgttaatctaggctattgctggcgcgtggatgtgaacggcgccgactccgagctgactggaggaccgctgggcgatcagatctttaagctggagcagttccactgccactggggctgcacggactccaagggatcggagcacaccgtcgacggcgtgtcctattccggcgagctgcatttggttcactggaacaccacgaagtacaagtcgtttggcgaggcggctgccgctcccgacggcctggccgtgctgggtgtgttccttaaggctggcaatcaccatgccgaactggacaaggtgaccagcctgctgcagttcgtgctgcacaagggcgatcgcgtcaccctcccccagggctgtgatcccggccagctgctgcccgatgtgcacacctattggacctatgagggttccctgaccactccaccgtgctcggagtcggtcatctggatcgtgttcaagacgcccatcgaagtgtccgacgaccagctgaacgccatgcgcaatctcaatgcctacgacgtgaaggaggagtgcccctgcaacgagttcaacggcaaggtcatcaacaacttccgtcctccgctgccgctgggcaagcgtgagctgcgcgagatcgggggccactaagtcggtggatgttggacaactaagtccttggatagtcaacggattcgagtgtcgtatgattagcttttcgcacccacacatcacatccgtacgccacgagctggaccggcacatctccattgttcaattctcgtctttagttcgtacgcccagcaagagcatacctcctatatgtgcatccgtatccgtattcgcatcagtggatgcttagctgtaaccttaattgtacatgtacgcctgttcgtttgtttgtctgttaaacgtttgcaaaatgacaattagatttatgttattatggtattataaactaaatataacacgcttagatgttgcatatgataacctaactgactttcaattctgtggaaatagttactttaaagggaagctataatccgaagttatttcatctctgataaggacattttcagcaactacacattttcaagaaagcaattgaaggagcttagaccagaagttccacttcatcccaactttagcaataaaatacttgcttggtctgcatcttatcctcgtttcactggcacgaagtgtcatttatttgacattggattaaagtctagcaactcgtgtggttttttggtccattggagaaagtatttctctttgatttcccgccaggcaaactggtaatctctggccaagtctttacaggaagcataggcgatacgctcaggatcggaaagctgttgatcgaacatttcacttagcttcggattgaactttaccaactctagaaatgtaaggaacagcttgtacttgctgatcgccagtgcagcttgtgaagttttcatctttttcttagttactccttgacgctttccatttacggaaatttcatagggcctgcgtgttaggaatatatgtttagatctgaaactgtctagctaaaaggacccttaccttaattcttctgggacctgggaccaaatcaggccattgggggatggctgccagtcggagcgttgggaaaattcaaatcttatgccaggatcaatgtttatctgtggcctttgaggctggaagcgcgtgtgcttaaatgtcctacaatcgaaacgtttaaagatggcacgttccaaagattccagctgcgcatcgtcacagcaaaagttcaggctgctaaagtagatgggtttggagatcaatacatccagtagtgccccctgcacgcctatgacattccatcgcgctatcttatcactgcaggacatggatagagtgcgctctccacgtccgggcttcgttcgcagagctcctggcgtctgcaacattggatcatcgctaaggtcacttattagtttggcacccgtatagaccat

SEQ ID NO: 17264 - DNA, 1439 bp, DROSOPHILA
gacttaccatacagtcgacgctccaatacgttccgcgctacaacgattcaacgattgaaccattcgggatccattcctcgatttccagcgtccatatatatatttatatatataaacaaacatccacccacccataaagtccctataaagcggaccgcgcgatccccagcgaaagtcagacgcgtgccaccaaccgcgagtgcaacatccctcgaaacaaccaactaagatcctacaggataaacagcagagcatagttagtagccatccaaagccaaagtccaagatgagccaccactggggatacaccgaagagaacggacctgcccactgggccaaggagtacccacaggcgtcgggacatcgtcagtcgcccgtggatatcacaccctccagcgccaagaagggcagcgaactgaatgtagctccgctcaagtggaagtatgtgccggagcacaccaaaagcctggtcaatcctggctattgctggcgcgtggatgtgaacggcgccgactccgagctgactggaggaccgctgggcgatcagatctttaagctggagcagttccactgccactggggctgcacggactccaagggatcggagcacaccgtcgacggcgtgtcctattccggcgagctgcatttggttcactggaacaccacgaagtacaagtcgtttggcgaggcggctgccgctcccgacggcctggccgtgctgggtgtgttccttaaggctggcaatcaccatgccgaactggacaaggtgaccagcctgctgcagttcgtgctgcacaagggcgatcgcgtcaccctcccccagggctgtgatcccggccagctgctgcccgatgtgcacacctattggacctatgagggttccctgaccactccaccgtgctcggagtcggtcatctggatcgtgttcaagacgcccatcgaagtgtccgacgaccagctgaacgccatgcgcaatctcaatgcctacgacgtgaaggaggagtgcccctgcaacgagttcaacggcaaggtcatcaacaacttccgtcctccgctgccgctgggcaagcgtgagctgcgcgagatcgggggccactaagtcggtggatgttggacaactaagtccttggatagtcaacggattcgagtgtcgtatgattagcttttcgcacccacacatcacatccgtacgccacgagctggaccggcacatctccattgttcaattctcgtctttagttcgtacgcccagcaagagcatacctcctatatgtgcatccgtatccgtattcgcatcagtggatgcttagctgtaaccttaattgtacatgtacgcctgttcgtttgtttgtctgttaaacgtttgcaaaatgacaattagatttatgttattatggtattataaactaaatataacacgcttagatgttgcatatgat

SEQ ID NO: 17265 - protein, 270 aa, DROSOPHILA
MSHHWGYTEENGPAHWAKEYPQASGHRQSPVDITPSSAKKGSELNVAPLKWKYVPEHTKSLVNPGYCWRVDVNGADSELTGGPLGDQIFKLEQFHCHWGCTDSKGSEHTVDGVSYSGELHLVHWNTTKYKSFGEAAAAPDGLAVLGVFLKAGNHHAELDKVTSLLQFVLHKGDRVTLPQGCDPGQLLPDVHTYWTYEGSLTTPPCSESVIWIVFKTPIEVSDDQLNAMRNLNAYDVKEECPCNEFNGKVINNFRPPLPLGKRELREIGGH

SEQ ID NO: 17266 - DNA, 2724 bp, DROSOPHILA
ttctttatcctcagcgcatgtcacgcgtggagcgctccgcctggattctgatggatctgattcatccgccgctgaccaagggctatatggtgcggcccggtggcgatatgccgccccagatcgtggacatggtctccgagctgggcatcttcggtgtggtgatcggagatgcggagcacattgtgcacaactaccaggcgggacacatgctgcgcacaaagctctcaaccgccaacgaaggaggcgtggcagccggtctgggcgccctggacagtccatatctgatcgatagcgatgacgaggatgagcagaagtaggatcctttaacgagataaaggcttcgaacgccggcattccacctgttgcctcagtcttgtataaatgattatttttgtaaagcgtattgtaaattttttgcactattttttccccgtcccaatgtcaataaataaaatgttaaactagaaattctggtcaatatgcaaactggatttggggctaaagctttgctacagttcatgtaaactcttagtatctaagaactatcaccgtggagtagaatgggagtagacttggagttgggccaatgctgtgcacatcccagctagcgttcactaccgcaccgtcttgcggtaggtggcgtccatcaggcggtcaaccatgctgtcaatgggatggatgataagcggtatgctggccagacccaccagggtgggcaccgtctttagcacgggcataggcgctttgctcagcagtgttttggtggcccaggtgatcctaaaacgatataaatgagcattgcttattatgtgaacataaactcataaaaatgggtatgatcttggagagaacgatgacttcatcgtgtatctacaaatatacaataaacctgtttttgcaacattgcacatgccattctactacgtatatgcactctatagtataatttttactatgcttatataagataagtattatgcaactaatggaaaaagggaatctttaagacgcctcattccctacttccaactatgtaaatacaaccattaagtctacgtttttgggcaattttctggcaagggttgaacgcaccgattgatgaccaggccgggaatggcgacggaggccagcatctgccagcagaagacgtcgccgcccttgacggccacttctctggaggaagcgccctccatttggaggcgcagtgccttgtcaaaagtgtccgtgcagacgtatccgatggccatgccgtaggatgcggccaccagagacttgggcaccagcgggcggaaggactcgccaatctcgttgctgtagcctgcaaagccgtaacaattaaactcatatatttcgatggatctgggcagattctgcttgggaggaacactcacccatatagcgaatgaaggtgtcccggtagatgtccacctccttcaaagacgtggaagttttcttggtgcccttatcccggcggatgaactgtttgtcctccgacattgtctattttttttatttttattttttatttttggaatggcagaagttctaatgctattttgattttcgagtaattgggtaatatgacaagatgatctgatcttctccaactgacgcaaaatcagctggcaactgagtttcctaaaaattcattgaaatcgcttaaaatatcgctttaaataaaataattaaagcgcctaactgcctataaattggagacttaaaaacaaactgtttatataaatattttaattgcgcgtatcgataatgtattattgttatcgattgtcagagctagtggaaaaaacgctaaaatcagctatttatggcgattaaaatttataggaatttatagcaattatgaaatatcatatattagtttttatattgtattcgttttttaatgagctaagtccatttaatatcgcttgctatacacttaatcatataacatatgagttccgaactcttttaagttaaataaagtaatgtgaacaaattgtcatattgtcacatatgtgaatttattagagctggatttttggctacactttcaaaaaccgcgccaagtaatttcacctttccatgtgtgaccattgcagctgcaccgcaatctaaggcccagcccgcgctgtggtcacactgacaaataaaaaaaaacaagacgtcgtcattcgcgttggaattccaacaaaatagttaagttttccttttgtttaacacctgtcgagttagccagcgagttagtcagtgacgcttgccggaattccaggagcaagtcagccagcataaatgtgagtaatggtcggaactgacccgccatcccctccgcagccgccccgcaaaaagttggctacttgtgtttttgtcaatgccgctgtattcgggcattagtcatgcccagaaattcgattttgctcgcgaactgcgtcaccgaaggacactgagtagcaagatgggagttactactccgccaaggatcaattgggtaaccatcgtcatcggcctggccagcgaaactcacgccgagatgatagattcccaaggggaggggggctattacagcccgaaatatatcaaaattctatggaatcattatgctcgggaagtttggcattacaatatgagttatagaatcgttttggatagtgagtgtaaagcaatcaaaggatataaacaaagctgggatcagatccagttgattttgcataaatcgatattgtaact

SEQ ID NO: 17267 - DNA, 842 bp, DROSOPHILA
tttttaagtctccaatttataggcagttaggcgctttaattattttatttaaagcgatattttaagcgatttcaatgaatttttaggaaactcagttgccagctgattttgcgtcagttggagaagatcagatcatcttgtcatattacccaattactcgaaaatcaaaatagcattagaacttctgccattccaaaaataaaaaataaaaataaaaaaaatagacaatgtcggaggacaaacagttcatccgccgggataagggcaccaagaaaacttccacgtctttgaaggaggtggacatctaccgggacaccttcattcgctatatgggctacagcaacgagattggcgagtccttccgcccgctggtgcccaagtctctggtggccgcatcctacggcatggccatcggatacgtctgcacggacacttttgacaaggcactgcgcctccaaatggagggcgcttcctccagagaagtggccgtcaagggcggcgacgtcttctgctggcagatgctggcctccgtcgccattcccggcctggtcatcaatcggatcacctgggccaccaaaacactgctgagcaaagcgcctatgcccgtgctaaagacggtgcccaccctggtgggtctggccagcataccgcttatcatccatcccattgacagcatggttgaccgcctgatggacgccacctaccgcaagacggtgcggtagtgaacgctagctgggatgtgcacagcattggcccaactccaagtctactcccattctactccacggtgatagttcttagatactaagagtttacatgaactgtagcaaagctttagcccc

SEQ ID NO: 17268 - protein, 164 aa, DROSOPHILA
MSEDKQFIRRDKGTKKTSTSLKEVDIYRDTFIRYMGYSNEIGESFRPLVPKSLVAASYGMAIGYVCTDTFDKALRLQMEGASSREVAVKGGDVFCWQMLASVAIPGLVINRITWATKTLLSKAPMPVLKTVPTLVGLASIPLIIHPIDSMVDRLMDATYRKTVR

SEQ ID NO: 17269 - DNA, 8585 bp, DROSOPHILA
gagttccacgcggccatgccacatgaatgccaatcagtgcggtggttggatgataatcccaatgctactacgctggctcagtgtttcgaattcaagtacaagcgaaaagtaaaaaaataatatacatataaataaataaatacgccgaaaagccgttcgaattttgtgcataaccttgcaactggcgaatcgcaatctgctgatgatgagctcattgaaaatcaaaactatcgactatcaaaatgactatgactatcagcagaactaaacgatctaacgcaccggctatccgtcaaattaattgcaattaatttatggccaatggtgggagcaatgcgtcgcctatcagcctaattgaaaccgcattgccatggccaattaaaaagcgtttagaccaaaaaacgacaaacgccggccggcatcatcaatcttgtcgattcagttgccaccaactggatggttgaagcagccgaaggaccaaagtcacttgagatttcaacttcatccgcgtcgtcgacgttgcaagttaattaattaaaacgcggcagcgcgatgagcggcgatgcaaattaagaaaattgcaaaacagcattccgaattgaattgacaacgccagctagcaaacaagccacacgcttttaactgttgtacggtacagtgggacttgcgcaacacgaacttattactttgctcgcatggcattcataaatattttgaatataaggcaatcgttgaattcgtcttaaaacgaatctcttaaaaggttttccaaaacatcaaagtttcagtttccccaatcccacttcacagttcgtgctacgcaggttccactgtgctttattgtgtatggatgtcgtggtttggtcagtggcgactgcgctgccggcgtcgctgcttcgccttggccaagtcgactgttttggcggcagttatcagtgcgggcagtgtgaacagtttgagaagtccattcgacgcaacgcagcgcatgcgcgacgctgttgaccaaaaaactaaccgttattgcccgcccgttattgttatttgccgcaggccaaaatcggaaaatctaaggtgcaagtgagagagaagagagcaaagagcgcagcgaacgcaactcaatttgtatgcgacatttcaaagtcaaagccatggtgcagtcgctggatatatccgccataacgggacagcaaacagatgcggtaaatccacctactcacacatacacacaaacacataagtatgtggccttcgaacctactcacatacttgtatacacacacacacacgctgcgggggggcgtggcattgcattgtcatttgccattcgccgctcaacgaggcgtatgcgtcatatttaacccgcctttccccccccccccccatccgcctttccgccgcattttcccttttttctcgaactaaagatggcttaatggattaaccgctgccggcaactgataagcgtttattagactgtcaagcacacgcccttaatgcacagaaagtgggtgggaaactggagcgccggaatcttggaacgtttagactagttacactcctggggagcatttttacattttttatttgatgtgtccttcaatgcgatcagttgtctttaaaaccagcaagaagaagcaaggaatatttaagaaatttatctcaaaaactagatatatttcataacttataatcactttgtatgtttttagagtttctaaggaccatttaaagaaaatgttaaggtagttactaaacttttagtactgatttcttgtcaatactatgaatcccttcgtgtttcattaatttctttgcaaacagcatgaaatctgtacattattggttttccagttggctttaaataccactgccgcgtcattccgctggcagacataacataacaaaatttaagcaccaaacttggatgctgaccaagttttaatgcggttagaggggaaggagagccagaaaaaaaaagaaagatacccataagccgagcactaaaacgcttcaattagcgaacgttcggcgaaacttttcgccaaacttatgccagaacgttacacccttaaactacacacgggtacacagagagaatttctgagggcattatgcaaatctaaggaatatagtgcaaatatagagagggtttcataaatatgcattaaaaatattttaaatcttaatttgcatacatatgttaaattttctaataacctttattttttttaaaatatttttcaccgtgtaggagccaagcaaacggagcaaaccctccgctttaagacgcactctgcaggcactgcgccagcgtctgactaaaaggaatcgccccaaaccgccggactggttcctcgagaagttctccaacaccaccaacacggacaagattggcaagggttgtccggcgatggaggatgcggcgctatccagcgaaatacgtggctccagtgtcctgtgcaaccgtctgtccgtcgatcccaccctgcagtcgcattacagagtgagtgagcttcggcacaaataaaaactagctacttagccatgcttgcttacttctcgtagtcgtctgtaattgagaaagttcgaattcaaaatatagtaaatttaaaaaaactcaatataattacagttttatacattcactttaagaaagtaaagtttagaattagacctaaactacctttaaattcgcctaaatgtatgcaacgaaatatttcccaattatgttgctcccttccagacattttaattagtaattaattaaatataaatgtatataattaatcaatttttttttgaatgcacatcttattttagtggctggccatcgtttcactggcagtgctttacaatatcatcttcgtggtgggacgtgcggtcttctgggagatcaataagagtgctcccgccttttggtacacgctggactacctgtgcgactttatctatctgctggatacgctcgtccacatgcacgagggtgagccactgacatccacatccacatccctccaaccccgttccccccttgccacgttgagggatctagatttttgcgatttacctatgcaaatgagacccgcagtaagccgccttcagacaatagctagcaatgctgtcgacaaagccatttggcacgcatgcgagtcccatttctgtccacgattccacacacacacacacacacacacacacttaaacacacatatgctggcgagtcctgtgagctctggattgtgggtgtggtcgggctgccaaatgcaggggataagccaaccttgacattttgtacaatagcaacaaacgctctggtaccgcttagtttcatacgctactccagcatgatgctcctcatcttagcaggggaatgtgacaggatgaaggatatatatgggggatttattacatcatgctacaaggagttgatgctagttgtcccaaacttttgcggttggtggtagcaaactaacttgggcaactgaaatcaatacaagcgaatcatgtgaagatataatcttccatgattttgacagttcttaatagtaatttatgcttttcaaacagaaataacatttgtatctgccacatagatacatatatcaagatatcaatccactggtatcttatgtagggtactcccgttctggccaacccgtttaaaatccaaagagcaataaaaatacattcgccacatggcgtagccaaaagccaccactgagacaaagccggagtcgccacacggagcaaatctctaggtcacctcactgccatagaactatgtaaatctcattgtttccgctctcatgcttcgcaggatttttggaccaaggtctcctcgtgcgggatgcctttcggctgcgccggcactatttccacaccaagggctggtacctcgacgtcctgtccatgctgcccacggacttggcctacatctggtggccgccggagacctgctccagtctgtatctgccgtgtcccgtgatagtgcgtctgaatcgtctgctcaggatcaatcgactgtgggagtggttcgatcgaacggagacagcgacgggatatccgaatgccttccgcatctgcaaggtggtgctggccattttggtgctgatccactggaatgcgtgcatgtactttgccataagctacgaaatcggcttcagttcggactcgtgggtgtataatctgaatggaacgaggaacaatacgttgcagcggcaatatatctatagtttctactggtcgacgctaacgctgaccaccattggcgagactccaacgccggagaacgatgtggagtatctgttcgtggtggccgatttcctggctggcgtcctaatcttcgccaccattgtgggtgagttgtgaaaggaatgggtcatttaactgggttgataacctagaaaatccctttcgggctccctcagtccctcagtttgctcgtgtttacgcaaatatttcgcctgatcgtttaattggttccagagtgacatctgtgacatcaatgggtattaatttacagccacgcacgtcaaggacccacacgtacaccccgaccttcgccgaaccaccgacccacattattcattacgccttcagttgtgtcctcttcggtggttccatgccattttgttttgttttgccgggttgatttgtagccgtcacccccccatcccctcacatcatcatctcccaccgcttctgtttttttttttcgtttttggcaaacgtgcctttttatcatttttgtcgtcgtccttatcgccgccattaccgccgcccaaatgggttggcggtgtcaaggagtaaggcacattcctgcattcccaacagctgccagactccccagatccccatcatttgactgctccatccccacgacctggctctgcaaacaaatttacttactgtgatgaatgccgagttcgtttggacaggacaatttgacgggcacactcgaagaaatagattaatagtactaggaaattaggcaggaaatctcagaagagagagactagattgcatgtccttacatatttacaaaagtatgagcagatatgtgaattacatagtgttgttagttaaatcaagttggttctattagtatagtattaaatctaattaaaattaaatcagctttcttaaaacaataaggctgttcatagcctataatagctccttatgttactcattattaatttttcctgccaaaaatttatgcaagtacaaaatatgactctattcattagggccttaaagtcaaccaagttagatttcaaaatatcctgagctaagtatttgtttttcgctgagtgcccctaggcatcttctccatttcgtggaatcgagcatgtgtgtgtatttgactccggcaccggaagtgccgccattagtcgcctttgtgccacgttatccgcacgccggaatccatgagtgaagcttcggccagcttcggtttcactgcataccatgtgggcgggcgaaccggttatgaaatggccaagatgaattgctgccactctgcttgttcattaaccaagtttccctaacacactgcgcccatttccaggtaacattggctccatgatctccaacatgaatgtggcccgcgtggagttccagaatcgcatggacggagtcaagcagtacatggccttccggcgagtgggtcacgagctggaggcccgggtgatccgctggtttgcctacacgtggtcgcagagtggtgcgctggacgaggagcgtgtgctggccgctctgccggacaagctgaaggcggagatcgctatccaggtgcacatggatacgctgaagcaggtgcgcatcttccacgacacggaaccgggtctcctcgaggccctggtgctgaagctcaaactgcaggtcttcagtccgggcgactatatctgtcgcaagggtgacgtgggcaaggagatgtacatcgtgaagcgtggcaagttgtccgtcgtcggtgatgatggcatcaccgtgctggccaccttgggcgccggttcggtgttcggcgaggtttccgtactcgagattgcgggcaatcggacgggcaatcggcgcaccgccaatgtgagatccctgggctactcggatctcttctgtctggcgaaacgggatttgtgggagaccctgtccgactatccggaggccagatccacgctcactcagcgaggatgccagctgctgcgcaaggatggcttactggacgagcaaatattcgctggtaagttcgattagtacatttaggtatcaaatattacgtatacgtcatgttgttcaaaacgtaaatggaaggtattccactattttctcattcgtcctcattatttctgtctacagtgcacttctagatgttgcattatattatgtaactgttagatatattaagattaatatgaaattcaaactccatttccagattcacaaagggtacacgacagcatcgagggcggcatcgaaaagctggagctctcggtggagaacctcaacatgcggctggcccgcctcctggctgagtacacggcaagccaggccaagatcaagcagcgcctcgcgaagctggagatgaagtgagtatctatagacatcctcgcacctaaaactttattcccccaaccttaaaccatccattacagtggtggccctggcacgtggcgattggagtgtgagccccagagtcgagctcgcagcggacgcctctattcgctgcagcccaagcggcgcccacgttcgcgacccgacgcgactgccaagagcagcgatgctgccaagcagaacacactgtaagtcgccggaaaacgcgctggaaaaggctcggaaccagttgcctaccgcccccgccgccgtcagttcatatctccagccgaggccggaaaatagtgataaatgcattaaacttgcaggagttgtctgggcggggagataatcctttttggcccgcagccagcagttttttgggctacaaaaagcgggtaaatcaatttttaatttttacaattagtctatagagctatataggagctggggagctggagctgaaaattgggtgtggaagtgatgcgcgggagttgtttgttgcaaactttataaatttattagatgattccaaaaactgaatgtgcctcaaaaagtgtgtgcgtgtgtaagagaaaaattgggttaattgtaatagcatcagattatacccaactacgattcagtgtttgtacataagttaagcatagtccaattttacacacctaggctaggatgatttttacacacaccgaattgatttagcgcaccatgatgcaaccaactgaccgatccgacgagaaacatttcacattaactgaccaagaaacgatggacattgctgaaataattgaaatgggcacgggtgatgcgcacacaaatcgaaattcgaaagaaagaaaacgttaacaaacaagcttccaaagcttccaaaccaaatgcagaacgcaaaacacatggaaacaaattcaagaaacaaatgaattgtatttttatattagtcctagacattgagtgtacgatgtattgtctatgtgtaagtaaatctaaagaataaacgagaatcgagtcaaattattcggagcacttgtgtcagcgaaattcgcatccgccgcgaagtctttacccatttccacaattttaccagccgacggtttaatgcaaatcgcccacagcctccggccacgcgtgttttttttccaaaggattctcttcttcgcaggattctttttactggctctaatgacatcttcgagggcgtttgggaaaaaaaaaacatatatgggaagagcaccagcaacaaagtcaataaatgcagacgcattggggagaatgacagcgacacgcgttggctttttaggtgcgacttggctttctttgtgcgtacaacgcggcgtatgagcaatgtatgagtatgagtgcgagtgctaaaaaaataggtaaaaatggggtagcaaaggtgttacgtggctgattttacacagagaagtgtgcagcaatacttttaaatgctacatattgctaagcatattttaataaattttattttgttagaaataatttgaaattgacaatattaaatgcttatttgatttgattttatatattaaaatatttagttcccccgctttttaagctttccactgtgtattggggcacacggcggcatgtggagtcctgtgtagccacgtggaaccccaaaacggtcgcatcatgccgtaagtgcagtaaaaaatcaattttgacaaaatgttgaaaaacacactcaaagtctttaaaaaaaaaaaaagcgaaataagtgtaggcgaagtttggcccctgatgaaaatcatttgggcgttgggataaggaggcgtggcacgtgaacggaaccgattgttaagatgaaggggtcggcggggggtgtcgaaaaatgactgacaataaaatgttgacgcagccaaggagcattatggatacagggtgctcgaaggcgaatggattaagtcgacaagtccacggatgggtggctcaagttgccccacttcaagtattccatttcacaatagcactgagtatac

SEQ ID NO: 17270 - DNA, 2909 bp, DROSOPHILA
gaccaaaaaactaaccgttattgcccgcccgttattgttatttgccgcaggccaaaatcggaaaatctaaggtgcaagtgagagagaagagagcaaagagcgcagcgaacgcaactcaatttgtatgcgacatttcaaagtcaaagccatggtgcagtcgctggatatatccgccataacgggacagcaaacagatgcggagccaagcaaacggagcaaaccctccgctttaagacgcactctgcaggcactgcgccagcgtctgactaaaaggaatcgccccaaaccgccggactggttcctcgagaagttctccaacaccaccaacacggacaagattggcaagggttgtccggcgatggaggatgcggcgctatccagcgaaatacgtggctccagtgtcctgtgcaaccgtctgtccgtcgatcccaccctgcagtcgcattacagatggctggccatcgtttcactggcagtgctttacaatatcatcttcgtggtgggacgtgcggtcttctgggagatcaataagagtgctcccgccttttggtacacgctggactacctgtgcgactttatctatctgctggatacgctcgtccacatgcacgagggatttttggaccaaggtctcctcgtgcgggatgcctttcggctgcgccggcactatttccacaccaagggctggtacctcgacgtcctgtccatgctgcccacggacttggcctacatctggtggccgccggagacctgctccagtctgtatctgccgtgtcccgtgatagtgcgtctgaatcgtctgctcaggatcaatcgactgtgggagtggttcgatcgaacggagacagcgacgggatatccgaatgccttccgcatctgcaaggtggtgctggccattttggtgctgatccactggaatgcgtgcatgtactttgccataagctacgaaatcggcttcagttcggactcgtgggtgtataatctgaatggaacgaggaacaatacgttgcagcggcaatatatctatagtttctactggtcgacgctaacgctgaccaccattggcgagactccaacgccggagaacgatgtggagtatctgttcgtggtggccgatttcctggctggcgtcctaatcttcgccaccattgtgggtaacattggctccatgatctccaacatgaatgtggcccgcgtggagttccagaatcgcatggacggagtcaagcagtacatggccttccggcgagtgggtcacgagctggaggcccgggtgatccgctggtttgcctacacgtggtcgcagagtggtgcgctggacgaggagcgtgtgctggccgctctgccggacaagctgaaggcggagatcgctatccaggtgcacatggatacgctgaagcaggtgcgcatcttccacgacacggaaccgggtctcctcgaggccctggtgctgaagctcaaactgcaggtcttcagtccgggcgactatatctgtcgcaagggtgacgtgggcaaggagatgtacatcgtgaagcgtggcaagttgtccgtcgtcggtgatgatggcatcaccgtgctggccaccttgggcgccggttcggtgttcggcgaggtttccgtactcgagattgcgggcaatcggacgggcaatcggcgcaccgccaatgtgagatccctgggctactcggatctcttctgtctggcgaaacgggatttgtgggagaccctgtccgactatccggaggccagatccacgctcactcagcgaggatgccagctgctgcgcaaggatggcttactggacgagcaaatattcgctgattcacaaagggtacacgacagcatcgagggcggcatcgaaaagctggagctctcggtggagaacctcaacatgcggctggcccgcctcctggctgagtacacggcaagccaggccaagatcaagcagcgcctcgcgaagctggagatgaatggtggccctggcacgtggcgattggagtgtgagccccagagtcgagctcgcagcggacgcctctattcgctgcagcccaagcggcgcccacgttcgcgacccgacgcgactgccaagagcagcgatgctgccaagcagaacacactgtaagtcgccggaaaacgcgctggaaaaggctcggaaccagttgcctaccgcccccgccgccgtcagttcatatctccagccgaggccggaaaatagtgataaatgcattaaacttgcaggagttgtctgggcggggagataatcctttttggcccgcagccagcagttttttgggctacaaaaagcgggtaaatcaatttttaatttttacaattagtctatagagctatataggagctggggagctggagctgaaaattgggtgtggaagtgatgcgcgggagttgtttgttgcaaactttataaatttattagatgattccaaaaactgaatgtgcctcaaaaagtgtgtgcgtgtgtaagagaaaaattgggttaattgtaatagcatcagattatacccaactacgattcagtgtttgtacataagttaagcatagtccaattttacacacctaggctaggatgatttttacacacaccgaattgatttagcgcaccatgatgcaaccaactgaccgatccgacgagaaacatttcacattaactgaccaagaaacgatggacattgctgaaataattgaaatgggcacgggtgatgcgcacacaaatcgaaattcgaaagaaagaaaacgttaacaaacaagcttccaaagcttccaaaccaaatgcagaacgcaaaacacatggaaacaaattcaagaaacaaatgaattgtatttttatattagtcctagacattgagtgtacgatgtattgtctatgtgtaagtaaatctaaagaataaacg

SEQ ID NO: 17271 - protein, 665 aa, DROSOPHILA
MRHFKVKAMVQSLDISAITGQQTDAEPSKRSKPSALRRTLQALRQRLTKRNRPKPPDWFLEKFSNTTNTDKIGKGCPAMEDAALSSEIRGSSVLCNRLSVDPTLQSHYRWLAIVSLAVLYNIIFVVGRAVFWEINKSAPAFWYTLDYLCDFIYLLDTLVHMHEGFLDQGLLVRDAFRLRRHYFHTKGWYLDVLSMLPTDLAYIWWPPETCSSLYLPCPVIVRLNRLLRINRLWEWFDRTETATGYPNAFRICKVVLAILVLIHWNACMYFAISYEIGFSSDSWVYNLNGTRNNTLQRQYIYSFYWSTLTLTTIGETPTPENDVEYLFVVADFLAGVLIFATIVGNIGSMISNMNVARVEFQNRMDGVKQYMAFRRVGHELEARVIRWFAYTWSQSGALDEERVLAALPDKLKAEIAIQVHMDTLKQVRIFHDTEPGLLEALVLKLKLQVFSPGDYICRKGDVGKEMYIVKRGKLSVVGDDGITVLATLGAGSVFGEVSVLEIAGNRTGNRRTANVRSLGYSDLFCLAKRDLWETLSDYPEARSTLTQRGCQLLRKDGLLDEQIFADSQRVHDSIEGGIEKLELSVENLNMRLARLLAEYTASQAKIKQRLAKLEMNGGPGTWRLECEPQSRARSGRLYSLQPKRRPRSRPDATAKSSDAAKQNTL

SEQ ID NO: 17272 - DNA, 7964 bp, DROSOPHILA
atttcctggccatttatcaagctttaatggctataacgagctaattgcatagtgggtcaagtgcagagcagggcttcgaatggcatatttttagaccgtttaactacttgcctttagtcccagttactactggccaaccgaattggagtcctcgttcatgtttgactgcctggttttcgttggcccagacacacgcgagtattgattttgtgcgactctgtgtttacacgacgctgcagcctctccacttttcccagcacttttcacttttcctttcctttcgtttcacacttttccgggtcggcggttgggccgttgtttcataagatggtcccgattctcggaatcgattggccagcttaactcggccaacttgtgttcttagccttaacgaggtctactgcaatttgcattcgaccctcgccgtggtctcggtcgcttttccgtcgattggtgacttttctccttcactgcttttctattgatttggcccacaacactttagtgcatcgctttgccttgattttcatctggcctttcacttaactgtgcacacttgccaattgtttaattcactaattcgaataatttatcaattgttgaacagtaagttgtggccaattagtgtcgatagacgttttttatttgttaattttgtaatttatttagcaggtcacacgcaactacatggccaacgacggggacgactgcggattttccgattttcccttaacgctttttgacagttttggcgcatggcgcttttgccgtatgctgccacggagcttttccgcataccgagtgttgggaaactcggccggaaaagcttgcagcataagcttttcattgcgctctttttaaagatgcaaaaaccaatgaaaattttagctagctatattttatttcgaattttattgaattgcttaaattttttcatgggtatagcaattttatagtaatattttattttatattaagatacaaaatcgataaacaccagtttgtttcagttaatgttttccactttattgtgagcgcatgagagtacaagtaattttgttgtagattgcattttagggcagcttacacattaaatattagttagttaaaaatgaattttgcatgaataaatacataaatacacacgaacgtagaagaacacgacatgtttatgttagacactgaaatgaatggattaaacacacagatttcatctgtatccctagattcgagtcgcaaagatttctttatatctaggcgtagtcacgggctccctccagtttgcgcatctgcaagtaaataaattgcaataatacaaaatttagttagctaattaaacagggatgcaaaccgatcgaaatggcggacgggttcggttgataggattgaagagtttctaaaccaatcgtattcggttcacaaaagcggtttagattagttttgcgtgcaggtcgtaatatctttagtatacgaatatctgctgctaaagcgataaaacataacacatttaatagttatagttaagcgagatatgtatatgccaaatggttcgggttgtggttcggtttgcatccctgaaatcaagtaattcgggagtatttacaatgcaagtgtgagtgagtgtttgtgtgtgtgatgggtgtgtgtgtgtgtgtgtgtgtgtaatgggtgggcggaatcacggatcagtagaaggactcctcgctccaggcgcttatcaacctgactctcacctcgcgttcatcggcgtgcgttcggtacttctcggatgcctcgttaacctttggcacgggcttcgcctccaggacctgggtgtagagcagggcggcagccacgccccccagcacaggtcccacccagtatacccaatgcgacgcccagatgtcggtggcaaaggcggtgcccacggtgcgagcgggattcatgctggccccggtgtagcggatggtgcccaagtgacccagggtcaccgccattccgatggccaagggcgccgtgtagcgggaatcgggcttgtggggatcacaggccccaaagacgacgagcaccagcaggagtcccaggaagaactcgattcccaggccctgcagctcggtgatattgggcgccagagaggtgtgacccaggccattgtaatagtcctgatcgatgagaatctaatgtgttggtataaaaaaaatatttatatatagatagatagatagattagattagatatcttaatcttaaaaataaatatagctcttagttttgttgagtatgtaaaaatactttaaactattagattttaagttgattcattgaactggtgatttctactaaatcatttgttttttaaaatgtgtagtttttaatacaaaataaaaccgaaaaatacgagtatttaatcaaagtactttcttgacattggcgtacccgtatcatttatccactcaacgaaagaaagtaatggtcaaaacacaaggcatttttaaccgcaaccggatgtgaggcaatcacaataataaacttaataacatgtatgtacatatgtgtctcagtgtgttattttaagaaagcgagataagctcaaaagcattgcaaacaatcatcttacaacgagtaagtatttatatttattattatttatacatttttttaattgactacattttggatttgattttgaaatctggcagttctgattgagacacttacaagccaaatgacttttctttggcaatgctgttttgtagatataccatagaagtaaagataggttagatttttttgtcataatgacgacctctatataattgatgatgatgatataagaaatagtggaatctgatgagtattttgttttaataatttcactcagatgtatgtaataatttatgtgtgtaatgcctaccttaaccgctgcagttccggcaattgcacccaagcactggaaaaccacatagaaaaaggctctgatcaagctaattcgtcctgcgaccaacattccagcggtaacggcaggattcacatgaccaccactcaagtggcccacaatctgcaaggatatatagttgaatatgggtatgaataatgtcgtagattaacgagccacccaccgtgatggccatgaagatagccaggccaaaagccaaggccttgaaggtgccatcctcaatttgggtgcatgcgccgcaggcaaagaaattgaggatcaaattgccaaggaattctccaatcaaggcctgccacaatcgcagctccttggatttgagctagaagacaaattaataagtaaagtagcattatttaatgatatttttaataactgactggtatttcgattaaactttgtctttgtatgatttgcactcacctcattgagacccagtgagtattcgaattttcccatcttcttcgcttcacttttcaactaaaactgacggactgaaaaaaaagaccaacggaaatatcagtgaacgatgtctggtagttaatgcaaatggcaatccaaaatgcaaatggaaatgtgtttgaaaatggaagtggacaattgtccgacttcagcaggtatttagccacttttatcactcatttaaggtgcgatattgttttggcctttggtgacagttttgacaatctgcatttccgctgcaatttccgtcacgatgcctaattggccgacacttctgtctggtcttcaattggaaaagtctaggggttttcatttaactcaaggcttgtgtcccaaaaattcttaatctacgtttatttattaaatgctcaactttagcacttgtcattaaaagtgggtaactggaggcagccagtgggtaactgggcaatcctcctctcaactcgacgactgccagcttatcagcaattgcagctgcatgtgagaatatatataaaacaaacaaagtgtataatatttaattggcaacgggtcataaaaacgatgtaaatatttgagcacaacgccgtcaggagtgaacagaactcgcaattgagtttttaaccggcagtttttgtagccgcggggggattaggcctggtttttttttagagtgttctagagtggcatcagtggaaagcgtttgctttgctcttcttatttggcgcaacgcggtcacgaacaggcccaaaaatgggctaagacttgttggccatgcccccacacatcaagaacatcgagagctttaaaaatacatacgagtatgtatgtataaaataatttatattgcatatatcatttcatttggtaatcaatcagtgagcgctcaatgttaattcccattttctatgctcgcaaagcattcaagttgttcatcacttcgagtatttacttttctaatgcaatcttaatgaatttcgtgtttcatttgcgtcatctacgagcatgagccccatatcgatatcagccaatagactcaagtgctctgatatgaaaaagcgagttctattccttaattgaggtgcagggggtgcgctggatgatcaaatagtaattgagttgacttaaggttgggcccacggataagtggaatgccttgccatagagcgaaaatctacccacacaacaatttccattgactggaggtttgaggaaaacggggtaaaaacctgagagtttcaatatttgtcatcgaccgttaatcatgcattgtgaaaacggattcaacaatttgagcatgtaattataatctttattagttcctatgaaatgctttaattggccagctactaactgacattccgtagtgcggattcacaggtgctgattatcactttggttgcagctaatgagaatggttaaatggtgtatgtacaaccacaaggtgttgggtcctcgaatgaaaaatctaagcaattaatcggctctgattaaagtttgctttgcgattatttcgggccgcaatttatggatgataagcttgttttataattggaaacccaatatgcccctcaccaattctggaattttcaatagcgcgccaacaaatgtggctaattgccagtgtacaagtgggtccgtgccaattcgcataatatccgaacaataaagtaaaagtttgctcaacaaattagcacaaacggcgagaacaaaatccacataattcacacatattttcgcacacacaacaaagtcgaatgcatttcaacgcatttcgttctgattttcgtcattcgaggcatttttgtgactttcgaaacgtgtatgaacaaggggttcatgaacttgaactctcgccgaattgaaccgaggggcggctaaaaatgtgttccaataaaatttaattatatgcaaatattgaagaatgtcgttaagaaaaatcgccgcatacgcagacattcgtcattaatttaaaaacatgccgataacacgggtataaatctcccgtttctgaagctgatgagctaatatctttggctttgctttcttgatgtatttttatggactctaaaagcgagtatacaaattatcttgaccacttttcaagtgttttcggtactattgccgttttgagtagcatttattggcatcaaagtaattaccaatatggcagtcacatgatctctaactattttagtgttttttgaaaaagttaagggacaacaatgtaatgcagactattaaagcttaggaactagctgttaactttgcctgaaatcagggaactggacttcatattcattgtttttgaactattgtatctggcctagctccaattgcgttcgtcgcctgatggcatttggcgatatagacgtttgcaattgtttgccgcaactttgtcacttaaaaagccataaaacttacttaagccctaaatttgtatgcaacgccgaacgtgggaggggcaggagcgataaaagtggggggaaaccacacacacacagaggcaattgcaaagttaatagcccaaactcccacacgtgttcggggccacagtgaagccaggcttctgatggacattcttcacttaaattaccaaatcagagaccagaaaattgctgcggtcaacccatcaatcacaagtgtcagatatgaagcgaactgaatgccccaagctctgtaagacccattaccatatcatcggatcatggcattgccgtacctaaataacaattagccaatgaacacaataccaaaacatatagaaatcttaaaagcttaaacagatcgcacgaccgcatcgtttcacgcaacgctggtttcaaaatgaaaagcacaatgaaatgtcccaaatgtatgaattttcaaatacacatcttttggcaagaataacattttatattcgcggcttttaattactcagaatcgtgctggcggtcaaaagtaaaaattgtacataaattgttatatttttacgattgacatgcgggggcggtctcacaaaattccaaaaatcataacaagaggaaaacagatcaaagtagatttgataaatggcgaagtaaggggttagaaaaaaatgcaaaacggtattacagcattagtttcggtgcacagggagaaactttagttactttgaattatacttgcttaacttaaattattaaatttgtcactatttagctatataagcaattacatttcattagtttatattaaactcaaaaactaaatataaataaatcgattacaagcttataaatacaccattaacagcataatattgcaggataactgatttgattagatctaaacttaattaaaaacattaataatacacatatgttgaaatattctctttttgatatgcccatttaaagtttatgtactttatgcattttcaagatcactttcaattagaagtttaccttgttttgctattagctcactttggcacctttgccacctgcttacgaactcgacttaacggcaacaacaacagctaacaccttaacttgcacttaacaaatatttaattcaattcggcaggaattgttagctcactcgaggagtgatccgcgcactttgactcgacgacaaaaactgcgcgaccgcatttggcagcaaaaagccaaaggcaccaaaaacgatggcgcagaaagagcgcgatttataaagagagaggggcagagagataaattcatgcgaagagcgcacatttatattaattaaattataaaaaactaaataatgtaattatgcgtattaactaaatgtttatataaatgtgtaactaattattaaaaacaaattagtttttatgagcttttatgtttacattctatacgctttaatataagctttatgcgtaagtataagaaagttaatcagagaacttattcgtttatagatatatatatcaaattcttcatcgatttaatttaattgcactatccaaagttttgaaagggaatgaattcgaaattgtttagctgcgcgggcgcaccgcttaaaaacacaacatgccaggcaccgaaactcaccacaccccacacgcgtcagccaagacacaaaccatgcaaaaatattaaattgaaaattccgaccaatcagtaaatttatggactgcaaatagttatttaggggtaatatttacacccacccatcattcacgtcagacagtgacgcttgcagaaaagtttccgttgcttttcggtgttcttatcagagaaatcggcccagaaatcatgtcttcacaaacaatttctttaattaatttagtgtactccaagcagagaataccgaacttttccatgacattttgacgtaaaatcaaattcactttatctttatgggtgttgtcttcgaagtatatttgccattttaaattaataaccgcaaaatcgcagatcacaaatccaagcacacttttatgaggccctcataaatgcgtataatcacaattttatgactgtgagcttggtgtaaaataaagtgtaatcgtataagtcaaatataagagtagaaatgatcgagatagtacaccgaaaacaacgtaggcacactttgtatgtatagtttgcttacatta

SEQ ID NO: 17273 - DNA, 1246 bp, DROSOPHILA
agtcaaagtgcgcggatcactcctcgagtgagctaacaattcctgccgaattgaattaaatatttgttaagtgcaagttaaggtgttagctgttgttgttgccgttaagtcgagttcgtaagcaggtggcaaaggtgccaaagtgagctaatagcaaaacaagtccgtcagttttagttgaaaagtgaagcgaagaagatgggaaaattcgaatactcactgggtctcaatgagctcaaatccaaggagctgcgattgtggcaggccttgattggagaattccttggcaatttgatcctcaatttctttgcctgcggcgcatgcacccaaattgaggatggcaccttcaaggccttggcttttggcctggctatcttcatggccatcacgattgtgggccacttgagtggtggtcatgtgaatcctgccgttaccgctggaatgttggtcgcaggacgaattagcttgatcagagcctttttctatgtggttttccagtgcttgggtgcaattgccggaactgcagcggttaagattctcatcgatcaggactattacaatggcctgggtcacacctctctggcgcccaatatcaccgagctgcagggcctgggaatcgagttcttcctgggactcctgctggtgctcgtcgtctttggggcctgtgatccccacaagcccgattcccgctacacggcgcccttggccatcggaatggcggtgaccctgggtcacttgggcaccatccgctacaccggggccagcatgaatcccgctcgcaccgtgggcaccgcctttgccaccgacatctgggcgtcgcattgggtatactgggtgggacctgtgctggggggcgtggctgccgccctgctctacacccaggtcctggaggcgaagcccgtgccaaaggttaacgaggcatccgagaagtaccgaacgcacgccgatgaacgcgagatgcgcaaactggagggagcccgtgactacgcctagatataaagaaatctttgcgactcgaatctagggatacagatgaaatctgtgtgtttaatccattcatttcagtgtctaacataaacatgtcgtgttcttctacgttcgtgtgtatttatgtatttattcatgcaaaattcatttttaactaactaatatttaatgtgtaagctgccctaaaatgcaatctacaacaaaattacttgtactctcatgcgctcacaataaagtggaaaacattaactgaaacaaa

SEQ ID NO: 17274 - protein, 264 aa, DROSOPHILA
MGKFEYSLGLNELKSKELRLWQALIGEFLGNLILNFFACGACTQIEDGTFKALAFGLAIFMAITIVGHLSGGHVNPAVTAGMLVAGRISLIRAFFYVVFQCLGAIAGTAAVKILIDQDYYNGLGHTSLAPNITELQGLGIEFFLGLLLVLVVFGACDPHKPDSRYTAPLAIGMAVTLGHLGTIRYTGASMNPARTVGTAFATDIWASHWVYWVGPVLGGVAAALLYTQVLEAKPVPKVNEASEKYRTHADEREMRKLEGARDYA

SEQ ID NO: 17275 - DNA, 5315 bp, DROSOPHILA
cattgataccgaatgtttacaatacacattcttctattatcgaagccttaattttaaaaataaataaaaacaaaaggagaacaacaaacaagactccacaccttacaaaagttcggcttatcagttgaccttgcgcccagtctttaggcatttttttgtttctgggtcaccaggcgaattgaattaagttgcgagccaaagcgaccttgggggcttactcgactggaaaatttcgttaagctattgcgaatcggaggttctaagcccgcaaaaatagcgcaggtgccaatagagtgagccaatataggggccacaaagaaatctctgttaattgctcggctctttctgattcgaatttgtttgcttttcgtgttctgatattgaataataatcatgggacaaccatgataaccattcaaaagtgacgaatattatgtaaatgcgtgagcgattttaagttgaagcgagttttcagttggtttaatctcgggattacgattaacaattagctgactaacaattcgctgcttaattatcgaggaagagcaaacttctgagggtctgaaataaaatgcaataaaaagggtgtgaggaattgtactgaaaagttctgaacatttgcatgacgggaaaagccgaagatccgtagtttttatcccggaagaacccatttcacctatttaagagaacgagaacaaccaagccagtggagttaagagcattggagctggctctcttggcgatcaattaatttggtgctcgtttggtatgcattataaattaatttgttatcaatatagaaaaccggtaaacttgccttacgccacgctcttcatctgtcgccccctctcgctctgtcggccacatgccgtcccgctctggcagtcactctcttacgcatcgaagccactgacgtcgcagtagcagcgcagtccgcttttaaaactctataaaaagtctcaaacaaatcacaagattttcagttaaatttcagaattcgcaaactgcggtcgccttgatatgaaaaattaattaaatttcaataaacgagaagcgcgaaaaaccaaacgcaaacggtccaattaaactagcataaatactatacactaaacaattatctagaaatatatatagaatatatttatttcgaaataaccaaataccatgttccccaaaagtcacatcgttttggccagctctttgctgttgttaatcgccctgccaggtaaaaacaaaaaaaaacaagcattttgggtatttgcggctattagaatatcgtgaaaagtgtcgtgataactttgatgtgcattattttgcccaaaacggtctaaatcatgggcatatatctgatatcagatatcagataccagataacgccagaaggaatcatgcgatctgataaacatatcgtgaggattttatagctgcgctataaatacacgttcggtgtctcaagtgttgctattgcacagatacagatacatttgcagatacatttacagattgatgtatgcagttgccaaaaaaaaaaaaaccaacgaaatgtattcagaattcaagatcacgatcatttggccataatatcttgcatatcaagcagtgacattaaaaaagctcaatttatttgttattattcaactgtcataaataatgcaaaaattgtttttttttccattcaaccagtaattttgtgtgttgcggaaatgtcatccaagcagccagctcccacccttcgatttcattatatgtgtatagcattatcattggggcggccctctctaatttatgcctcagatgaaaaggaaaagtcagtcggggaaattgtgaataacgaacaaatattagttgacattgaaacgggctggcagctgctaattgaaaatgttatagttacacttaacacatttcgcaaaaggcggcccgaaatggaaaaactcgtctggccattagcaccactcagaaaataaccgaaccaaacctgaatttataatacgttttcacgatcttttgacgcaattgcaaatgatttcatttcatttgtgtttttttttttcttgattcgagaagagtaacgtatattatataccaaaatccacttcaaacttgtttgttttcttcattaaacgggataagaaatcggtaaatcgtctagaacgacctttgacttgagaattttaaatggcttttcaactacttttcaaaacagcatttgcatcacggggtgttttatggatttacccaagtaaataataacccaaccagttgcacccttgtttaaggggaaaaaaatcaccgagttgcacctttttattatgtggacattataataacaatattaatgagagagagttaaaggtgtacaaaaaaatttaaaatggcagtggcgcttatcacgtgcttttaaaccccaacaatgttgtcgttcggctggagaatttaagaccctgccttcagatccccaaaactagccatcaatcacaatgatttatgataaatttccaacaataaatcaacacaggccaggcagggatgtattgaaccatttgattgtgacgatttaacgaaattattttaaatattattaaagtctgctgcagttactcacttagcaagaacttaccctttcggcacgagttgtgatatgagatatcatgttatcaatatcatatggaaggcccgtcaagaggagatcaacttccatgtcggattatcatatgactcatttgtggtactcagtactccactaatatttggattttatggagggtagccatctccgctgataaggcaattaatgcaattacgccagtgttgccacgccgataggtgactctatttacctgttggcacctggcaaatatttaccatttgctgcgatgacgataacatgcaaatggaatcgattcgctggtgaagagcgcccatataaaactagataaaaaaaaaaacagctacttgcgctagatcaaaggctatggaaaagcacatacaacgtaatactaaagaatgggcaaataatacggcaaatacttgggatttaaattgatttatggtgctcacatgttctttattcttattgtcatttatcttgtttctgtttgccaaagctgtaaattgagcacttttaagttatatgtagatatctacgcgtccaataaaatgtgtgcgaaaaatggaatagcactggtttatacgccataaaaatgtataaaatttaatctgcgatgatagttgaagaggtgtatatatatataataaatactctgctgcttcataaaatatatacatacatatttgcataagaatatctatttagtccacttaaaaatcgtaaacaagcctggcactctaaattagttcgatttatttgatttagattgataagcagaaaaacaatgactttattaaggtttaatggtttctttaaattgcagtaattcgcgccgatctcatgtgctatgtgtgcgataattgtgcccagctaccgaaggatgcacccctgctggcgtgcaatgaggatttctttaatcccggcggcagcacagaagcctccacggtgaccaccaccgaagcgagcaccactacgacgcaggagactacaacaacaccggaaacaaccactttgattgtgacaagtgtccaaacggattcacccacaacggagtccacgacgacgacagtggaaaccaccaccagcgatccgaccaccgagagcacccagagcactgaaagcaccgaggctccgatacccacgccgggaaccgccggacccgtcgaaacgaccaccggagtgcccacgccacccgctgaggatctgtccgccatgtcggtggccttgaacaccacccgtttggtgccagtgaataaggacgaggggaccacaacgcccacgtcatcgctggcaatcaggcaacgcagggcggtgatcgataccgactacacctaccactgctattccgttcaggtttcaggtgagtctgcataaatgatatccttcagaatagatcattgtattcaaaatggttaaatagatccttttgcgtagattctatagaaatctaaaagaaattattaatctttttatctttcatctgaaattctagtgaatggcacaatgtcgacggatcgcggctgctcccgggtgagcaccatggaaggtgtttgcgagcagctaaagattcagaacaaaaacacggagctggccaactgcaatccgtgcagtatgaacgcctgtaacggcagctcggcgctccagagctccattctggccaccctgctcctggccatcgtggcattcgccctgcagcgcaactagagacacgatcatcatccattacccggtgctttagtctagtattcctcgtttctttaaggcgaactcacacactcatcagtccgcgctcatagttaagtgattcgaaaagtcgaaaatcgaaaatgtaaatttaagatatgcacaaaaccgaaaatcgaaatatatacaatcgtatttgtatacaaacttaatctaaccaaatgtaacgctccaggcgacttaataaataatgtgtaattattagaacgttcgttttatttgagctcaactgcaattgtcagtgattagtaatttgaaaaaaagtgatttatgacatcactctgcggcacagataataaactcaaatatcctaaactttataacactttcggttaatatctttagaagaattttttatggctctacttttatattgtggaagataaatggagctttaaaagtacagcgcgatcacatcctgtcaatataatgaatgctatatacatacactccatgcaacaataaattgtagacaactttaaaagtctctaaactctgaagcttaatgtcgagatttgaaatttaaaattatggttagacgacaaaatgtttgtagatttctaaatagagaaggggagggagttcccaataccttaccaatgccaatgtcacgtatacgcctagtggtacgatttcatttactgagcaaacatagtatgctaaaaaacgaggcggtggcatacttttaggccatttatgctaaacaaatttgctcaagacaagcccaaagacaaaatcaacaaggaaatcaaacacaaaagaaacaatgctttatcattgattagataagatttcattaaacaatttcgggactttgggaaacactaaacgcaataaatatgctagcacgcgcttatcaataaaatgattttatagcgccaaataaataccactaaaaagtgcgcgaataactcaacaaaaccatttaaagttttccaaaaaaagtatctaatcggcttat

SEQ ID NO: 17276 - DNA, 974 bp, DROSOPHILA
caaactgcggtcgccttgatatgaaaaattaattaaatttcaataaacgagaagcgcgaaaaaccaaacgcaaacggtccaattaaactagcataaatactatacactaaacaattatctagaaatatatatagaatatatttatttcgaaataaccaaataccatgttccccaaaagtcacatcgttttggccagctctttgctgttgttaatcgccctgccagtaattcgcgccgatctcatgtgctatgtgtgcgataattgtgcccagctaccgaaggatgcacccctgctggcgtgcaatgaggatttctttaatcccggcggcagcacagaagcctccacggtgaccaccaccgaagcgagcaccactacgacgcaggagactacaacaacaccggaaacaaccactttgattgtgacaagtgtccaaacggattcacccacaacggagtccacgacgacgacagtggaaaccaccaccagcgatccgaccaccgagagcacccagagcactgaaagcaccgaggctccgatacccacgccgggaaccgccggacccgtcgaaacgaccaccggagtgcccacgccacccgctgaggatctgtccgccatgtcggtggccttgaacaccacccgtttggtgccagtgaataaggacgaggggaccacaacgcccacgtcatcgctggcaatcaggcaacgcagggcggtgatcgataccgactacacctaccactgctattccgttcaggtttcagtgaatggcacaatgtcgacggatcgcggctgctcccgggtgagcaccatggaaggtgtttgcgagcagctaaagattcagaacaaaaacacggagctggccaactgcaatccgtgcagtatgaacgcctgtaacggcagctcggcgctccagagctccattctggccaccctgctcctggccatcgtggcattcgccctgcagcgcaactag

SEQ ID NO: 17277 - protein, 269 aa, DROSOPHILA
MFPKSHIVLASSLLLLIALPVIRADLMCYVCDNCAQLPKDAPLLACNEDFFNPGGSTEASTVTTTEASTTTTQETTTTPETTTLIVTSVQTDSPTTESTTTTVETTTSDPTTESTQSTESTEAPIPTPGTAGPVETTTGVPTPPAEDLSAMSVALNTTRLVPVNKDEGTTTPTSSLAIRQRRAVIDTDYTYHCYSVQVSVNGTMSTDRGCSRVSTMEGVCEQLKIQNKNTELANCNPCSMNACNGSSALQSSILATLLLAIVAFALQRN

SEQ ID NO: 17278 - DNA, 3760 bp, DROSOPHILA
tgtattgttgcatacgaaaccaaagaaatgacataacaaatcggtacacctaagttaaatataaatctaaatggcaataccaaccgattggcaaaacaaaaagaaaaaaaaacataatatcatctgataatatcatatcagatcggatcaaagcagatcagaggaaattcgaaacagaatgaaaggtgaaccattttttcacagacagccaccagcgataagaactaacgaagttgaattcaattaatttaccagacagtttatttccaatataattcaatattagcagatgggctcgcccgcccgcaagacaaattatacaatttgataacgataatattttcatgcgatcacgatcgaggaggaaagcacaaacgatatgccctgcaatgcaaacggggaaaagagcaacaaattgcagttttcagcaggcgacaaattataataatacaatacgaataataaataaaaactttaacaattgttttgtgtaattgtaaagaagtggagttcttttcaccgccagtgggatgaatgggatgtttatgtgatgatggtgaaatgggtaagtatttataatatgttacagattggacaagattcttagtagtttcttataatatccataaaaatgaagtcaaacatatttagtagagtataatatattcgttgtagccgcatttagtgcgcttggcttatcagcgacctctctgttcgactgatcttttgcaataagtggctgacccctcagatagcagacaacgtggcgataggctgtgttaaaaacccaaacacgaccaaatatttacaaatccaacttttagataaaacagacaaacagcaaggatctcagttttcactcgattcaagcgtttttacctggtgaagaaatcgaaaaagattaagatggatttcaatttgcgactgagacaccctgtatgagcacagccgttgattggattggattcactgacacttatttagttgttttccggccgagcaacttgaaggttgtacaatgcgatctctgtgcttcgttttgctgttcgtttggtttttctaccaaaacgaagctaagtctaaggtttcctgtaaggatgaagctggaaacgatgtagattggtaagtatttcgattaacagatcaaacaataaatagtttagttcttaaaacattactaaatgtgcttattagaaaagttacttataaatattggcctttcacatactttttcatttatctgcagtcgctgtttgcatatcattaacaatttgcaaacacaacgtattttagttatttatatacactgctgtattgagattattctaaaagaggcgataaacaaattgaatatgatgagttcaagttcaagcggaaaaattgataataattgtacaatactgtgtgacaagaaattaaaaagtaattagtgtgttattttgtttcctaaaatgagagatttaaatcaaagttgtttgctacaaacaaacttaatcaatttgataacaataacatcatttttaatacttttccatttccaaaaatagattaaatggtaattattttttttttttaatatcttaaaaacaaatttccaaagattgaggggttttctcgatgagataaacatgtttttaatttatttaataattttttttcaaatattcctttataattttaggtggcacctttacaaactgcccaagcactaccagcacaacgatttgggcaaggacaccagtggcttgaagtacctgtacgtgaccagccagaactatgacacctggcagatgtcgggaaagttcattagtgatcccctatcgctgcctgcccagacccttaaccccttgaacgacgatcccagccacactctgctggccgcctacaacgatcaacagccgaatggcacggttttcagcagcggtggtcatgccaaaggagtggtggccagtgatggggagacggctatttggattgtccactcggtgcccaaatttccaacaattccggactacagctatcccacatccggcgagcagtacgcacagagcatgctctgcgtcacactgaagggcgaggatttggagaaggttggtcagattctggtgtacaatgaaccgcacttctactatcaacgcaacccgctggccactcgctccgatgagctgttcccgagcctggaaagggctctgcatggtcagtggcggacggaatcaccgttccagaaggacttggaggtgcgcagcttggacggcaagaagttccggctgtttggcaagagtggacgcgccaatgtggagctgtacgccgatgtggtcgcacccactctggatgtcagtctttttgtggaggcgtggcgcgacggtgccggcaacttaccgaatagctgcgataagtccgataaggttctcaatgtggaatccatttccaatccggagctatcggtggactttaagaccacacaagatcactccaagtgggcggtatctcgtcccacaggcattttgatctaccattggcgagttggcggcggagattggatttgtgtgggcgacatcaaccggcaagaaggtcagttgcatcgtggtggtggaaccgtgtgccacaagagcgccagggtatccaatctgtaccgccaactggtcaccaactacgacaagtgcgcccaacaggaatagaatctgaactaactaagactatttgtaaagttgcgtcaacaattaaataaacaccatttttgcattacatttaatgcataagaaaattgaaagatgttgaaaagaggtattatttatacaaagaacttatttgcatttgttatagataatatataataatttaaattttaaatttaaggcgccgtgcaacttcttttctttttctttctgctcttttccggacactcgctagcgccatttcttcaacgcactcttgtcgtacattttaggtactaaaaagcgcattgaaaactaggtggcgctcgtacttaaacttttcttaattctatagctgttgctaaactatttgccaaaaaaaaaaaacattgaaatatcaacaaacatgtataaattatttacaaatgtgtcaattgcatttggttgcatctaattattcatttatagcgccacctatccgtcactcttctacccattattatcacatataccagaaaatgcaaattcagtatgaccatcagctggaaaaagagcacagctgtttacaaaaacaaaaccaagcgaagaagcgaaaattattggcgatttttaaaaatccaaattaaaactagattcggagtcggaaaaccttcatagatttgggaatgttctgctgcctacgcacctgtctcaatggtggacacataaggaaaccgacggcaaccagtcgcctgcgggagcccgatgttcacctggatgcagcgcatatgggtaaaattacactaaattcagaaggattaagatacactatccttaaaatggtcaactgaagcgattgcgagagaactaatgtgtttttccaaaagatatgtagcttcgataataagtgataccccaataaagatatcaacattcccaattttatcgcacaattcagatacgtgatcagatattaatatatatgtacatacaatagaagtgcttatattctcattcaacaggcttaaccatcttgtatcttactaataatatgtatatcatatcatccatttggcaggacctgatgtaatcctgctgtcacaccaactgcgcgtaacgggcactgg

SEQ ID NO: 17279 - DNA, 1201 bp, DROSOPHILA
caacttgaaggttgtacaatgcgatctctgtgcttcgttttgctgttcgtttggtttttctaccaaaacgaagctaagtctaaggtttcctgtaaggatgaagctggaaacgatgtagattggtggcacctttacaaactgcccaagcactaccagcacaacgatttgggcaaggacaccagtggcttgaagtacctgtacgtgaccagccagaactatgacacctggcagatgtcgggaaagttcattagtgatcccctatcgctgcctgcccagacccttaaccccttgaacgacgatcccagccacactctgctggccgcctacaacgatcaacagccgaatggcacggttttcagcagcggtggtcatgccaaaggagtggtggccagtgatggggagacggctatttggattgtccactcggtgcccaaatttccaacaattccggactacagctatcccacatccggcgagcagtacgcacagagcatgctctgcgtcacactgaagggcgaggatttggagaaggttggtcagattctggtgtacaatgaaccgcacttctactatcaacgcaacccgctggccactcgctccgatgagctgttcccgagcctggaaagggctctgcatggtcagtggcggacggaatcaccgttccagaaggacttggaggtgcgcagcttggacggcaagaagttccggctgtttggcaagagtggacgcgccaatgtggagctgtacgccgatgtggtcgcacccactctggatgtcagtctttttgtggaggcgtggcgcgacggtgccggcaacttaccgaatagctgcgataagtccgataaggttctcaatgtggaatccatttccaatccggagctatcggtggactttaagaccacacaagatcactccaagtgggcggtatctcgtcccacaggcattttgatctaccattggcgagttggcggcggagattggatttgtgtgggcgacatcaaccggcaagaaggtcagttgcatcgtggtggtggaaccgtgtgccacaagagcgccagggtatccaatctgtaccgccaactggtcaccaactacgacaagtgcgcccaacaggaatagaatctgaactaactaagactatttgtaaagttgcgtcaacaattaaataaacaccatttttgcattacatttaatgcataag

SEQ ID NO: 17280 - protein, 366 aa, DROSOPHILA
MRSLCFVLLFVWFFYQNEAKSKVSCKDEAGNDVDWWHLYKLPKHYQHNDLGKDTSGLKYLYVTSQNYDTWQMSGKFISDPLSLPAQTLNPLNDDPSHTLLAAYNDQQPNGTVFSSGGHAKGVVASDGETAIWIVHSVPKFPTIPDYSYPTSGEQYAQSMLCVTLKGEDLEKVGQILVYNEPHFYYQRNPLATRSDELFPSLERALHGQWRTESPFQKDLEVRSLDGKKFRLFGKSGRANVELYADVVAPTLDVSLFVEAWRDGAGNLPNSCDKSDKVLNVESISNPELSVDFKTTQDHSKWAVSRPTGILIYHWRVGGGDWICVGDINRQEGQLHRGGGTVCHKSARVSNLYRQLVTNYDKCAQQE

SEQ ID NO: 17281 - DNA, 7493 bp, DROSOPHILA
actttttgacgatcgctggacgcacgcgagtctccatgatcagcttcattcgattcgtggtacgcggcgagttgtgcagagcagtgagtggacggcacttacttcttggcgaggattcggtccgttccaaagcagccttctccttgctcctgaccagctcgagtgcacgattcgctcgggctttggccagctgcaattcgagaggcgcctttggcaggttaaaaaagaagtgggtccacttatcgcgcaactgttcgatggcctccgagttgaatagtgagctggaacgattggaggtatggggtccccattccgcgttcccgatgcaactcaatctataagcggacattgaaacctgaagtattatacactgaaaatttgacaacaaagtaaaagtgtacatatatgtgtatatgtatactatataccgtatagttatggtttttggatggattgtttttcaaatatataattatacgagggtatagaagcttcgacttctggaagctagctccctaactgtttttggtttttgtattctgttgcattgcattgctttcatatgtttaattgtttcaactgaacacattgtacttgttttcgatttagaagcgttgaaagcggatgtatcttacattatccaagtaaaataagggatgagtcgatatgtatgttgcatatctccttacgattttagataaggaaagacattttataaatataaatataaatttcttgaaatataaacattgaagagataattaaattcattttttttgggtaaattataatatattttaaacctgctcgttgcaatttaaattcaaaatgcttcttcttctgctaaaaaagccattcaacacgaatgctctctacattggattttttagtacattcttaagcatcgaatcagggctggtcgcgagcatttactggatttaggcagtgccgcactctggtcacaccgcgaaaaatattatattgagttgaagattatattatacatatatatatcgaagatacatattctgaaaacaagtgctgaagcccaagcgatttgcaaacgaaacggacgcgcgagccccgttcaagattcgaaacgagttcagtgcgtgcgcttgagtgtgtgtgactgccatgcgacgttcgcccgggtgatccggctgtgccaggtgccccacggttccaggtttccagtttccaggttccgctccactccactcgtcgctggattcagtgcacaacacagcgggcggggaggcggagggcaggcggccaacgaaggtgctccacggcaggctctcgtcggctactccacggcgcacagaatgttctcggggcccagcggccatgcccacaccattagctacgggggcgggatcggtctgggcactggaggcggcggcggcagcggtggtagtggtagtggctcacagggcggaggcggtggtattggcattggcggcggtggcgtggctgggctgcaggattgcgatggctatgacttcaccaagtgcgagaatgctgcgagatggaggggcttgtttacgccatcgctaaagaaggtgctggagcaagtgcatccacgggttaccgccaaggaggacgcactgctgtatgtggagaaactctgtctgcggcttctggccatgctgtgcgccaagccgctgccccattccgtgcaggatgtggaggagaaggtgaacaagtcctttccagcgcccatcgatcagtgggccctgaacgaggccaaggaggtgatcaactcgaagaaacgcaagtctgtcctgcccacggaaaaggtgcacacgctgctccagaaggatgtgttgcagtacaagatcgatagctccgtgtccgccttcctggtggccgtgctcgagtacatctcagcggacatactcaaaatggccggcgactatgtgatcaagatcgcccactgcgagatcaccaaggaggacatcgaggtggtgatgaacgccgatcgtgtgctaatggacatgctcaaccagagcgaagcccacatcctgcccagtcccctgtcacttcccgcgcagcgtgcaagtgccacctacgaggagacggtcaaggagctgatccacgacgagaagcagtaccaacgcgacctgcacatgatcatacgcgtctttcgtgaggagctggtgaagatcgtgtccgatccgcgcgagctggaaccgatattctccaacataatggacatttacgaggtgacggtcactctgctcggctccctggaggacgtcatcgagatgtcccaggagcagagtgccccctgcgtcggtagctgctttgaggaactggccgaggccgaggagttcgatgtgtacaagaagtacgcctacgacgttacctcgcaggcctcacgggatgctctcaacaatctcctgtctaagccaggggtaagtattgataccttctgtgcgaagaattctactaaaatccctgcttttaggcctcatctctgaccacagccggccatggcttccgcgatgcggtcaaatactatttgcccaagctgcttctggtgcccatttgccatgccttcgtgtatttcgactacatcaagcatctcaaggatctcagctcttcgcaggacgacatcgagagcttcgaacaggtacagggactgttgcatccactccactgcgatctcgaaaaggtaatggccagcctgtccaaggagcgacaagttccggttagcggtcgagtgcgccgccagctggcaatcgagcggacacgggagctccaaatgaaggtggagcactgggaggacaaggacgtgggccagaattgcaatgaatttattcgcggtaagtgctggcaacgaaagttacttgcatcctccaactaaaatggtatttcaaatttacagaggattcgctgagcaaacttggatcgggaaaacgaatctggagcgagcgcaaggtattcctcttcgacgggctaatggtgctatgcaaggcaaacaccaagaaacaaacaccatcggcaggagcaacggcctacgactaccgactgaaggagaagtatttcatgcgacgcgtggatatcaacgatcgaccggacagcgatgatctgaagaacagttttgagttggcaccccggatgcagccgcccattgtgctgaccgccaagaatgcacagcacaagcacgactggatggcagacctgctgatggttatcaccaagtcgatgctggaccggcacttggacagcatattgcaagacatcgagcgaaagcatccgctgcggatgcccagtccggagatttacaagttcgcggtgccggacagcggtgacaatatcgtgttggaggagcgcgaaagcgcaggagtgccgatgatcaagggagcgacgctttgcaagctaatcgagcgcctcacctatcacatctacgccgatccgacttttgtgcgcaccttcctcaccacatatcgctacttctgctcgccgcagcaattgctgcaactgctggtggaacgctttaacataccggatcccagcctggtctatcaagacacgggcacagcaggtgcgggtggaatgggcggcgttggcggtgacaaggagcacaagaactcgcatcgcgaggactggaaacgatatcgcaaggagtacgtgcagccagtgcagtttcgagtgctcaacgtactgcgccattgggtcgaccatcatttttacgatttcgagaaggatcccatgttgctggagaagctgctgaactttctggagcacgtgaatggcaaatcgatgcgcaagtgggtggattccgtgcttaagattgttcagagaaaggtgagtagttggtcaacagcataatgtggaagtatcgttatcatttttcaaatattatttacagaacgagcaggagaaaagcaataaaaagattgtatacgcctatggccacgatccgccgcccattgagcatcaccttagtgtacccaacgacgagataacgctcctcaccctgcacccactggaactggcccgtcagctcactctactggaattcgagatgtacaagaatgtaaagccgtctgagttggtcggatcaccctggacgaaaaaggacaaggaggtgaagagccctaatctactgaagataatgaagcacaccacgaacgtcacccgctggattgaaaaatccatcaccgaagcggagaactacgaggaacgcctggctattatgcaacgcgcaatcgaagtgatgatggtgatgctggaattgaacaattttaatggaatcctctcgattgtcgcggctatgggcacggcatctgtttatcgactgcggtggacattccagggattgcccgaacgctacagaaaattcttggaggaatgccgcgagctcagcgacgatcatctcaaaaagtatcaggagcgattgcgatccatcaatccgccttgtgtgccatttttcggtcgctacttgaccaacatactccacttggaggagggtaaccccgacctgctagccaacacagagctaattaacttttccaaacgacggaaagtggccgagattattggcgagattcaacagtaccagaaccagccatactgcctcaacgaggagtccacaatacgacagttcttcgagcaactggatccgtttaacggactgtccgacaaacagatgtccgactatctctataacgaaagcctgcgcattgagccaaggggctgcaagacagtgccgaaattcgtaagtataatgcttcaaagtttacaagtcatataggaaatttaaccattttcctttcgtagcctcgaaaatggccgcacattccgctcaaatcgccgggcatcaagccgcgtcgccagaatcagaccaacagcagtagcaagctgtcgaacagcacgtcgtccgtggcggcggcagcggcagcatcgtcaacggccacctcaatagctacggcatcggcgccatctttgcacgcctccagcataatggatgcgccaacagcagcagcagctaatgctggatctggaactctcgctggcgagcaaagtccgcagcacaatccgcacgctttctccgttttcgcccctgttattatacccgaacggaacaccagcagctggagtggaacgccacagcacactcgaacggaccagaacaacggggaggtttcggtgccggcgccacatctccccaagaaaccgggcgcgcatgtctgggctaacaacaactcgacactggccagtgcgtcggcaatggatgttgtgttcagtccagcgctgccggagcatctgccaccgcagtccctgccggacagcaatccattcgcatcggacacggaagctccaccgtcgccgctgcccaagctagtggtcagtccgcgtcacgaaaccggcaatcgatcaccattccatgggcgcatgcagaacagcccaacgcatagcactgccagtaccgtgacccttacaggcatgtctacatcgggcggggaggaattctgcgcgggtggattctactttaacagtgcccatcagggacagccgggggcagtgcccatctcgccgcatgtcaacgttccgatggccaccaatatggagtaccgagcagtgccgcctccactgccacccagacgcaaggagcgcactgagagctgtgcggacatggcgcaaaagcgtcaggcgccagacgcacccacagtaagtagcctcacttacttctaatttgtagtagcagatgacagcaatcattttacgtatccttgcagttacccccgcgtgatggcgaactcagtccgccgccgataccgccacggctcaaccattccacgggcatcagctacttgcgacaaagccacggcaagagcaaggagtttgtgggcaacagcagtctgctcctgcccaacaccagcagtattatgatacgccgcaactcggcgatcgagaagcgggcagcggcaactagccagccaaaccaggcggcggcgggacccatcagcacgacactagtgaccgtgtcgcaggcagtggcgacggacgaaccgctgccgctaccgatctcgccagcggcaagctcctcgacgaccacatcaccgctgacacccgccatgtcgcccatgtctcccaacattcccagccatccggtggagagcacgtcgagcagctatgcccaccaactgcgaatgcggcagcagcagcagcagcagacgcatccagcgatctactcgcagcaccatcaacatcatgccacccatctgccgcaccatccgcaccagcaccattcgaatccgacgcagtcgcgctcgtcccccaaggagttctttccgattgccacgagcctcgagggcacacccaaacttccaccaaaacctagtctaagcgctaacttctataacaatccaggtgagtgctaccaactcggcccgtgataacgtgtttcctaacccaaccatcctatccgtttgcagataaaggtacgatgtttctttacccaagtacaaacgaagaataatttaaattgcctggcgatgtgataaggacgaaaactacgagtatgatccgtaagattcaaagttgcgagcactgcttgagtgcagatatatatatgagagaacggaacgtgagatatatatatatatatatacatatatacgtaggcgcagtttatgtattctagtatgaaacgagttggaaccgctgatttagattattcgccactcatttaacaaggtagaacagacagacagacaaaatacgctctcatttacacacaacaggcacgcgcatatggataggaatgcaggacacacaaaccaagcaagcaaccaagcaaccaacaagaaatgcaaacaagaaattatgttattatataattactattataaatatttgtaaatatcgagaacattgtattgatcgtagaacgtaaaacaataaagtataaccctattgttagacacttggcgacatctttcgatgaccagaaatatagagtattgtagccaaagtcaaggcaatctgagcaaatagcatagattatcaaggcttttccaacgtttaaagatcgtgggtattctttatgtgcccagtggccttgatgaagtcgacgtgaaccgacatccgactgcaacacacctgacattctcgcagtgtccagcataatcgcagccattattaagattgtgtatatggctaattagtttcggtgggttaggaaaaactagagcgattgttgtctcactgcattaggtgcaattaaattggacacacacattcgcttattggaaacaacgcggattgactttcgcttttctaaaacgtcatgaacgtcgagcacaaatgcttcctgaaattttgggctgctcgccgctgggaaccggttgttgtttttttgaattattttcgtatatttgtatattcgtattttcacgctcgtgtccagccccttatcgtcagttatttgggggagttatgtgtgtgcagcagccaccgtccccaaaaagcgatgtgtc

SEQ ID NO: 17282 - DNA, 5123 bp, DROSOPHILA
atacatatatatatcgaagatacatattctgaaaacaagtgctgaagcccaagcgatttgcaaacgaaacggacgcgcgagccccgttcaagattcgaaacgagttcagtgcgtgcgcttgagtgtgtgtgactgccatgcgacgttcgcccgggtgatccggctgtgccaggtgccccacggttccaggtttccagtttccaggttccgctccactccactcgtcgctggattcagtgcacaacacagcgggcggggaggcggagggcaggcggccaacgaaggtgctccacggcaggctctcgtcggctactccacggcgcacagaatgttctcggggcccagcggccatgcccacaccattagctacgggggcgggatcggtctgggcactggaggcggcggcggcagcggtggtagtggtagtggctcacagggcggaggcggtggtattggcattggcggcggtggcgtggctgggctgcaggattgcgatggctatgacttcaccaagtgcgagaatgctgcgagatggaggggcttgtttacgccatcgctaaagaaggtgctggagcaagtgcatccacgggttaccgccaaggaggacgcactgctgtatgtggagaaactctgtctgcggcttctggccatgctgtgcgccaagccgctgccccattccgtgcaggatgtggaggagaaggtgaacaagtcctttccagcgcccatcgatcagtgggccctgaacgaggccaaggaggtgatcaactcgaagaaacgcaagtctgtcctgcccacggaaaaggtgcacacgctgctccagaaggatgtgttgcagtacaagatcgatagctccgtgtccgccttcctggtggccgtgctcgagtacatctcagcggacatactcaaaatggccggcgactatgtgatcaagatcgcccactgcgagatcaccaaggaggacatcgaggtggtgatgaacgccgatcgtgtgctaatggacatgctcaaccagagcgaagcccacatcctgcccagtcccctgtcacttcccgcgcagcgtgcaagtgccacctacgaggagacggtcaaggagctgatccacgacgagaagcagtaccaacgcgacctgcacatgatcatacgcgtctttcgtgaggagctggtgaagatcgtgtccgatccgcgcgagctggaaccgatattctccaacataatggacatttacgaggtgacggtcactctgctcggctccctggaggacgtcatcgagatgtcccaggagcagagtgccccctgcgtcggtagctgctttgaggaactggccgaggccgaggagttcgatgtgtacaagaagtacgcctacgacgttacctcgcaggcctcacgggatgctctcaacaatctcctgtctaagccaggggtaagcctcatctctgaccacagccggccatggcttccgcgatgcggtcaaatactatttgcccaagctgcttctggtgcccatttgccatgccttcgtgtatttcgactacatcaagcatctcaaggatctcagctcttcgcaggacgacatcgagagcttcgaacaggtacagggactgttgcatccactccactgcgatctcgaaaaggtaatggccagcctgtccaaggagcgacaagttccggttagcggtcgagtgcgccgccagctggcaatcgagcggacacgggagctccaaatgaaggtggagcactgggaggacaaggacgtgggccagaattgcaatgaatttattcgcgaggattcgctgagcaaacttggatcgggaaaacgaatctggagcgagcgcaaggtattcctcttcgacgggctaatggtgctatgcaaggcaaacaccaagaaacaaacaccatcggcaggagcaacggcctacgactaccgactgaaggagaagtatttcatgcgacgcgtggatatcaacgatcgaccggacagcgatgatctgaagaacagttttgagttggcaccccggatgcagccgcccattgtgctgaccgccaagaatgcacagcacaagcacgactggatggcagacctgctgatggttatcaccaagtcgatgctggaccggcacttggacagcatattgcaagacatcgagcgaaagcatccgctgcggatgcccagtccggagatttacaagttcgcggtgccggacagcggtgacaatatcgtgttggaggagcgcgaaagcgcaggagtgccgatgatcaagggagcgacgctttgcaagctaatcgagcgcctcacctatcacatctacgccgatccgacttttgtgcgcaccttcctcaccacatatcgctacttctgctcgccgcagcaattgctgcaactgctggtggaacgctttaacataccggatcccagcctggtctatcaagacacgggcacagcaggtgcgggtggaatgggcggcgttggcggtgacaaggagcacaagaactcgcatcgcgaggactggaaacgatatcgcaaggagtacgtgcagccagtgcagtttcgagtgctcaacgtactgcgccattgggtcgaccatcatttttacgatttcgagaaggatcccatgttgctggagaagctgctgaactttctggagcacgtgaatggcaaatcgatgcgcaagtgggtggattccgtgcttaagattgttcagagaaagaacgagcaggagaaaagcaataaaaagattgtatacgcctatggccacgatccgccgcccattgagcatcaccttagtgtacccaacgacgagataacgctcctcaccctgcacccactggaactggcccgtcagctcactctactggaattcgagatgtacaagaatgtaaagccgtctgagttggtcggatcaccctggacgaaaaaggacaaggaggtgaagagccctaatctactgaagataatgaagcacaccacgaacgtcacccgctggattgaaaaatccatcaccgaagcggagaactacgaggaacgcctggctattatgcaacgcgcaatcgaagtgatgatggtgatgctggaattgaacaattttaatggaatcctctcgattgtcgcggctatgggcacggcatctgtttatcgactgcggtggacattccagggattgcccgaacgctacagaaaattcttggaggaatgccgcgagctcagcgacgatcatctcaaaaagtatcaggagcgattgcgatccatcaatccgccttgtgtgccatttttcggtcgctacttgaccaacatactccacttggaggagggtaaccccgacctgctagccaacacagagctaattaacttttccaaacgacggaaagtggccgagattattggcgagattcaacagtaccagaaccagccatactgcctcaacgaggagtccacaatacgacagttcttcgagcaactggatccgtttaacggactgtccgacaaacagatgtccgactatctctataacgaaagcctgcgcattgagccaaggggctgcaagacagtgccgaaattccctcgaaaatggccgcacattccgctcaaatcgccgggcatcaagccgcgtcgccagaatcagaccaacagcagtagcaagctgtcgaacagcacgtcgtccgtggcggcggcagcggcagcatcgtcaacggccacctcaatagctacggcatcggcgccatctttgcacgcctccagcataatggatgcgccaacagcagcagcagctaatgctggatctggaactctcgctggcgagcaaagtccgcagcacaatccgcacgctttctccgttttcgcccctgttattatacccgaacggaacaccagcagctggagtggaacgccacagcacactcgaacggaccagaacaacggggaggtttcggtgccggcgccacatctccccaagaaaccgggcgcgcatgtctgggctaacaacaactcgacactggccagtgcgtcggcaatggatgttgtgttcagtccagcgctgccggagcatctgccaccgcagtccctgccggacagcaatccattcgcatcggacacggaagctccaccgtcgccgctgcccaagctagtggtcagtccgcgtcacgaaaccggcaatcgatcaccattccatgggcgcatgcagaacagcccaacgcatagcactgccagtaccgtgacccttacaggcatgtctacatcgggcggggaggaattctgcgcgggtggattctactttaacagtgcccatcagggacagccgggggcagtgcccatctcgccgcatgtcaacgttccgatggccaccaatatggagtaccgagcagtgccgcctccactgccacccagacgcaaggagcgcactgagagctgtgcggacatggcgcaaaagcgtcaggcgccagacgcacccacattacccccgcgtgatggcgaactcagtccgccgccgataccgccacggctcaaccattccacgggcatcagctacttgcgacaaagccacggcaagagcaaggagtttgtgggcaacagcagtctgctcctgcccaacaccagcagtattatgatacgccgcaactcggcgatcgagaagcgggcagcggcaactagccagccaaaccaggcggcggcgggacccatcagcacgacactagtgaccgtgtcgcaggcagtggcgacggacgaaccgctgccgctaccgatctcgccagcggcaagctcctcgacgaccacatcaccgctgacacccgccatgtcgcccatgtctcccaacattcccagccatccggtggagagcacgtcgagcagctatgcccaccaactgcgaatgcggcagcagcagcagcagcagacgcatccagcgatctactcgcagcaccatcaacatcatgccacccatctgccgcaccatccgcaccagcaccattcgaatccgacgcagtcgcgctcgtcccccaaggagttctttccgattgccacgagcctcgagggcacacccaaacttccaccaaaacctagtctaagcgctaacttctataacaatccagataaaggtacgatgtttctttacccaagtacaaacgaagaataa

SEQ ID NO: 17283 - protein, 447 aa, DROSOPHILA
MFSGPSGHAHTISYGGGIGLGTGGGGGSGGSGSGSQGGGGGIGIGGGGVAGLQDCDGYDFTKCENAARWRGLFTPSLKKVLEQVHPRVTAKEDALLYVEKLCLRLLAMLCAKPLPHSVQDVEEKVNKSFPAPIDQWALNEAKEVINSKKRKSVLPTEKVHTLLQKDVLQYKIDSSVSAFLVAVLEYISADILKMAGDYVIKIAHCEITKEDIEVVMNADRVLMDMLNQSEAHILPSPLSLPAQRASATYEETVKELIHDEKQYQRDLHMIIRVFREELVKIVSDPRELEPIFSNIMDIYEVTVTLLGSLEDVIEMSQEQSAPCVGSCFEELAEAEEFDVYKKYAYDVTSQASRDALNNLLSKPGVSLISDHSRPWLPRCGQILFAQAASGAHLPCLRVFRLHQASQGSQLFAGRHRELRTGTGTVASTPLRSRKGNGQPVQGATSSG

SEQ ID NO: 17284 - DNA, 4756 bp, DROSOPHILA
tttggacaaaaaggtttcattaggtttcattaccctactggttatcccaatagtttggtatattcattttctcattgctgggatggtggtgcctatgcggtagatgaaacgacttcaaagttatcctttttggcagttggttacaacaacgagtgtttttccccttgggagtgcggagatgtgggctgggcgtggtcgtcgcccctaagcgtgtcacaactatcattttggattatccagggacgaccttcgacccaattgcttgctaattattctatgaagtgttcgcctcgttgagcattacgttaaaattgtttaattttttaatgttagctattgccgaaatttagttcgagtcttgtgttaaataaaaatagacaaactaaggcgaagagtgttaacatttattatgtactacttttattttgtgggtagccttaatttttaacatcgttagcttttgtggccatctttgacttattcgttattttcgatttgtttaatactttcaactgcggtaggttttagttttatttaatcgttattttccttgatttcgtttaatacgttagtttgcaaaatgcctgttaatgtaaaaagatttgaacgattatattggccaattgtttacatgctctctttggtttttttatatacacttctagttagggagttatgttattatttaatactttgtataaagcttttacggttctccattcaaaaaatgttacaaaatcaggctgggccagagctgaaatcataaaatattaactataagatttcattcagattatggattgttggattccatttattacctgactctggagcagctctgcgagtggaccttgttaatgatgtgaaggggggcgggagaaagcggtgaaagtgtcacagaagtcaaagagtcagcagcagcaatacgaaagaaaaactgggtggatgcatcgataaaacaaacaaaaacaactgagggacaccctcgatattttcgtccttaacgctgcagatactgacgggcgctcagcaggaggcccaccatggctgccacgcccaacgccgatgcgcccatcgctccggctccgttgcagttatccgtatcgcaggagcagaccacctgccgaccaccaaaaccggcacgctgatagcaatagttggtggaggtctgattctgataggcacaggtcctaatcacacggctatccgggggcactgcaatgcgattgttgtcattaaccaggctaaccattcacatgattatatggtattgttgttctacttacggctgttcaccgagaactcgatgatctgcgtaatcttgcggcagtatgtgggtattcccttgccacgggacgagtactgctcatcgcagtccttcagcagattgtccggcggtatgtccagcgcacagttggcgtctttgtggctgttgcagacaaagcacttgatggcatatcctgaaaaaatttaattatttatgataaatttaagcaatatttcaagtaaactatctcagtatcaatgattttatatataagaaaatatgcctatcctttctatttccccagttagttcttatttactgcacctacaaagcaattccttaattgtaattgcatttgtgcatcctgagtgcatattaacattccattagtttccttttagctgccacctttctgttcttttttttctaccccacttgcaatctttcgcctaatggacacaaagccatagttaatgccaattagaaaatttccattggcagcagcatatgcttaaccttaatagtttcacaaaacaagcgattctgaaagaaacaggcgtgtaaacaaatgcgatataaagagatcactagtgatcactagtgattacttgtgtaccgtccagctaaattgaatttaaggtcgtgcgcgacacgagattcgcattatttaattttccaaatatatatacacatatgtacatacatatgtatatacgagctggaaatgtccgccagaatgggaatgccacctgctccgccgtacaacctgcgatgcgcttttgcctcacgctgtgtcaaaagtggcacaatggcatggagatgctagtaatgtcatctccacctgggtatggcagcggttccatcgacgcctccattagtgccagactgcgaggctcttaggagtgccttgctaattgagccatcgacattgctaatggactcgaaataactttgccgcaactcgccgccctcgccgagtactattgtctattattctccgtccatttgggttacataagcagggcggaaaagaatgtgctgcctacttcggggcgaagatgcttgagaacaatgggaaaaggtccactgtaagatgaaacactccacgggctggtctagatactctgagagctgaaaagctcatagcgacaaaggattgcaatattctataggaaagtagcgaatatgaaacgaatctcagatgattcatagacatatgaagtgttaagacatataaagataaagtttcaaaactactgtttattaaatatgggacatatgctcttgcaacccttttcccaaaaagttttcatggttcggttccactgtttacacttagtcatgaccaatttaggtttattaaagtctataaatagtcgtcaattgcatttattgaattgcatagaacgcgaaaaatatgggtatgcatactcaaacataggaaagttaaaattcctaacagaaagttaaaattttccttaaaggtttaaagtttccttatgaaatagtaattaaatttatttttatataagtctctgagcggattttggttttgggtatatcgggtaactgcaactggcccccaggacctttaaccaaatagagtgcgcatgtcctacataatccttgcacatacacacactcgcatacatatgtgggaaaacttaaattgggatttgcggcgaaaggaggaaggatccagttactcgcaattatcctttgcgaaagcatagtacactgtgtgctaattattatctgttttaattgagagatgtcaacgtgccatgaacccaggcaaatctccccccctccttcccctcttcatccttctcaattttcctttttttccagctcaggaaaaaagctgtggcagagagccaacaactgaagtagagaaaaaagtttgctcctcgagaagagagagctcacaacacccaaagtatatccacatacatatatctattgaatgcaaatattactcagcggggtggacaaaaaggcgccacgtcgaccggctactctggatactccagatactctggccttttgactgtggcgccatcctgacgccacaagctctcccaatttccgcaacgcccccaggcaacagcccctcctcgtttcgcccaaccatatcatatcttccgttatgtaatcgcgtaatcgcgtcgcgtcggaagtccgttgacttaaatcctttttaccttgctgcacggcgatggccaaaatcagcgcactaatcacatagatgtactgcatttttttcgaaatatgcttgaaacactttttagctgaacactaaatattagttgaactatttgggtttctggcgactttagaaacaccgattttgcggattccgattcagttgctatcactgaacatggactgcttccactttatttatatatatagtagttatctttatatatataaattccttgcaagaaactagcgctcacggcaaacgctggctaacggttgacaaacggcaaacgactgggcgaagcagcagccgcactcgacaaatgtaccacgaacacgaattgcggacagccagcccacggggcggatgagtcgaatcggatcgcatcggctggcgatgggtggtgggtggtggtcggtggtcggtggttagtggttgctgggagaaagacccaatcccagcctaaaactcggattcagtttttagcttgcagcaagggagctttggcagcgaagctttcgagtgtgcgtcctctttgcgatttccacgctctgcatgtgtgtgtgtgtgtgtgtgtgtgggtcaggagatgcgaatgtgtggccacaaaagtatctcaaatgacactggtctgcagggatggggtttcaaacgatttttattatatttcgtacttaatgtaaaataaaaacattcatttcgattattattagaattaaaacatatgtccttcatatatcattaaacatcttaaggtgaataaaaacgttctcaacttgatttatattaaatcgtttttttattaaacaattttcgtcgctgtactaatttaattaaaaattattaatcacatattaacaggttgtagtagaaattaaaacatgaactcaaataatcatcacattgcctatcaattgtttggccgttaaaggtcgattcagaaatgagatctctaagctaagattattaaaatgtttgtataaacaaatacattaaaaagctaatcgtgctccctgaattaggtgttttgaaatatatacatgtttacatattgtattaaaataatctgctcttaatcacttccacttctgtttcttcttattttggcatctcactttttatttatgtatttttaagtagtcgcaattagaagctgcaattagccgaaggcagtgcactggactattcgcctcattcactcataaccctgagcgccatttcaactaggcgtccagacactcaatccatagccggagatcaggaggacgtgagcacgtgaatag

SEQ ID NO: 17285 - DNA, 674 bp, DROSOPHILA
tttgtcaaccgttagccagcgtttgccgtgagcgctagtttcttgcaaggaatttatatatataaagataactactatatatataaataaagtggaagcagtccatgttcagtgatagcaactgaatcggaatccgcaaaatcggtgtttctaaagtcgccagaaacccaaatagttcaactaatatttagtgttcagctaaaaagtgtttcaagcatatttcgaaaaaaatgcagtacatctatgtgattagtgcgctgattttggccatcgccgtgcagcaaggatatgccatcaagtgctttgtctgcaacagccacaaagacgccaactgtgcgctggacataccgccggacaatctgctgaaggactgcgatgagcagtactcgtcccgtggcaagggaatacccacatactgccgcaagattacgcagatcatcgagttctcggtgaacagcctgcccccggatagccgtgtgattaggacctgtgcctatcagaatcagacctccaccaactattgctatcagcgtgccggttttggtggtcggcaggtggtctgctcctgcgatacggataactgcaacggagccggagcgatgggcgcatcggcgttgggcgtggcagccatggtgggcctcctgctgagcgcccgtcagtatctgcagcgttaa

SEQ ID NO: 17286 - protein, 147 aa, DROSOPHILA
MQYIYVISALILAIAVQQGYAIKCFVCNSHKDANCALDIPPDNLLKDCDEQYSSRGKGIPTYCRKITQIIEFSVNSLPPDSRVIRTCAYQNQTSTNYCYQRAGFGGRQVVCSCDTDNCNGAGAMGASALGVAAMVGLLLSARQYLQR

SEQ ID NO: 17287 - DNA, 13111 bp, DROSOPHILA
gaaattacgggcattcattagagttttaaatgagggttcaataatttcgttagattatctatatttataatgtcataaatcataaaaacgtatattcttttgaatgaattgagaaaactattataatttgcttttaccacacattatccgacggcaattaaaggtttaaaacaaaagcgaacgctatagtcgagtacccagactatcagatacccgttactcagctagtgaacatttcaacatttttctgaataaaataaaaccgaataaaaatttcaaaaccttttttaaaagtgtgggcttgaagattaatacgtctgttaatacggacggacaggaccaaatcgactcggtaagtaatgccaatcaggaatttatatgcttatatctttttcacacattttcaacgaatcaagcgagtaacggttataattagggaataaaaaaaaaaaaaaaaataactatttatgtctatgttacaaactggggttttccattaagttcacttctcattacttgacttttgtgtatgtactttggttactaaacagattcctttcctaaccacttttttgcttgtgaaatttgtttcgtttttacatgtctacgattttcgttttggatttatactttttacaaactatgatttgtgtttcgtatttcgcatatttcactgagatccattatcgctcttacaaattttcgtttttcgcgcttaaatattttttcgaaaattaaacagcagggtcgcagcatagttcgactacagaaattatgaattcgagttaaaggaagatcactgtttctataattatcaaattgaaatggtagtgaattaaagtttaattaatttaagaaactctcgagtgctttcttttttatgctagaaaaggttagtaaaactgaaaccttaatcaccttttgcagatgattttaaaagttaacaagaaaagttgatactgctgaaaatgtttacaagcattcgagatttgaaatgatattttttttttaaaaggaaatttaaatttgctacgatattccctgctgttcgctgtttctctcagtgtcgtttaacttgtatatacctgtacttatgcatatatgtatgtatattagatgtatgtatatatgtatggcagtcattaagaaagtcgttaaggattcctcttattattattcttatgtattcgcaaactcttcgtacggttctatgacactaatagcttagacttaggtaattactctttagacatttttgcggtattaagttgacaaaaaaacgttaaacacttaacacacgattgtttttcatccgagcgcttaaaatgcgtgagcacgatacaaattacatattaagttctaaaaaaaaaattctcggtttattggaatcagttgtgaaggcgccacattacttctgataggaaaacaaacaaatgcatttcttgtttttttttttgttttaagtggcgttcgagaaagagagagatacagaggcgtggaaagagatagacagatggtgtgtgtgtgtttcaatgtgaaagagatacatgagtatttacaaaacgcagtagctattagatataatggataacatgaccatgttgcagctgctcctaaagttgctcgttgcacggttgcacggttgctgcatgccgcatgctgcatgtcgctgtttactgttgtggcatcctcgtatttgccgccgcagtcgatgttgctgctgcagatgtggctgccgttgttgccggtcatcggcgatcgtctgctggcatcatttgaatttgcatgggttttatttgacacatatttgtatattcgagtgatcgagcgaggtgttcgaatagaaaaagaaaggaatttatctttatatgagggaccaccaatcatcattgcttgcattcttgcttgctactcatcacaaacttgagtatcgtacaacaaattaaattcgcactatgcgccgaactaaaaataaaacgaaacacttcttataattaagggtgactagtgcaacataatggtaatcataaattagcgtatataaatcataatcataattgcctaatacaaacaatatattcaattacaaatttgtccacagctaaaaactaaattataaatgcttttcgtttgcacacacacacacacataaaacacacacgaaattcagcaactgaagatttcgatccttcgataaatacagtacccactcgctacgaactacaacacataactgagagagcttttgcttcaaagcagctccaaaaaaaatcaaattcataatcaacaaacacaaaattctgtgggacaggagctacaaaactcaatggtatcgattttaaaagccagggaatatcaatgcaatctgcggcaatagaacatggcatcaacatcgacaaaaagtataattagttaatgaaactatcttagattttgattttaataaacaaaaatgtttttgatttcaatatttgtttgattttgattattgacgccaaactccgaccacagacttcatcaataacctgcagagattactcccccaatttgcatgccttaaaatcaactactactcaccgtgacattggccatctgacgcaccgccaggacccgcgagtggtggcaacggcaagggaagcggcaatggcagcggcatcgcctgctgttgctgcgctgcggaggatcccccgccgacacttgaacccgaaccggaggatcctgcggccgtggccgctgctgtcgccgccgttggagccgctgcactggatgaggagaccgcaccgctactgctgttgctcgctccgaggccaccgccgacgcctccgccgctggagcctcctgctccgctggaaccggagccaccggctcctgcattcgctgtggcgcccgcgccgctcgtattggttgcctcgtctgccgtgcgcttgaagaagttgtgctgcagggcatagtagggcgtgacccgtgtcttggggtcaaagtcgagcatgcgcaggatcagatccttgaacttcagatagtccgagacggagtggcccggctcatcgagacgcctgccccctggaccgcctgtttccactccgaggatgtcgtgaagcttgcgggatcctggcggcttgtacttcctgccgttctgattcttcttcagcacataggagccatcggcgacgatcttgtcgaagaacttgcgggtcttgtgcgcctggtcgagcagatacttgggcggcatgcccagcacctcgacgatcttgttcatctggtccacctcgttgcagccggagaagagcggctcgccggtgtgcatctcgaccaagatgcagcccagtgaccacatatcgatggccaggtcatactggatgccaagcagcacctccggcgagcggtagaagcgcgactggatgtagtggtagatctgtggggattcaaggagtacattgtttagttttgaatgcatatttgaaggactctaactctacgccatcacttacccgctgtcccaactggcaggagctgccaaagtcaacgatcttgatcgccgagcgcttcgggttgcagagcaggatgttctcgggcttcaaatcacagtgaattatgttcagttcgggggtgctgaggaagagcagtgcggtgcacagctgctgggcgaacttgcgcgtgaggttcagcgaaacgccccggaagttggtgttccgcagcaggtcgtacaggttgtatgagagcagctcgaacaccaggcacaggtggttgcgccacatgaagtgccgcttgagcttaactgcggatcaaaatgatttcaatggattaaatatgctttgtactttagtaaaggtatatatatagattcacataccgatgtagtatttgttttcggcatccgcccggttcatcatctcgagcaacttgacctcgatctgtgcctggtttaggaacggtttcttattcttaattatcttgatcgccacgtggcactgctcctcgtggtcgtaagccttcaccacctggccaaaactgcctttgcctgcggaaacgtaattagtaaatgagttaaatttcgatagatatatgtatgatccccactcaccgatcagagagtcgatctcgtagcgatccaaaaacttttcgccattcttgattatatagtcgtgattatcgtcgtcgtagccgtcgttataaagttttcgctcctttttgttagatgagtcgtcgtctccttgcgtctgctgggcacgacgtttctttttcgcatagtaaacctgaaatgaagtaaataatattatcatatatattaaaaatttacaaataaaaaaaaatctttttttaactataaaacaaaaaaacacatttcatgcttttgttgtaatattatgatcatgttcgccacctggcggcaagtagagtgacctaaagggcaacaacgcgaatctgccaggagaatacgattatacacttaaaatagtcggatcaatttcaatagatagcatttctgtgttgtttacatatattagttttctaacccattataatatgttcaaaatgcatgtgaagtaatagaaaaataatacaatttccaaaaattgaagtgttaaagataattggattctattggccagttgcaagtaatcccgttacttccacttcatcaacgacaaatgtaaacacaaagtgggaagatggggaaatcgcgaaaatgagaaccaagaccggcaaataaaaaaaaaaatgccgaaagagggcgacgccaagctaaaaaaaaaaaagagaaaatcctctctccctttttcgactcactctttcgtactctctttttccccaccacggcttctctttcacgggggaaaaaaggctgcagcttggtgaaaaaagttgttgctaacgcggcaagttggcggtggtgcaagtgagatagcaccacgttgcgagaggatacaggagacagagtcagaggaagagagccccactctctcgaaatcgaaaactgtagcatacaaagcggcagcgaaaaggcatttgcaatattacggcatctccaacggcacaagctgccaactgcaaatgtaactgtaacttctgtcaaaagcactccaactgctcgagagcacctgtcaaattcaaatacttgcaacatcgctagctgtcaaatcgcccaactgcagcattctcatttaccgatttcaatatgtttgacttccgttgagaataagctacattttaagatgccggtttaaattaattacaattaagtacgctttgtcaaagaaaatatagaatatagtagctatccttaatgccagaaagtgaaggttttttttttattgggaaaagttgcgtgcaactcgtaagaactcaaactgcgtgaaatattaacatttttatgaggcatgcgacattcgccccacccactcaaggcgcataatcaccgatttaggtcggcggcattttgtcatagcgtcatttgacagtttccatgagaggccatcaagaaacaagtattagttattcgggggacgttctcgttgagaaatttgggaacttggcaggagaaccgagacagttgcgtgtagcatttatgctccttttatttatttattttttttcggctgttgtcaaccgaggcggcagacgacgtcaatcgaagccaactgcaaatggctggctgcgggggaacggtgacgctgttgggggaattgaccccacgaacgggtcaaggacaaacgtatctttagcccagctcaacgccacaaatatccgctgtcagcagatagtcagacagccgaaaaaagaaagccacaagacgagaaaagcccccgacgaaattccgatcgacatataagcgtaaataaaaaaaaaagaagaaagaaatcgggatggatggatgccaaggttccttcgtagttttgcagactacaagaacaacatcatcgcaatggtaattgataaggtagacagttacataaactagatagaatatactttttgaaatgatatggaatcttgccaagctaaaatatcaatagaatcactatttactaatgcaaatgaaaacagaaaagttatgtgcattgtaacgacaagagaacctggtaaacatgatccaaactcaatattgccacgataaacataggattttatgatcaaatatccaattatcaattggttctcatatgttttgcttgtagattaaccagattaaacgccagttatgggccacactcacctcgttgatgtgcttgtaggtctttatcagatcgacactcagcttgcgcaaaggtcccgaggcgggctcccgaaagtggttgggaatccgggcctgcatggcgcgcacctccgacgaagacgagggactagagtgctgtggaatgagatggagaacgtattactcaaactgttcaataaagtgatgcccagctagctttggctcagatcgtgctcagatcaaatcatttttattttgaacacaatctctttaatttcttaaaacaacattattaatgtacttgctaagcttcgttattaacataaatacgcagtcttaatggccgcattgagaaaggcaaaaccagtcctgaaaaataccattctttgttcttccgagggcgcggctttctcaaatgcgccataaacctttctaattgcatgttttaatttaagtagagcatgggaaaaagtaagttcatattcaacgaagtaaagttatcttttacacggctccgttgaaatatttgtggattttttctaaacaaaaaatgttctacaatttctaaaagaaagaaacacaacttctgcatgtcctttgtgtgtaaatgcatgttttggattgaagataaggataatgctagttgataatactcacatggtgcatgacatcccggtgcgtggcaggcagatcctctgcgtcgacgaatcgcccgtagagtggggcgtggcgctgtcttccgcccccgcttccgctgccctgcgctgcgtcgacgctgccgccgctggacccataagcggacactagagcgtaagagaaaggaagagatcagagatactatcagatatcggcgggaattatacaaatatatatgtgtgtatatataattattgcgatgtatttgcttgccgccttcgttgtgcgccgttctgtgctggttcattgaccggatcgctcggacaccgctcctctgcaaaatgcacctgttttcttgcacacctgactacgtcagcgtcaagagttgccaaaacgataataaaagcaaagggtagggcgaaaagtgtggacacacaccgcaggaaaaacactgccaattcccatttaagatctgatatagagccagcccagagtcatgcattctttttttaactcaagatgcaaaattcgttctaaaattagttgttgaattggtggtcatactagtgagttaaagatagtaagcacatgatgctgccatataaaaaaaaacgaattggaacatttctcttcctttccgaagaatctacttttgctagcaatatttttttcctgtgcattggcaggccagcagaggtaagtaaaaaagaagctctaccttaattttagaaccagacggaactgaactgaaattattacacaatatgcaggcgcagatacataattctgccgtttgtagattctatttccccacgttcctatgaccatttcacatgctcactctttttgttttgttgctcttcgctcttcgttcgctgatggcttgtgcaacaaaaatagacccaacgttataaacaagaatgaaaaaatcaagcaacagggtaaaacctgtaagtggcagcagctgtgttttcgatgataatccgcgacatttgatattccaacactccatttctaatttccaaaaaaacatgtggcgagagcaaagatacttttcctttctattcgttgactaattgtgcaaacgcaaaaaaaaaagttgtcggtcagttaaactgacatgcaacaaatttttctaggccaacttctctgtttcatccaatgggcttactagtataatagagtgcccgttccgccttcattctcgatgatgatgatgacgatccctgaaccatcagcacattgccatcgacccgatctctatctctatctccatcttcatctacatcccgcttcacatccaacagcaccgtgtcccaggcacttttgggcaggaatttagagatgatctgatggccagcgtcgtcgtcatccgcctgatcctgattgccatttgttggccaatttctgacacgatgctggcagccaatttgcgccaaataattgatgtaatgaggcggatgatggtgattgtggtggccgttgtgcggatggtggttcaagctgctgctgctgctggtgatgatgctgctactgaagctgccaccagctgctgcaccaaccacgaatggcgcccaatccgcggtggccttgtcaaccggatcgccgccattcattgactgccaataaaccagggccgtcgacatatcactggcaatcggaatcgcaatcggaatcgcgaacgcactttgcactaaccgcttccttttttcaatcaaaatgatatgcttatttcgtttatttttatatagtttatttaagtaatttaagatccatttggatctggctgtatgaagcgcggtctgtttcgtgtgaaaattcagcgcaaactgcctcggtttttgttcccccagttctgtccccaaagtttgccactcgtcgttgttgttgttgttgtcgtctgttttatttatacggaaccgtgttttctccctgctcttttatttcacttggtgtttttgcacttttttgctgcacttatgcggaacacacgaacgaagccgagcgccgatagcgagattgcagcaacgatcatcacgatctcggcgtggtaatgatcatgaagctaaagtagggaatgcccggctatctggcatcggaattcgctatattaacactacactagactcgttcagtgttgcacaattgcatttgagtaaatgggaaatagaaaaatctcttggtgatatctcttggtcaaatccatacctttcgacctttgtttcggagtgcacatctctggtgttgaagaagctcaactgattgaaacagtgttgggtaaatacctttcagtatctccatattgatcacagagttacttgcacttgcttgtgattaaccacaaacgaataaatcggttttcttaggtattctcccccattattgttggtgaaaagctcacttctggctggccttttgttttctatcacaagtgttttttttgacagagggagttccgcttttcgttgataatggcatttcaataatgacatgtagcgtagtgacatgtagcgaatgcatgtggggtaaatgggggaacgctgggtggttgtgggtgggaaagtgctcgcacttgtctcgtgcgcgcaaagatacaaatatacatacatacatacatacatacatatgtaagtatgcatttctttgtttcggcttttgcgtcgtcggcaagtcaaggaaatcaaaacaaagcaaacgaaatgtgaaattaaaataaaatgtaattaaccccaggcaaaaagtgtgtgtacataatgcagtgcgttacaaaactgtataactggttgagctgccacttggcagagtgggccataaaaataggaaatcgttttcgaaactaaaatgcccagtaatgccaaacgattttgaaataattataaacttgtgttctttcgagttatgtaaatgtctgtctacacgccaagctaatttgtgttttccatttcgccaaagcaattaaaaaatattttgcttttataataaacaaattgaacgcttgccaatcgatggaagagttgaataattaatgcgttcggggcccctcgaaagattcgcaggagcatagccaccagtccctctatttatagggatcccatccgatccgatccgatccgatcctccgttcgcaatgtgggatctttgccccaaagttctcatgttcgttgtttgtctgtcgcgtctctcggccgaaaataaaaatagttgacgacattttgcgttcgctccccgccacctttttggccacttgcattttgggcgaggaatgaggggggggggggggatagggccactaccaacaatcacacaccatcgataattgcatccggagcaggtgactcacatcgtgacgtgactgcgactgtaatactactattacccaccacttgacaactttatgaacagatggcggcgccagctaatcggatactaaagtctcgacatatttggcaaataatggggaagtcccgcatagacttacgggtttttcaaaacagtgcggattggaacaaatacagacggtgacggttgagtgataagcaaacagttggacatattatttactgaatgaatgcagtgacattgttgcattcctcgcctgagcaggaaaagcggtggaaatggtggggaaaggcagcccaaattagctgttcgaaatctggccattatttaaaatagcacctgatcctgatactaattattattatcggtgatatgccccatttgcgtggaattattgcagaacatggcactgccatcgaaagcagtaatattgaactgatttattctcgaaaggtaaataatgtagtatcgttacagctgtactactgcggccacattaacaccattttttatcttggaatgtcaagtgtatttgcaaaatgactgacttttatttgatttatagtcagtcccctcgtatttacaatatagcactacaattttcgattggcacaaagtaccatctatatggcaataaaaactaacttcaatttacactaaaaaaatgattgtaccgaataaattcgcaggatatacttcaattgacaaaaagaagtggttataaactgggtttgcaatggtgaaaggttgatgaaatatttggcagtttctggagcggtccgagcgatatgatccttagttttttttttttttttttttttggaaaaggatcagtggataatacttacgtttctgtttattcttatccataacgccgccgctattcgtatcctctaatctatacatggggatgatgtttgttggttttgcgctgattaatgaatctttacttggtttgttggctcctatgtattacgctatatgtacttgacatatatatactcttgcttatatatatttatatagatgaatatatatatgttgcgttatttgttcatgcgatttggatagtttgaaattgtgtttttgtgtcggattttggttgcttgtgatttgtaggtttttttttataaattaaatatttttttttgtgtattttgcattcatttcgttatcctttgcgtcgttgttgttgccttattacttgtttttgtttgaatttcctttcgtgattaccagttaatatagatttatgtatgtggtattggttaatatatattttttcgtatatatttttaaatgggtcgaatactttttgttgtttgtttaaaattatgaacacaagtttcaagtctttttttcgaatttgctttaccgtttgtacgcgcacttgtcacgaattacttttctttcttttttacagtgtaattgtcaaacatttatgaaacaaacaaaacaaaaacacgtttctcctgctgctcttgttgttattattgttattgctctttccgtttatttaccgctcgacattgcaattacacacactcccacacaacggggcgtgtgtgtgtgctctaatgaaaacaaaacacacacacacacacgcgaatgcgaactcacacgcacacagtcgcaggggggaaatctgagaagaaagcaaaaacttttgcgatctgtctttcttctgcgttgtatggattgtttttttgtttttgtcttctctttatcgatttgttagctagaatctatcgattttctcaagttaatgtacttttggttttatggtaatttttggcttccgctatgctcaacattttgcataaacatttcaaaagcacttttaaatttgaatgtttccttttgcaattgataatggtaaaaaattgtcgccacgctttgtttacaaaactgtactgctgctgttgttgtttgtgctgctgcttgctgcaatgaaatgagagaaggcgtttgtttaatcaactaattgaattgtaattatttatagttaagtatatatatattcaaatacgcatatatgtgtatgaattggggagccggaaaaggtttgaagcgtacgtcgcaaataaaaataataaataataacaatcgggcgctctctctgcctctgttaacgcgatgttaatcagctcgctctcccaactctctatcgctctgtgtttctctttggcaggtgaacgaacgacacgcgacgcaaaaagcatgcgtctgtgtgcgagcgagagagcgcgcaagttcaacgtgtggcttggcttttttcgttgtgtttttttttcttctgccggggcgccgcctctaatacatacatacacacacacacacgcccacctctgacattgcactcgcacacaaatacacgcaccgtggagtgacagctgtttcaagttcgatttcgatttcgattactcgttttcgactctgttgtcaaggcgaaaaatttggtgtgcattttaattacaaatgtcgattaaccccacacaatacacaatatacgtgtgcaaatattttaattagctaaacaaaacaaagcccacacgcgcaaattgcttttgttgtctatgctgcggtgaaagtggcgtttataagcgtttagaggtgcgctgcttgctactttttcttgctttgttgttgctcttctgtcggcatttcgcgattttgttgccaagcaaatggaattgaccagcagacgaccagggttgccacccctccttcaatttctggctctgcctcgcggcgcaaaaaaagggataacaaacaacaacagcaaaataaatgcacaattgtacagctgcggttagcactctagtgacgaaggctatacagcaaatttattaaagtgtaataataacaccaaacaagaaaactatgcaaaatattattattaattattatcatttatggaatgcaataaaatgcacagaatta

SEQ ID NO: 17288 - DNA, 3632 bp, DROSOPHILA
aagcagcagcacaaacaacaacagcagcagtacagttttgtaaacaaagcgtggcgacaattttttaccattatcaattgcaaaaggaaacattcaaatttaaaagtgcttttgaaatgtttatgcaaaatgttgagcatagcggaagccaaaaattaccataaaaccaaaagtacattaacttgagaaaatcgatagattctagctaacaaatcgataaagagaagacaaaaacaaaaaaacaatccatacaacgcagaagaaagacagatcgcaaaagtttttgctttcttctcagatttcccccctgcgactgtgtgcgtgtgagttcgcattcgcgtgtgtgtgtgtgtgttttgttttcattagagcacacacacacgccccgttgtgtgggagtgtgtgtaattgcaatgtcgagcggtaaataaacggaaagagcaataacaataataacaacaagagcagcaggagaaacgtgtttttgttttgtttgtttcataaatgtttgacaattacactgtaaaaaagaaagaaaagtaattcgtgacaagtgcgcgtacaaacggtaaagcaaattcgaaaaaaagacttgaaacttgtgttcataattttaaacaaacaacaaaaagtattcgacccatttaaaaatatatacgaaaaaatatatattaaccaataccacatacataaatctatattaactggtaatcacgaaaggaaattcaaacaaaaacaagtaataaggcaacaacaacgacgcaaaggataacgaaatgaatgcaaaatacacaaaaaaaaatatttaatttataaaaaaaaacctacaaatcacaagcaaccaaaatccgacacaaaaacacaatttcaaactatccaaatcgcatgaacaaataacgcaacatatatatattcatctatataaatatatataagcaagagtatatatatgtcaagtacatatagcgtaatacataggagccaacaaaccaagtaaagattcattaatcagcgcaaaaccaacaaacatcatccccatgtatagattagaggatacgaatagcggcggcgttatggataagaataaacagaaactgtccgcttatgggtccagcggcggcagcgtcgacgcagcgcagggcagcggaagcgggggcggaagacagcgccacgccccactctacgggcgattcgtcgacgcagaggatctgcctgccacgcaccgggatgtcatgcaccatcactctagtccctcgtcttcgtcggaggtgcgcgccatgcaggcccggattcccaaccactttcgggagcccgcctcgggacctttgcgcaagctgagtgtcgatctgataaagacctacaagcacatcaacgaggtttactatgcgaaaaagaaacgtcgtgcccagcagacgcaaggagacgacgactcatctaacaaaaaggagcgaaaactttataacgacggctacgacgacgataatcacgactatataatcaagaatggcgaaaagtttttggatcgctacgagatcgactctctgatcggcaaaggcagttttggccaggtggtgaaggcttacgaccacgaggagcagtgccacgtggcgatcaagataattaagaataagaaaccgttcctaaaccaggcacagatcgaggtcaagttgctcgagatgatgaaccgggcggatgccgaaaacaaatactacatcgttaagctcaagcggcacttcatgtggcgcaaccacctgtgcctggtgttcgagctgctctcatacaacctgtacgacctgctgcggaacaccaacttccggggcgtttcgctgaacctcacgcgcaagttcgcccagcagctgtgcaccgcactgctcttcctcagcacccccgaactgaacataattcactgtgatttgaagcccgagaacatcctgctctgcaacccgaagcgctcggcgatcaagatcgttgactttggcagctcctgccagttgggacagcggatctaccactacatccagtcgcgcttctaccgctcgccggaggtgctgcttggcatccagtatgacctggccatcgatatgtggtcactgggctgcatcttggtcgagatgcacaccggcgagccgctcttctccggctgcaacgaggtggaccagatgaacaagatcgtcgaggtgctgggcatgccgcccaagtatctgctcgaccaggcgcacaagacccgcaagttcttcgacaagatcgtcgccgatggctcctatgtgctgaagaagaatcagaacggcaggaagtacaagccgccaggatcccgcaagcttcacgacatcctcggagtggaaacaggcggtccagggggcaggcgtctcgatgagccgggccactccgtctcggactatctgaagttcaaggatctgatcctgcgcatgctcgactttgaccccaagacacgggtcacgccctactatgccctgcagcacaacttcttcaagcgcacggcagacgaggcaaccaatacgagcggcgcgggcgccacagcgaatgcaggagccggtggctccggttccagcggagcaggaggctccagcggcggaggcgtcggcggtggcctcggagcgagcaacagcagtagcggtgcggtctcctcatccagtgcagcggctccaacggcggcgacagcagcggccacggccgcaggatcctccggttcgggttcaagtgtcggcgggggatcctccgcagcgcagcaacagcaggcgatgccgctgccattgccgcttcccttgccgttgccaccactcgcgggtcctggcggtgcgtcagatggccaatgtcacgttcggcgcatagtgcgaatttaatttgttgtacgatactcaagtttgtgatgagtagcaagcaagaatgcaagcaatgatgattggtggtccctcatataaagataaattcctttctttttctattcgaacacctcgctcgatcactcgaatatacaaatatgtgtcaaataaaacccatgcaaattcaaatgatgccagcagacgatcgccgatgaccggcaacaacggcagccacatctgcagcagcaacatcgactgcggcggcaaatacgaggatgccacaacagtaaacagcgacatgcagcatgcggcatgcagcaaccgtgcaaccgtgcaacgagcaactttaggagcagctgcaacatggtcatgttatccattatatctaatagctactgcgttttgtaaatactcatgtatctctttcacattgaaacacacacacaccatctgtctatctctttccacgcctctgtatctctctctttctcgaacgccacttaaaacaaaaaaaaaaacaagaaatgcatttgtttgttttcctatcagaagtaatgtggcgccttcacaactgattccaataaaccgagaattttttttttagaacttaatatgtaatttgtatcgtgctcacgcattttaagcgctcggatgaaaaacaatcgtgtgttaagtgtttaacgtttttttgtcaacttaataccgcaaaaatgtctaaagagtaattacctaagtctaagctattagtgtcatagaaccgtacgaagagtttgcgaatacataaaaaaaaaa

SEQ ID NO: 17289 - protein, 527 aa, DROSOPHILA
MQARIPNHFREPASGPLRKLSVDLIKTYKHINEVYYAKKKRRAQQTQGDDDSSNKKERKLYNDGYDDDNHDYIIKNGEKFLDRYEIDSLIGKGSFGQVVKAYDHEEQCHVAIKIIKNKKPFLNQAQIEVKLLEMMNRADAENKYYIVKLKRHFMWRNHLCLVFELLSYNLYDLLRNTNFRGVSLNLTRKFAQQLCTALLFLSTPELNIIHCDLKPENILLCNPKRSAIKIVDFGSSCQLGQRIYHYIQSRFYRSPEVLLGIQYDLAIDMWSLGCILVEMHTGEPLFSGCNEVDQMNKIVEVLGMPPKYLLDQAHKTRKFFDKIVADGSYVLKKNQNGRKYKPPGSRKLHDILGVETGGPGGRRLDEPGHSVSDYLKFKDLILRMLDFDPKTRVTPYYALQHNFFKRTADEATNTSGAGATANAGAGGSGSSGAGGSSGGGVGGGLGASNSSSGAVSSSSAAAPTAATAAATAAGSSGSGSSVGGGSSAAQQQQAMPLPLPLPLPLPPLAGPGGASDGQCHVRRIVRI

SEQ ID NO: 17290 - DNA, 2579 bp, DROSOPHILA
tcaaaataaagttggtaacaactttttgatgtcttaataatagcggattaggcatattgcaactttctgacgctgcagtttttggagctcagctaaaaaggagcagaagctattcctcttaggactattgaaatcgattggtacacgctggaaaaatcctttaagtctcaaaaaacctcggaaataaaaagttcacatagagcaattgaagatatattatgcctagaatatctgataaaatgatttggagtgataggaatctacaagaactatcagtttaaggatcaaaaaaagtatatctattgtataatggttcaaataagatggcttcattttaatgtaatgactaaaaattgcatattcatgatttacattttacattaccccatgttttgctatatagtaagatatcctaaaggataactttcagtgagtgcaagtaggcttccaccacgcctctttcagactattaccgctgttatcgctgttatattcgtccacaaaatgccggtcgatagccaagggtcactctcattggtcagcgcatggacaatgggtaagccttactatctccgccccaacacataacagttggtcaactccaagggccaagaagtgatcggcgagcggggagaggtggactggactgggctgggggcatgtaatctggctaaccagttatatgaagtccttgtaaccgggcagcacaaataaatgccatgcggccccggccaagtgtcatgtatttgacgaataattaccgtcaacattgcgtgattggttgaatcagccggcgatggagggttgtggctggcttagaattagccccaaagcgggtgtatgtgtgtgtgtgtgtgtgtacgtgggggagtttgtgtgacaagaacctataattaccacggcaggcaggtggtcgcctcgccagtagctagcttcttagccaggagctggattcagatatagcccggccgtcggcgcgaacggaagtcaccgatataggatgcactcgcccgcccagtcgcccattttggatgtcaccgagaccgtatcgatgcactccgaactggatgcggaactggagtccaagaacaatccgtcctactccatttccattccccagaatcttcggctaaccggtctgggctttcccggcatgatcggtgccaagagatcgtcggaaactctacccgccttcgagtatatcgcaccaccaagtcacgctctccaggcactggaatttccgctgatggagctcaatcgtgtgggcgtaattggaggcggtatgtttccgggttttgtgcaccgtcgcgtccgcggtgaaaagcgacccattccggaggctcaaaaggatgccaagtactttgagcggcgcaagcgaaacaacgaggcggccaagaggtccagagatgcgcggaaaatccgcgaggataggatagcattccgagcagcgctgctggagcaggagaactccattctgcgggcgcaggtcctggcgctgcgggatgaactgcaaacggtgcgccagctcctcggagccacaacagccggcggcatgttgtccatggccaggcaggtgtgaaccactctgcgggatcagatggaaaagtgtacatatcaatgagggaagctagtgagattatttagtttgatgttaataaatgtttaaaataaatactaaggatattctaataatatatgtatgcatatgcaggtgtcccttaaaaaaatatgttattcagatatataaatattggcccatctatatagagtattttgctagtgctagtactatagttctataaagtcatatatatatcatttatatatcacaaattgtgcaatagaaaccattaaaattgattaaaagtgagtaggactagttcgagtttatttcattttaaaaaatgatttcaacaaacgcatacaaataattagaaaatatttaacaagctagtagtccagagtgcgcgactgcacctttccagtcgagtccaggatgagcagaacctgttcctgtccacaacttcgagcaccggcaatgtccgtcaccttgaggcgtgtgtccatgagctcctccacgggtaactctctgtcgcgatagaaatcgtagtgacgcacagtgccattggtgagggcggaaagctgccagccgtcgctggagaggatcagggcctggacgagatgctggcgcagaccgctgccacttaggagcagctgctggtcaaagaccctcatttcgtaggaacgcctgggtcgctcaatcagctccagagctgtgttgggtcgggcatcgtacgtgggattgtcatccatctgctggtcaaatgatctacgctcgttgagtatgatgttttgaatggcacacgatttgcccgtctcgggatcgggctcatccgtggccggcggaagtcctgttttgggtctctgctgattcctctggcgctgcctctgtcgctgattgcagttgagtatcatcacagatccattggacagacccacggccacatagttctcattggagagcacacacaacgaggtgggaaacaggaaacgactttcgttcacggcgatcctcgcga

SEQ ID NO: 17291 - DNA, 579 bp, DROSOPHILA
atgcactcgcccgcccagtcgcccattttggatgtcaccgagaccgtatcgatgcactccgaactggatgcggaactggagtccaagaacaatccgtcctactccatttccattccccagaatcttcggctaaccggtctgggctttcccggcatgatcggtgccaagagatcgtcggaaactctacccgccttcgagtatatcgcaccaccaagtcacgctctccaggcactggaatttccgctgatggagctcaatcgtgtgggcgtaattggaggcggtatgtttccgggttttgtgcaccgtcgcgtccgcggtgaaaagcgacccattccggaggctcaaaaggatgccaagtactttgagcggcgcaagcgaaacaacgaggcggccaagaggtccagagatgcgcggaaaatccgcgaggataggatagcattccgagcagcgctgctggagcaggagaactccattctgcgggcgcaggtcctggcgctgcgggatgaactgcaaacggtgcgccagctcctcggagccacaacagccggcggcatgttgtccatggccaggcaggtgtga

SEQ ID NO: 17292 - protein, 192 aa, DROSOPHILA
MHSPAQSPILDVTETVSMHSELDAELESKNNPSYSISIPQNLRLTGLGFPGMIGAKRSSETLPAFEYIAPPSHALQALEFPLMELNRVGVIGGGMFPGFVHRRVRGEKRPIPEAQKDAKYFERRKRNNEAAKRSRDARKIREDRIAFRAALLEQENSILRAQVLALRDELQTVRQLLGATTAGGMLSMARQV

SEQ ID NO: 17293 - DNA, 3195 bp, DROSOPHILA
tgcgcagcttggacggcaagaagttccggctgtttggcaagagtggacgcgccaatgtggagctgtacgccgatgtggtcgcacccactctggatgtcagtctttttgtggaggcgtggcgcgacggtgccggcaacttaccgaatagctgcgataagtccgataaggttctcaatgtggaatccatttccaatccggagctatcggtggactttaagaccacacaagatcactccaagtgggcggtatctcgtcccacaggcattttgatctaccattggcgagttggcggcggagattggatttgtgtgggcgacatcaaccggcaagaaggtcagttgcatcgtggtggtggaaccgtgtgccacaagagcgccagggtatccaatctgtaccgccaactggtcaccaactacgacaagtgcgcccaacaggaatagaatctgaactaactaagactatttgtaaagttgcgtcaacaattaaataaacaccatttttgcattacatttaatgcataagaaaattgaaagatgttgaaaagaggtattatttatacaaagaacttatttgcatttgttatagataatatataataatttaaattttaaatttaaggcgccgtgcaacttcttttctttttctttctgctcttttccggacactcgctagcgccatttcttcaacgcactcttgtcgtacattttaggtactaaaaagcgcattgaaaactaggtggcgctcgtacttaaacttttcttaattctatagctgttgctaaactatttgccaaaaaaaaaaaacattgaaatatcaacaaacatgtataaattatttacaaatgtgtcaattgcatttggttgcatctaattattcatttatagcgccacctatccgtcactcttctacccattattatcacatataccagaaaatgcaaattcagtatgaccatcagctggaaaaagagcacagctgtttacaaaaacaaaaccaagcgaagaagcgaaaattattggcgatttttaaaaatccaaattaaaactagattcggagtcggaaaaccttcatagatttgggaatgttctgctgcctacgcacctgtctcaatggtggacacataaggaaaccgacggcaaccagtcgcctgcgggagcccgatgttcacctggatgcagcgcatatgggtaaaattacactaaattcagaaggattaagatacactatccttaaaatggtcaactgaagcgattgcgagagaactaatgtgtttttccaaaagatatgtagcttcgataataagtgataccccaataaagatatcaacattcccaattttatcgcacaattcagatacgtgatcagatattaatatatatgtacatacaatagaagtgcttatattctcattcaacaggcttaaccatcttgtatcttactaataatatgtatatcatatcatccatttggcaggacctgatgtaatcctgctgtcacaccaactgcgcgtaacgggcactggcggcgtcctggccacggcgcctttggtccaatcgaagtcctacttcgaggtgaagatccagcacggcggcagctggtcggtgggcttggcaacgcgtcaaacggatctcagtcgcaagagcggcggcggggatcgagagtcctggtgcctgtgctccgataatgccacacgccacaatgaccgcgaggagttccgaccagtggtgcagtctgcttgcaccactcagccagcgaggacgagcaatggtatcctgaacaatagcgctgccaaagcggccggactcattgccatcgaggatttgcagcaggaagatctgctgatgaccactggagtggcatcatccgatgtggatatcggtgattcgttgatagcatcgccacagcgagattttcccgatgaaggagacattgtgggcgtcgcctttgaccacgtggagctgaatttctacttcaatggaaagaatctggaggttccatttcgaaatgtacgaggagcagcactatttcccgtcatttatggtgagttttcgtactcttaagagaagcttatcaccataattaacctaatttttttagtgggcaatggcgccattctggacattatcttggataatttttcacacggaccaccaccaggattcgaacgcattctattggaacagtcacttctttagatagtccacacaaaagccttgaacaaattagcagcatgagaacaaagcattaacaagaataactaaaagacggtgcattttaggactttaggaacgcatttcattcaagtaatttttgtggcactttctctgccaatgcggacaactacctttaaaaaaaatgaaatacattattgtctagtaacactttatttatttaatgtaaaagttaagttacaagaatgacattttaaatatgcattctagattaagttttaaaatgcgaactttcagtataaaacaaattatttacacattttagttttagttttagttattcctttgccatatttcttctctagtcaaaaagaaaagttcccaagctgaattctatctcacaaccaaaacagctattaaattatttcaatttactttgtacacatatcttaatcgattttgttgattttcaccacatatttacttatagtcgtaaaatgcactgttctgttctcatttagacatcaggtgtataaactttgtaaactctctagtccttgcactatccaaaccgaaagtatttgtataattttattaatgttttgtaaattatttacgtagcttgacgtagcatttgtattatacacagagatacgcgtatctgcatacagatacagatgaatttttttgtaggactaggtggccacaattcaattctgacttcatcgtacacattccaatttacaacggcaacgtactcgagcacggaattacctaactaaatataagaatatatctgtatatctaataaattgtatctacacgtatccaacgcttcgaaaactgattaatccgcgcgcggacaataaatcaatgttatgtacttaatccgttgtgtagcaagttttccttgtttagattgtcaattcgatttgattttagaacattttggaaaactacattcccagagaaaggaaattaatggttaaaattaagatatgacacatgtccggaaagggggaga

SEQ ID NO: 17294 - DNA, 852 bp, DROSOPHILA
aagaagcgaaaattattggcgatttttaaaaatccaaattaaaactagattcggagtcggaaaaccttcatagatttgggaatgttctgctgcctacgcacctgtctcaatggtggacacataaggaaaccgacggcaaccagtcgcctgcgggagcccgatgttcacctggatgcagcgcatatgggacctgatgtaatcctgctgtcacaccaactgcgcgtaacgggcactggcggcgtcctggccacggcgcctttggtccaatcgaagtcctacttcgaggtgaagatccagcacggcggcagctggtcggtgggcttggcaacgcgtcaaacggatctcagtcgcaagagcggcggcggggatcgagagtcctggtgcctgtgctccgataatgccacacgccacaatgaccgcgaggagttccgaccagtggtgcagtctgcttgcaccactcagccagcgaggacgagcaatggtatcctgaacaatagcgctgccaaagcggccggactcattgccatcgaggatttgcagcaggaagatctgctgatgaccactggagtggcatcatccgatgtggatatcggtgattcgttgatagcatcgccacagcgagattttcccgatgaaggagacattgtgggcgtcgcctttgaccacgtggagctgaatttctacttcaatggaaagaatctggaggttccatttcgaaatgtacgaggagcagcactatttcccgtcatttatgtgggcaatggcgccattctggacattatcttggataatttttcacacggaccaccaccaggattcgaacgcattctattggaacagtcacttctttag

SEQ ID NO: 17295 - protein, 256 aa, DROSOPHILA
MFCCLRTCLNGGHIRKPTATSRLREPDVHLDAAHMGPDVILLSHQLRVTGTGGVLATAPLVQSKSYFEVKIQHGGSWSVGLATRQTDLSRKSGGGDRESWCLCSDNATRHNDREEFRPVVQSACTTQPARTSNGILNNSAAKAAGLIAIEDLQQEDLLMTTGVASSDVDIGDSLIASPQRDFPDEGDIVGVAFDHVELNFYFNGKNLEVPFRNVRGAALFPVIYVGNGAILDIILDNFSHGPPPGFERILLEQSLL

SEQ ID NO: 17296 - DNA, 8751 bp, DROSOPHILA
gcgaacctttgtgattcatcgccgtaaagtcagagatgtgtgcatagacacatgcatgtcgtttgaggtaattttaattagcttgccatattttttcaaatatttatttcgtggcccgtttcccgttgctcgtcgttgttaattttatttaacccatttttttttacggccccgaccattttgttggcgcccgctaagcggtctcgtcatgggttttatggggatttcgttgctgggaccttatcgctagggtcgccagcgtcgcaatcgccagcgacagaggcagaggcagaggcagaggcagagggcagccatctttgctcaactcatccataaactcattaacgcgcgcatgtctcacgcgttgccgtctcttttccgccggcggtacttgcacctgttgtcccacccgtacccacctccaccatcttcaccaactccttctggccccttacccacctgccattagcgtctgccaattgacctggtttgctaatgagtcaaaagggctgggggggggggggggttggactcgggtggccaagtgggcgacgcatgcgcaacaggtggcagaagattgcgattggcggctaggatataatgagttgtgtgctgtgcaaatcgaatgccaaccaatcgaaaatcatctgcgaatctatttgtaaattttttaataagacatgatatcttacaaatactttaatttacataactaaaacttgagaaagcagcattacaagtacagttgaaaacagcatcctaaacgtgcaagtctttcagatagatttatgaatccccttttcgttagccagttaactaactatgaatatagcaagtaacacaatgaccatttgtttataactgtcaattaaagtgttggcagtaactaatatttgtgtttttcccacttttatctttttgcgccacaacagcagaatgaagagcccaatgtggaggacagctggtgctgggagcccgatggaggtgacgagaagggcgccacaggcgccggatcgggcgattcggcgagcagagacaaggagtccggactcgtggacatcgcactgggcaacgacgatgtggtgcggctgaacaatcgcatcgcagagctggagcagctcaatgaacagctaaatgtctcgctggaggagctggactcgcagcatgagctggccatgcgggatgtgctcgagcacaagacgcagctggctggtcaggtggcgagtctcaaacaattacaggcggatcgcctggtggagcacgaattgtccaatgccaggcagcaaaagcagttggacgaactgcggcagacgtcttcagccgccaagaagcagcaagaggagctgcagcgaagggtggagcagcaggaggctgagctgatcgagatgcaagatctgctggacaaacgtcgccaggacactgccgagctcatcgaacgcgtacgcgtggcggaaacggagcgcgaacggctgctcaaggatctggaggagactcggcaagccaaggagaagaagacctcggagtcgtcatcgaacagctcctccacgggcaagcacagcgaggatgagttcatagttgtacgccaagcggatgccacgggctctggctctgcttccgggtcagatcgtgatccagatgccgacgtcacttcgccgccctcgaaggagaagctgcgcgatcgtctcgtctccctagaatcacaaatctccgagctgaccctcgccaatacccaactgcaggatgctcagctggaaaagcagctgagcatcaatatgctgggtgaacagctcgtcgaattggagaagcgcttgcgcctcagcgaggcggaaaaggagcagcttcaggtgaacttacagcttcgcctgcagcaactgaccgtgcagaatcaggagctgaaactccacgcggaggctgagcaggaaggtcacgcccagaatctggaggagcagctgggcgatctgcgcgaggataaccaacgtctgcgtcaggagctaaagaccagcatagcccaggccaagttccgacaggccattgccgaggagaaacaggagattacggatctggacgatgcggactcggagtacggcactttcgagctggataagctgcgtgctctgctccaggccgagatagaggatcgtttggacagctcgtttccgcagcagaagctggagcgagcctggaacgcattgaaggatcgctggcaccgcctcgacctggtcgagcagcgactggtggacgtacagaaccaacagttggtcagcgagcacgagaagaagaccctcgaggcggacatctcgcagtatattcttcagtgcgatgagctgatgaagaacaatgacctgctgctcaacgaactggacaaatacaagcgcaacaagctggaaaccattgaggagcatcacgaggagacgattgtgcagctggaggcccagttggaggaggccagacagaaattggaattggcttctctgtctagccaacagcagatggaaacccatctgatatccagtccagaaaaaactcccgtagatagcgagcttctggccaaaatggagcaaaaggagcaggaatacttacaattgcaggagcagttggccttcgccaaaacggaactggacaaaagaaataaactgctggagaggaatggggaacagctgactaaacagcagcagcaaaatcaggcagatcaaaagaaattggaagaactttcacaactgcgggagacattgcaacgtagggatgaggacctaaaggagctggaagagcaattaagcgccgttagacaggatctagatgagaagtccattcagatgaagatcagtcaggatcagcacaaactccagttggccaatctccaaaatcagttgcaagccgatcaggagaagctaagagaactgctccagctgcaggacaaactggagcagcaaaaggagctcatggaagtcgaccagaatcaacagattaccataatcaaaaaggagctggccgagacgaccaatcaattgagtgagtgccaggagaggctaaccgtcaaggaagcccagctggcggagatccaacagcagttgcaagaagttaacgaggaaagaacaaggttgcaggagcaactcctgaccaaggagcaagaatctggcttggactccgagctggcaaaacggaatcaggagcttgaggatcagctgctagccaaggagcagcaacttcagctaaaccaagctgaactggaaaaactacaagagacacttcgagttaacgaagagcagctccttgccaaggaggagcagcttcatgccaaggaatcccaactgcagtctctggaatcacaattgcagggtcagctagctgccgatgagagccagcaacttcagcagaccatcgatggcttgggacaggagaagaatgagctgatcaaggtactgcagcaaaagcaccaggagaacacccagtactatgcggaaatccagcgactgcagcccttcgagcagcaggtaaaggaattggtcaaggagcgcgagaagctgcaggatcaggtcggctttctcaaggagaagtccgacatactcaccacgaatctgctgacggaacagaccaaccagcgactcctgcagcaacagcaggcggagtcccaggagcagcaggccagcactttgcgggatctggaacgtttgcgggcccatctccttgagatcgaggagctgcacacgcaggaaactgtcgagctgcagcgcgatctggaggagtcgcgctcccgtcaagcgatcctcgagcagcaggtttccaaatccagtacggcgtacacatcggccaggtaggaaaatagaacagaacaatttacagctgagggaggggtcaccttggttgccattggctgatatattcgtcacaccagcgataagcgatcgaagctggctaattgcattcgccacatgttcccacacgattccaattccaatgacaattgccattccacccactccattccgccgccggcggaatcggaccatgcaaattgccgtccatatttccgcatgcctggcagttcgtcttatcgccagttggcaaatcaatttcgacctggtttggatatcgtcactgggtgctcttgcataagagtcctttgcctggtctgctggcaccagtttggactaactgcagttgctatttttggttggaaaaggggggactctgtatcaagtatcaattaattaatttcgaagcattagattttaaaaactagattactttattgagaactttctgctgggtgttattaaaataattacctaaattcaataaaaaaaaatataatggaattgggcttgggaaaagtgttgattgctagattgtagatgtgaaagtaagccatgcacttaaatgcatttatatagttattaagttacttttgcaaaaatgcaaaaacctagagaaccaaggaaatttgaaattacaatgagcatttcttcgaagtttcatcgtcattgagttaatcttttaattatccccctcagcattcgtgcgaatcagcaggcggagacgctccaggcgcagcacgctctgctccagcagcagcgtgatgagctattggccaaactgggccagtacgaggatcgggagctgaagcagcaggcggcgctgaccaatctgcagtgtgccctggagcagttccaaaatggtaagaggacgcacactatttatagcacatgacgatgatgactaatacgggttgtcgtttttagacaaggatcatgacatcgaaatggccacgcagaggattcgccgcgagatgcaggcccagttggaccgacagggtcagctccagctggagatgagcggcctgcagcagcagctggcggaggccaatcaaggattgcgagctgcagcccgactctcggatcaactggaggctggacagcagacgatcgccgtgttgcgtgatgaaggtaagtgccagcggagctgctgagctggtggttgtgccaaccaaccacgtgtagctccccaaaactgtatgcttacgcatcccgcgattcacttgactaacccaaaaacctattgaagcacctccgggattaccggcatgtttctaacccacggtgttgcaccccgatcgaaactatacacacgtaactacatattcccactaaatcacgcataaaactgggaaaatgcttagaaaatgttgaatattgcaaatcatttactttgggagcgagagagagagagtatgccagtgtgtttgctaaagaaaagtaatagtacttaatgttgagattgaaaagaaaaaaatagagaaaagtgtcacctcacacgattctcaaaggtaaatatcagctggtaattctgggagctaagcctaaatatgaaacactcggaatttcagttggtatcgacttttttgaattgcatttgatcaccataagcgcaacaaaacgaaaccaaacaccacaaaaaagaaaaaaacaatcaacatcaatttgcaaaaaaaaaaacacacagaaaagtaccacagaaatacaaaaaagaaggcaaatcaatagatcgcacctacggcacgtggcaaatgaaaatctgtattggctgttaactgctcacctcacctcacaggtaaaccaaactaacttgtccgcttttgcgtccgtccaaaatgtcttcttcgaaacggaagtactcaccgaaagtagtcatttttaataacccatcaatgttgcaaccgaaagtacactgaaaacaatcctaactaggcgccttttgatgttgtgaactaattagttagtactttgtgtagccctaagttcgagtatctgtgatttgtatctttggatctacatgttgttttaatgttagaaaatacaacgataattatatgtacactctatgctgtttgataatatatatttttagtatttttcatttaatccgaacacatgcatttttgaaaccgcactttaaagtagagtattgaaagctttaaccccttacgctgccccacacttctattactgaaacccacctatttgttgttgatcgctgcttcctttgaatgtatctttggcgcttattgttttatacccattttgattatttaatttaatattgcttgtgtacaagctatacgtatgagcgtttttttacacacacgacacatccagggacaagaaactctgtactctataaaccgtataaaccgtaaaccgtaccatccgttatccgtaattcgtaacccgtaatccgtaccaaaagtaaaaacaaaaaaaaaacaaagaaaaaaagtaacatgaatacaaaaaccagtaccaattgtatctgcagcattgaataatctcaatttgtaaatgtgagcggtttaagccatttgacgcactcactttgcaattggagattgctcgagactgcggcatatgccacattattatgtacacaccttatgtatagcctatatatatatttatatatatctaccgcctttatctactctgcatgtctgcataatgcgtataaataaatatatacatcatatatgtatctatccctatgcctctaaatatcgtttggatatgctgtctgatctgtttccgttgtcgtatgcccttgttctctctcctatttttttttagtttgttattttcattttcgttttcccttaaatttgcatttgagcgaaccaaataattgaccaaacccagccagctgagtgcagaatcaatcaccactgaccagtagattccagtcgagccatcggagcaaagcaatccgattgggcaataggaacccattgccgcgacgcactgaaggatcgtctgtacgaaggagcagcgtctgtacggttgagtattacatcaggtactggtgtgccttaaatccaacaaccagtacttatgtcatactacgccgtgcacggatcgcactaaccgcatgaccaacaaccaacgcgcgcgcttcacccaaacggatgtgcctcccttcgagttccactcacatgatcatgcctctaatttaaacgcccattcaactttcaattccggttactaatcctgcataatctttgctccttttctcatgcccagtggagagcctaaaggaggcgaatggccagctggagcagcggctcagcagcagcgagagcagccagacggacaagattgacaagagcttgatcaagagcctgctcattggctatgtggtcagtggtcatgcgggggataagcagcaggtgctgcgcatgatctcctctgtgctggactttaatgcccaggaggcggataaggtgggactcaataagcagcaaagcagctggctgggcgccattctcggtggcggttccgccacagcgtcggcagcaggtaagctaccatttcaatgtatacctcaaaatcgtatctgatatacgtatctattcatcaggatcttcgcgtggcaatgagaacctggtgcaggccttcgttcaattcctggagcaggagtcgcagccgcaggcgcaatcgcgacccacgttgctgagcatgacgggccagatggatggagtgacatccgccagtgccaccacttccacagctgccacgtcaggccatcttccgcaggcttcttcttcattttcaccggcgacaccagcagcaagtcagcaggatcctgcggctcctcgcacgccgcccgtgggtggctcaccacagctgctggccatgggctccaacgaatttgcgcccacacgcaactccagctcgatattgaaggacatcctcagcgactcctgattgttgtagaatagtcgcgtctttatgttgtcgtgtgttttttttattggataattttagcatattttaaacccacttgtaaacgtgcaatcgtgtcgcccgtattcggaaacatatgtcccgcatatatctcgctatatatatatatatttatatatatatttaactatatatatctccaaaactgtaaaatgtctgtatgtgtatatgtgcaacactagcaacttgtaaatatgtaatatgcaacttgaacatgtcgagggcagcagaaaatagtagaacccaatggttttggccagttttgcttgcctgtgacacgccttcacagcggccttgctaatgagtagccgccaaataataaaaataattaaataactaaacgaaccaattgtatttgcagttttcacttcgattgtaagccgttcttcccagctaaaaaatgaaatgcaacaatattcttttaagtacatacaatataagactgctgccttggtttatttttatttctacacatcgcgcttagtaggtttgcctataacatttcgataaactctttgaaatcgtttgctaaaacacacgtaggacacacgtaggatccacatacatttggttatggccatggatggctgctgtttgtatctcagcgttaacaacatttaaacatttctacacatcgtaaacaggactgctagacttctcataaatatcattcgctctttgagttcaattgtttttttttctcagtttcgtttttgttttataaaaatatacaattataaatataaatattcatatatatacatatatatcatttgtatatatatatatatatattatgcagtatgtacacttagaggtttcaaaaagacaagaaaaaaatgtacgtctttttagttttttttttcgctcaataaattagtagaaaatacttgtttgttgttaatataaaaatacaatagggtccataggtttcgatacacatacacgtttacattgcaat

SEQ ID NO: 17297 - DNA, 3885 bp, DROSOPHILA
atgaatccccttttccagaatgaagagcccaatgtggaggacagctggtgctgggagcccgatggaggtgacgagaagggcgccacaggcgccggatcgggcgattcggcgagcagagacaaggagtccggactcgtggacatcgcactgggcaacgacgatgtggtgcggctgaacaatcgcatcgcagagctggagcagctcaatgaacagctaaatgtctcgctggaggagctggactcgcagcatgagctggccatgcgggatgtgctcgagcacaagacgcagctggctggtcaggtggcgagtctcaaacaattacaggcggatcgcctggtggagcacgaattgtccaatgccaggcagcaaaagcagttggacgaactgcggcagacgtcttcagccgccaagaagcagcaagaggagctgcagcgaagggtggagcagcaggaggctgagctgatcgagatgcaagatctgctggacaaacgtcgccaggacactgccgagctcatcgaacgcgtacgcgtggcggaaacggagcgcgaacggctgctcaaggatctggaggagactcggcaagccaaggagaagaagacctcggagtcgtcatcgaacagctcctccacgggcaagcacagcgaggatgagttcatagttgtacgccaagcggatgccacgggctctggctctgcttccgggtcagatcgtgatccagatgccgacgtcacttcgccgccctcgaaggagaagctgcgcgatcgtctcgtctccctagaatcacaaatctccgagctgaccctcgccaatacccaactgcaggatgctcagctggaaaagcagctgagcatcaatatgctgggtgaacagctcgtcgaattggagaagcgcttgcgcctcagcgaggcggaaaaggagcagcttcaggtgaacttacagcttcgcctgcagcaactgaccgtgcagaatcaggagctgaaactccacgcggaggctgagcaggaaggtcacgcccagaatctggaggagcagctgggcgatctgcgcgaggataaccaacgtctgcgtcaggagctaaagaccagcatagcccaggccaagttccgacaggccattgccgaggagaaacaggagattacggatctggacgatgcggactcggagtacggcactttcgagctggataagctgcgtgctctgctccaggccgagatagaggatcgtttggacagctcgtttccgcagcagaagctggagcgagcctggaacgcattgaaggatcgctggcaccgcctcgacctggtcgagcagcgactggtggacgtacagaaccaacagttggtcagcgagcacgagaagaagaccctcgaggcggacatctcgcagtatattcttcagtgcgatgagctgatgaagaacaatgacctgctgctcaacgaactggacaaatacaagcgcaacaagctggaaaccattgaggagcatcacgaggagacgattgtgcagctggaggcccagttggaggaggccagacagaaattggaattggcttctctgtctagccaacagcagatggaaacccatctgatatccagtccagaaaaaactcccgtagatagcgagcttctggccaaaatggagcaaaaggagcaggaatacttacaattgcaggagcagttggccttcgccaaaacggaactggacaaaagaaataaactgctggagaggaatggggaacagctgactaaacagcagcagcaaaatcaggcagatcaaaagaaattggaagaactttcacaactgcgggagacattgcaacgtagggatgaggacctaaaggagctggaagagcaattaagcgccgttagacaggatctagatgagaagtccattcagatgaagatcagtcaggatcagcacaaactccagttggccaatctccaaaatcagttgcaagccgatcaggagaagctaagagaactgctccagctgcaggacaaactggagcagcaaaaggagctcatggaagtcgaccagaatcaacagattaccataatcaaaaaggagctggccgagacgaccaatcaattgagtgagtgccaggagaggctaaccgtcaaggaagcccagctggcggagatccaacagcagttgcaagaagttaacgaggaaagaacaaggttgcaggagcaactcctgaccaaggagcaagaatctggcttggactccgagctggcaaaacggaatcaggagcttgaggatcagctgctagccaaggagcagcaacttcagctaaaccaagctgaactggaaaaactacaagagacacttcgagttaacgaagagcagctccttgccaaggaggagcagcttcatgccaaggaatcccaactgcagtctctggaatcacaattgcagggtcagctagctgccgatgagagccagcaacttcagcagaccatcgatggcttgggacaggagaagaatgagctgatcaaggtactgcagcaaaagcaccaggagaacacccagtactatgcggaaatccagcgactgcagcccttcgagcagcaggtaaaggaattggtcaaggagcgcgagaagctgcaggatcaggtcggctttctcaaggagaagtccgacatactcaccacgaatctgctgacggaacagaccaaccagcgactcctgcagcaacagcaggcggagtcccaggagcagcaggccagcactttgcgggatctggaacgtttgcgggcccatctccttgagatcgaggagctgcacacgcaggaaactgtcgagctgcagcgcgatctggaggagtcgcgctcccgtcaagcgatcctcgagcagcaggtttccaaatccagtacggcgtacacatcggccagcattcgtgcgaatcagcaggcggagacgctccaggcgcagcacgctctgctccagcagcagcgtgatgagctattggccaaactgggccagtacgaggatcgggagctgaagcagcaggcggcgctgaccaatctgcagtgtgccctggagcagttccaaaatgacaaggatcatgacatcgaaatggccacgcagaggattcgccgcgagatgcaggcccagttggaccgacagggtcagctccagctggagatgagcggcctgcagcagcagctggcggaggccaatcaaggattgcgagctgcagcccgactctcggatcaactggaggctggacagcagacgatcgccgtgttgcgtgatgaagtggagagcctaaaggaggcgaatggccagctggagcagcggctcagcagcagcgagagcagccagacggacaagattgacaagagcttgatcaagagcctgctcattggctatgtggtcagtggtcatgcgggggataagcagcaggtgctgcgcatgatctcctctgtgctggactttaatgcccaggaggcggataaggtgggactcaataagcagcaaagcagctggctgggcgccattctcggtggcggttccgccacagcgtcggcagcaggatcttcgcgtggcaatgagaacctggtgcaggccttcgttcaattcctggagcaggagtcgcagccgcaggcgcaatcgcgacccacgttgctgagcatgacgggccagatggatggagtgacatccgccagtgccaccacttccacagctgccacgtcaggccatcttccgcaggcttcttcttcattttcaccggcgacaccagcagcaagtcagcaggatcctgcggctcctcgcacgccgcccgtgggtggctcaccacagctgctggccatgggctccaacgaatttgcgcccacacgcaactccagctcgatattgaaggacatcctcagcgactcctga

SEQ ID NO: 17298 - protein, 1294 aa, DROSOPHILA
MNPLFQNEEPNVEDSWCWEPDGGDEKGATGAGSGDSASRDKESGLVDIALGNDDVVRLNNRIAELEQLNEQLNVSLEELDSQHELAMRDVLEHKTQLAGQVASLKQLQADRLVEHELSNARQQKQLDELRQTSSAAKKQQEELQRRVEQQEAELIEMQDLLDKRRQDTAELIERVRVAETERERLLKDLEETRQAKEKKTSESSSNSSSTGKHSEDEFIVVRQADATGSGSASGSDRDPDADVTSPPSKEKLRDRLVSLESQISELTLANTQLQDAQLEKQLSINMLGEQLVELEKRLRLSEAEKEQLQVNLQLRLQQLTVQNQELKLHAEAEQEGHAQNLEEQLGDLREDNQRLRQELKTSIAQAKFRQAIAEEKQEITDLDDADSEYGTFELDKLRALLQAEIEDRLDSSFPQQKLERAWNALKDRWHRLDLVEQRLVDVQNQQLVSEHEKKTLEADISQYILQCDELMKNNDLLLNELDKYKRNKLETIEEHHEETIVQLEAQLEEARQKLELASLSSQQQMETHLISSPEKTPVDSELLAKMEQKEQEYLQLQEQLAFAKTELDKRNKLLERNGEQLTKQQQQNQADQKKLEELSQLRETLQRRDEDLKELEEQLSAVRQDLDEKSIQMKISQDQHKLQLANLQNQLQADQEKLRELLQLQDKLEQQKELMEVDQNQQITIIKKELAETTNQLSECQERLTVKEAQLAEIQQQLQEVNEERTRLQEQLLTKEQESGLDSELAKRNQELEDQLLAKEQQLQLNQAELEKLQETLRVNEEQLLAKEEQLHAKESQLQSLESQLQGQLAADESQQLQQTIDGLGQEKNELIKVLQQKHQENTQYYAEIQRLQPFEQQVKELVKEREKLQDQVGFLKEKSDILTTNLLTEQTNQRLLQQQQAESQEQQASTLRDLERLRAHLLEIEELHTQETVELQRDLEESRSRQAILEQQVSKSSTAYTSASIRANQQAETLQAQHALLQQQRDELLAKLGQYEDRELKQQAALTNLQCALEQFQNDKDHDIEMATQRIRREMQAQLDRQGQLQLEMSGLQQQLAEANQGLRAAARLSDQLEAGQQTIAVLRDEVESLKEANGQLEQRLSSSESSQTDKIDKSLIKSLLIGYVVSGHAGDKQQVLRMISSVLDFNAQEADKVGLNKQQSSWLGAILGGGSATASAAGSSRGNENLVQAFVQFLEQESQPQAQSRPTLLSMTGQMDGVTSASATTSTAATSGHLPQASSSFSPATPAASQQDPAAPRTPPVGGSPQLLAMGSNEFAPTRNSSSILKDILSDS

SEQ ID NO: 17299 - DNA, 2542 bp, DROSOPHILA
cgctaattgaggacttacagtcgaaactgtcgcggtatgatggcagtgtccatgggcactaccagttataatggggcctggtataaaaacagccgatgaaccggccattgaccaagagctctgcgagacgtgttcctgcacaaatacatcggtgaccatgcgattgcgatccaaataggtttgctggtacaaagattgctggtgcagcgactgcatggtcaccgagggcacttggtagatggggatgttcatgatcctgcctggcagttgggttctaaaactgaataaaaaaaaactggcgaaagcaaacaacagaaatgctcagaattcgtatctcgattttaaggttatcctatccaaatcacacgtgtggattgtcgagtcactgcggcaactacacggactggtgttggtatcccctgacgacgaagatttggctaaaagtaagaaccgtctgctccctagggtttcagaacagaaaaggagttttttcaaaacgtcgaccagagttgccaagcaatcgaaaaagctatcgtctttcaattctaatatcgctagcttttagtaggaccaaaggattggagttgagtgacaatatttttacagggtattcagataaaccatctcatggtttgacacagattatcggctctattattatatttgggcaaatcattgtgattggttggaattaaatgagataatgggatgtagcccgtgtttaaaaacttattaaataagtaaaattttgttaagcacagtggatattccacatgtttacttatattaccttattttgtttgtaagaacggaaacggaaaccccttttttgaattttgtggcttaacggcggcgataagtatcgtctatcgataacgacacagtgtgaccactcaacggcatagtgttgtaaagcgtctgcttgggtatcaactgattacattttacgcatttgttgcaaaattgagataattccacaaaaaaatgacagaggaagctgattttagcgagcaaatcaccgatgggaaaaacaaatcaaatgtgcgctgccagttttgcaactgtttgatgctgaaagcacaagagggcacctacaaccaggaggaggtaagtgccgaacggctaaacccttctgactgggcaagcaatccaattgtttacgtttctttgcgaccaggtggatgtgccactgatgacgcagaagcaggatcgaacggcggacagcctaaacagcgagccactgaaagacttctggctggtcaaggacatgatgacattcgagaacatcgggttctccaacacggtggacggcagaaagtttctggtttgcgcggactgcgagcgaggacctgtgggctaccatgatctgagcacccgccactgctatctggccctcaagagggtggtgcacaaggacacctagctgcagcgatgccaaacacgtgtgtccagtctcttgcaatccattttatcatgccacttatccgctaatctttaatgtatcagtttttcatgccacggaatagaagcgattttcatttgatttagttagggtgaagtaattgagtatttccttgaacatgcactatttgtacactaccatcctctagttatcagaagtatctatgcttttagtgaagattcgctgaacgaattcgctgaaaatccgtgaaatcgaaggcctagtttgtcgagtttagatttaagcgaaataaaacgttttaacgtgcctggttagcaaatgattgtgcaagcatttttaaattagtaattatttagttatttgttaaaactttcgttttaaaatctcagaaaacttagaaaacaccctggtcattaaaaacatcgctcttttgtattcatatttattgtttttcactttaaacattttacaattttattgcattacaaatattgcatttaagaggagattcttaactaaaaaattttttactataaactgttattttgctaaaagaactaaaaacaatgtatttgttgcttcggtttgtgtaacgttttaatgtatttctttgattctgcaatctgcaattatttgctactttggacaaaaaggtttcattaggtttcattaccctactggttatcccaatagtttggtatattcattttctcattgctgggatggtggtgcctatgcggtagatgaaacgacttcaaagttatcctttttggcagttggttacaacaacgagtgtttttccccttgggagtgcggagatgtgggctgggcgtggtcgtcgcccctaagcgtgtcacaactatcattttggattatccagggacgaccttcgacccaattgcttgctaattattctatgaagtgttcgcctcgttgagcattacgttaaaattgtttaattttttaatgttagctattgccgaaatttagttcgagtcttgtgttaaataaaaatagacaaactaaggcgaagagtgttaacatttattatgtactacttttattttgtgggtagccttaatttttaacatcgttagcttttgtggccatctttgactt

SEQ ID NO: 17300 - DNA, 472 bp, DROSOPHILA
attttagcgagcaaatcaccgatgggaaaaacaaatcaaatgtgcgctgccagttttgcaactgtttgatgctgaaagcacaagagggcacctacaaccaggaggaggtggatgtgccactgatgacgcagaagcaggatcgaacggcggacagcctaaacagcgagccactgaaagacttctggctggtcaaggacatgatgacattcgagaacatcgggttctccaacacggtggacggcagaaagtttctggtttgcgcggactgcgagcgaggacctgtgggctaccatgatctgagcacccgccactgctatctggccctcaagagggtggtgcacaaggacacctagctgcagcgatgccaaacacgtgtgtccagtctcttgcaatccattttatcatgccacttatccgctaatctttaatgtatcagtttttcatgccacggaatagaagcgattttcatttg

SEQ ID NO: 17301 - protein, 94 aa, DROSOPHILA
MLKAQEGTYNQEEVDVPLMTQKQDRTADSLNSEPLKDFWLVKDMMTFENIGFSNTVDGRKFLVCADCERGPVGYHDLSTRHCYLALKRVVHKDT

SEQ ID NO: 17302 - DNA, 2618 bp, DROSOPHILA
ttaaagccttaacagcgaacgcgggttactcaggacccctaaactaggcacttatcactgccttgaaacgtagcgcctggcaatgggtttggctctcattcagacacatttaagagggtttcataatcctaatacattttcgcttcaatatacgatcgcttaaattattttagaattcttattatgacaattggagcagtgtccaaagctagctacaaaatatcgaaggataataagcattttcctgcttgggtttttgtgaaaagcttgtattcaatggttggtagagttaggaaacatatgccaaaggctatatacatatagacttatctctatcggctgcgctggcttaatcagccgacgttgtttttgcgcttctgcaatgggggctccgttctagccggtgctatcagtagacaaacaaaagtgttcacttataaatatttataaaaacaaaatgataatgccaattaaaacgcagtaaaacaacaaatgttgcgggtacacaaatgcattagctggaatggatggatgtatgaagcttggattgcgacagtcactctgatcaatttaagcttaactgggaattttcgacaaagcccacaccacttggtggctaccttgttatcttatccttcgaaccagcgatgttcctgtacacaccatccaccagattaattatattcagttggtgctttataatgtcttgaacatcttgccggagtgcaacgtcgtacggctgtctgatgtcggtcgtattaatttccgtaaggtctggggacatctttcctcggcacacgacatagcttggctttccgcaaagccttaggttagctacttgagcggctttctccttgcaactactgtccgaggagcgaaacatctcagatttggatttactcatcgtgtttctctactgatttactacactgtatttaagtgagacgtttatttgacaactcagggagctagaactttgaattatacagaaaaacacgaaacactgttccagtcaactagtccggctatgagagcctcttttctgatcagtcgcaagcagccatggatggggcagctgctgctcatggcgagaaacaaagcccttacgctcctgctgaagctgtataggcggactcccatcttcagaccgcgacacctgccaggaaggaatcggactcagagcgttggacttgcccgggataatacgatcatgacctctgccaaaaatacgaacccttcctgtcgtatttcccatctcaccatgtttggcggactcgtgcatctggatgtgctaagtgaggacgactacgtctatgaggtcagtgacatggaaatcggagcggacggagaaattcttctggacatggacagtcggcggagacagggtaacttcgagctggctctaatggcgggcggccaactggacgtggactccgaggaagacgaagaattccacgaatgcgactgcgaaggatatgtgcggtgcgtggagtacggggagtgtgagggggggagcgatctagtgcggacgggtggacgaatggagtctttgaaaaaatctcagctgccttccgcgccaccaggttctttcacaaagcgaggcaacctccccatctaagccgtgaagtatggcaacgccgcaatgccgacaattggtactctcgtttggcgccaatactaacgacaacaatgtaaaacactagagcactctggcgagagggcacgtcaagtgcagagagagtccgaacccgagtcggaaaggggcgggggagccagggcggtcggagagtgtgcacaaaaacatttgccggctgcttagtttttttgccggcgcaaaaagtcgaatgcgagcgaacgctgaaagcttccactctccctccgcgatttagatttagattcagattcaaatttacattcacattcacgttcgcactcagattccgatttcgagttcgacctccccctctggcactacggtacctcatcagcgtcatcaccatcgcaaagtcacacacggcgtatacataatccaaataaaagcaaacatcaaatagttgttgctccggcaactggccattgttgttttaggtatctgtacatctcgcagggtcccacgtcgggacaatggaagagcacgcggcaaatgccccgtgtttttgttgcctccttgtggaactggctaagatattgccacggcgacagctctgtgcttttgtggcctatctggcgataaggtgccctttccgccccacccccttatgatatggtctaatcttatcgcgagcgaatagtgaactcacttcaccagtgcgaattctgttcgccttttggcaaagtagttagctcgaatattaggtcacacaaaaagccggtttctgttgtattcggctgtttttgttgttggctctgttatcttgtgtggggactgcatatgtgggtgagttttgttcgtgtgtgagctggcaagccggtttcgttcgctgttgttttttgtgactttgtcgactttggctatgtaaatttgtgccggcccgctccctgcgaagcatatgcccccagcgccaacagaaagagcaacaagagaaatagaacccaataaaaatgaaattggcaggcag

SEQ ID NO: 17303 - DNA, 618 bp, DROSOPHILA
acactgttccagtcaactagtccggctatgagagcctcttttctgatcagtcgcaagcagccatggatggggcagctgctgctcatggcgagaaacaaagcccttacgctcctgctgaagctgtataggcggactcccatcttcagaccgcgacacctgccaggaaggaatcggactcagagcgttggacttgcccgggataatacgatcatgacctctgccaaaaatacgaacccttcctgtcgtatttcccatctcaccatgtttggcggactcgtgcatctggatgtgctaagtgaggacgactacgtctatgaggtcagtgacatggaaatcggagcggacggagaaattcttctggacatggacagtcggcggagacagggtaacttcgagctggctctaatggcgggcggccaactggacgtggactccgaggaagacgaagaattccacgaatgcgactgcgaaggatatgtgcggtgcgtggagtacggggagtgtgagggggggagcgatctagtgcggacgggtggacgaatggagtctttgaaaaaatctcagctgccttccgcgccaccaggttctttcacaaagcgaggcaacctccccatctaa

SEQ ID NO: 17304 - protein, 183 aa, DROSOPHILA
MGQLLLMARNKALTLLLKLYRRTPIFRPRHLPGRNRTQSVGLARDNTIMTSAKNTNPSCRISHLTMFGGLVHLDVLSEDDYVYEVSDMEIGADGEILLDMDSRRRQGNFELALMAGGQLDVDSEEDEEFHECDCEGYVRCVEYGECEGGSDLVRTGGRMESLKKSQLPSAPPGSFTKRGNLPI

SEQ ID NO: 17305 - DNA, 3526 bp, DROSOPHILA
cacggaccaccaccaggattcgaacgcattctattggaacagtcacttctttagatagtccacacaaaagccttgaacaaattagcagcatgagaacaaagcattaacaagaataactaaaagacggtgcattttaggactttaggaacgcatttcattcaagtaatttttgtggcactttctctgccaatgcggacaactacctttaaaaaaaatgaaatacattattgtctagtaacactttatttatttaatgtaaaagttaagttacaagaatgacattttaaatatgcattctagattaagttttaaaatgcgaactttcagtataaaacaaattatttacacattttagttttagttttagttattcctttgccatatttcttctctagtcaaaaagaaaagttcccaagctgaattctatctcacaaccaaaacagctattaaattatttcaatttactttgtacacatatcttaatcgattttgttgattttcaccacatatttacttatagtcgtaaaatgcactgttctgttctcatttagacatcaggtgtataaactttgtaaactctctagtccttgcactatccaaaccgaaagtatttgtataattttattaatgttttgtaaattatttacgtagcttgacgtagcatttgtattatacacagagatacgcgtatctgcatacagatacagatgaatttttttgtaggactaggtggccacaattcaattctgacttcatcgtacacattccaatttacaacggcaacgtactcgagcacggaattacctaactaaatataagaatatatctgtatatctaataaattgtatctacacgtatccaacgcttcgaaaactgattaatccgcgcgcggacaataaatcaatgttatgtacttaatccgttgtgtagcaagttttccttgtttagattgtcaattcgatttgattttagaacattttggaaaactacattcccagagaaaggaaattaatggttaaaattaagatatgacacatgtccggaaagggggagatcatccagatccacattggccaggccggtgtgcagatagccaacgcctgttgggagctcttctgtctggagcacggcattttggccaatggaagactaacccagtcgcccatggacgactcgttcctcacgttctttgagttcaccagccatcagccgtgtgtgcaacctcgactcgtcatgatcgacacggagcccacagtgataggtaagtttccgccagaagcttggattgtgtcatataaattttttatcttcctttccagatgaaatccgtaccggctcctaccgcaacctctttcatccggatactttgatcacgggcaaggatgacagtggcagtaacttcgccaggggctacaatctgatggccagcgagctgttggatcgctccatgaacgccattcgtcgcgtggcggatcgttgcagaaatctcaggggtttcctggtctttcgagcaatcggcggaggttctggttccgggctagggactcgcatcatggagagactggtcgaagactttggcaagaagatgactgttgtggagttcctcgtttatccttcgccttcgtaaggtattggcttgggtatgttttctgctactcatgtgcacttttttttttttttgctcctagaatctctccggttattgtggaaccctacaacgcactgctggctgcccatttctccatggactgcgccgatgtatcgtttattgtggacaatgaagctctatacgacatatgtgctaatacactcaatgtccctgctcccacgtatacgaatctcaataggatcatcgcacaagtggtttccagctttacggcctcacagcgttttggtggcggatcgaccgtgagttttcaggagctgcagacgaacctggtgccatatccccgaatccactatccgctgatcaactacgcaccactggtacccatttcgcactcgcagttcgtcaatatgtcgacggcccagctaacgggtcagtgtttccagatgagcaaccaaatggtcagatgcaatccctcgcatggcaagtacatggccagtgtgctgctctaccgcggtgatatcgcacccaatgagatcaatacggcgctggagaacatcaagcggaacaggtctttccgttttgtcgactggtcgcccacgggctttaagatcggcgttagccccatgccgccgtactatgttcctggcggcgatctggcgcccaccaatcgcgcctgcgtggccatctcgaacaacacgaacatccggatcgcctggtgccgcctggtcaacaagttcgacaagctctatcagcggcgagccttcgtctatcactatgtgggcgaaggactcgaggagggcaacttcaacgaggcctccgagaacatttgccagctggtgcacgactatctggaggtggatgcatcggctcccacctcgcgacgcgactccgatccggaggaggactctctcaactaaagtgtgctctgtatctgaccctttcgtctgcatttttgaatcaacgaaattttaataaatttaacgtattgaatattttactaaagactaatgattgttaagtctcattaatatataacataaaatctagaaaaatcttatctgacaatctttagctaaatatctttggagagtatcttcgattcggtgtgcaaaggtatcccacagcccttttatatctttctctttcgaggctttcgtcagctcgaaaccgttgcccaaattaagtatttatggttggctaaaacaaacattgacccagcctgcaatttgcgttgcttgaccccagcgccagaggggaaaggggagggcgcggattatggagccgatgggcatgggcgtggccagtcgggccgatatggggtataattaaaatgatcgcagcccaggggcttagcacgtaccgaggcaaaagtcgcgcttatcgcgatcgcacccagggcaaggtcttaccaatccggcatcttcggatgatcttcatcccgggacggcggaactggtcccttaacccttaactttggtggccccaacgctgccagctgtgtgtgacgtgacttacgcacgcttagtgcgcgattatcgatgaagggatcttggccagcacgcagaccgctcacttggccatcttatcagcgggatggctaacttttgtggtgtggtccttgcgcaggatgaccgctgttattaagggcactatcatcatcatgagatcccggtgccttttcgccaattcctttgtgtgttaactgttgctaatcttaaattgaagtcgagcctctcgcttttgtttcacagcgtgagaaccgctgcgtgtggctttagatccaaactttttggattttcatatatattttttcagggggtgttaatgagcttaaggaaatgccagaaggaccaccatgggctgcacagttagtgtgaattaagctgttattccgttcgacatgggctaataaagcaa

SEQ ID NO: 17306 - DNA, 1403 bp, DROSOPHILA
aaaggaaattaatggttaaaattaagatatgacacatgtccggaaagggggagatcatccagatccacattggccaggccggtgtgcagatagccaacgcctgttgggagctcttctgtctggagcacggcattttggccaatggaagactaacccagtcgcccatggacgactcgttcctcacgttctttgagttcaccagccatcagccgtgtgtgcaacctcgactcgtcatgatcgacacggagcccacagtgatagatgaaatccgtaccggctcctaccgcaacctctttcatccggatactttgatcacgggcaaggatgacagtggcagtaacttcgccaggggctacaatctgatggccagcgagctgttggatcgctccatgaacgccattcgtcgcgtggcggatcgttgcagaaatctcaggggtttcctggtctttcgagcaatcggcggaggttctggttccgggctagggactcgcatcatggagagactggtcgaagactttggcaagaagatgactgttgtggagttcctcgtttatccttcgccttcaatctctccggttattgtggaaccctacaacgcactgctggctgcccatttctccatggactgcgccgatgtatcgtttattgtggacaatgaagctctatacgacatatgtgctaatacactcaatgtccctgctcccacgtatacgaatctcaataggatcatcgcacaagtggtttccagctttacggcctcacagcgttttggtggcggatcgaccgtgagttttcaggagctgcagacgaacctggtgccatatccccgaatccactatccgctgatcaactacgcaccactggtacccatttcgcactcgcagttcgtcaatatgtcgacggcccagctaacgggtcagtgtttccagatgagcaaccaaatggtcagatgcaatccctcgcatggcaagtacatggccagtgtgctgctctaccgcggtgatatcgcacccaatgagatcaatacggcgctggagaacatcaagcggaacaggtctttccgttttgtcgactggtcgcccacgggctttaagatcggcgttagccccatgccgccgtactatgttcctggcggcgatctggcgcccaccaatcgcgcctgcgtggccatctcgaacaacacgaacatccggatcgcctggtgccgcctggtcaacaagttcgacaagctctatcagcggcgagccttcgtctatcactatgtgggcgaaggactcgaggagggcaacttcaacgaggcctccgagaacatttgccagctggtgcacgactatctggaggtggatgcatcggctcccacctcgcgacgcgactccgatccggaggaggactctctcaactaa

SEQ ID NO: 17307 - protein, 455 aa, DROSOPHILA
MSGKGEIIQIHIGQAGVQIANACWELFCLEHGILANGRLTQSPMDDSFLTFFEFTSHQPCVQPRLVMIDTEPTVIDEIRTGSYRNLFHPDTLITGKDDSGSNFARGYNLMASELLDRSMNAIRRVADRCRNLRGFLVFRAIGGGSGSGLGTRIMERLVEDFGKKMTVVEFLVYPSPSISPVIVEPYNALLAAHFSMDCADVSFIVDNEALYDICANTLNVPAPTYTNLNRIIAQVVSSFTASQRFGGGSTVSFQELQTNLVPYPRIHYPLINYAPLVPISHSQFVNMSTAQLTGQCFQMSNQMVRCNPSHGKYMASVLLYRGDIAPNEINTALENIKRNRSFRFVDWSPTGFKIGVSPMPPYYVPGGDLAPTNRACVAISNNTNIRIAWCRLVNKFDKLYQRRAFVYHYVGEGLEEGNFNEASENICQLVHDYLEVDASAPTSRRDSDPEEDSLN

SEQ ID NO: 17308 - DNA, 4713 bp, DROSOPHILA
aaatctggatccgcgtcatggtttctacgactcggagatctggcacgccattaagaactccgcagcggccactctgctcgttcagcagttgggcggattggatggaaaagttgagacatgtggcaacaacctatccgccggtcaaaggcaacttctttgtttggccagggccctgctgaagaacgccaaggtggtggccatcgacgagggcacttcgaacttagacgacgaatctgatctgagcatacagcaggccttaagaaatgcattcaagagttgcacgctcctgttcatcgcacatcgcctgcgaggactgcacgccatggatcgtataatagtgctggatgatggacggatttgtgaggaaggcaatccccaaagcctggcctccgatagctcaactattttctacggcatgctattggcgcaggacattgatccaggggaatttatcagatcgaattagcactaagtaacgattatgaactacgaattgtatataagtcaattgttacacaattttatttattactttgtttaatttttatcatacttgtgttcctaactaacaattccattttgagtcacattcaaaattatgaaatttgatgagatctagcatcacttcgcaatttttatttaattgtacaaattcaaacttgattgacatactatttttgtagtgaatttaacaaagcagttgaatccgttcaatgtgtacaaaaaacaaaacgttatgttataaatactacattataaaatataagacctgtattaattacatgctgaataaatgttgcgaccaaagaacgggagttatggtattaatgaatctgatttaatgtcaattaacattaaagcatggatttgtcaaaatttgcctcaattcactgatttcgaaaattaatgaatctactcaacccacgcgtgtaaatgctaaataagtggcataaatcgtttaaatttcagttgataatctcaaccgtcaatactttttcacttagatttcatagttgaagagcttttcgcctggcctgcccatgatgtgatcaaactggttgggataatgtggcggcttggaaagcatgtcgttcacagagcgctcgtagagatcaatgtagtagaggaggttctcgtccgtgtacatctgtgataatcataaaatcaagattagtaatgcgccttgctgtttgtacacaagtagtaaatagttaattggtgatctggttaataggttatatatatgagattagtgcccgaatgagaccagtgtgattagtacattagttcattaaatggccaactcatactgataccttggattggatacattattccttgacctataaatgcagcagcgaatggcatttgaaaataaaaagttgtatagagtgtagcagatggttgcatggaatcaaaccaatacctgcagataacagcgcaccgtaaagatgatccggcgcagatcatggatagcctgataaatgtgatggtatgaggaattctcgcaccgcaaaataatggcacgcacgtctataaaatcatcctggcaatgctgatagaaatttggatactaaaatggtagctcaattaatgggcagctgtaggaacttaacatagataactgacatagttgcgagtgaactgcttcttaaagaagcgctccaagttttttagctccatgacacggtcactgaactcgtacagctgccgggtaacctcttttccgatcgcgctaaatggattcgtgtacgacctcacatctcgcggacgatccgactgtggagatgatttcggagttggagcgttaggaatctcttgagatggcaaagcctgttggttagcattccgctccacataatggtcatttggcttggctggcggcatctccagttgcatcgactccttttgcagtggttgatacgttccggttttcagataagtaccattggcatctacatggcgttgggtttcctccgaatcctctatcatggtgtacagatagtttagatttaatgcacatttcggtttgtaaagtgcagatgaagtgggttcttggccttttgaggctgcattattacgtatttggttattaggtgtactaaaggcactgggtccatgtccagtggtcattcccaggtacttctgtgccaagccgctgctatcgttgctatctataaaacttcttagagagatgctattgctttggttaatgggagccccatcttttccggaaaagctgttcttctgcttctgcagcagctcatccagatttacaaaggattttacaatcatctttacgatggacagggttgagatctgccaagaatcaaaggaagccataaagcccgacggcagctcatctttaatcttgttcaaagcatcgggagtattatacacgtagcccttcagtatgacccaggcattcacaatgcgcgtaaagacgaatatgaaatccttaacggcccaagcaatgccctgtgagtttatatttggcagcacgccatccggacgcagcagatcctgcttcaggcgggcgcacagtgtatcgatcttcttgaagcacggacgattgcgatgggcattggccagacgttcggctatctcactgccatgaagtgaaactctggtaatatcatggagacgctggtccagcagctttacctccgagttgcgcagctttttttgcactcggaaaccatcgcctgcgccgctttccaatgaactaatgctcgattcttcaggaacaacactgaaacgttttatttatttgttttaggtcttaatacgaaattactctattaatacacactatgaaaatattttgagaaagcttttatatttttctttaagaggatctagccttacctttctggtcttggcttcctagcctccgagcgcaattcttcagcatccaaatccacctgggtgcccacatcgcaactggtcttagccgtctgctgggtctgcgtttgagccgcacagaacgtctttttcggctgttcatgactgcagcttgcatggtactgtggcaaatagaagccgacggaggccgaagcacgagtagaatacatctgattatggccataggcgttcatcgtggctaaagggaggtaggtggtggtacgcaatgaatagtgaataaaaacaatagtagtaaacagaacgcacctgagcttgccgcatagtactgcatgcccggaaaaggcataaaggtcgctaattgaggacttacagtcgaaactgtcgcggtatgatggcagtgtccatgggcactaccagttataatggggcctggtataaaaacagccgatgaaccggccattgaccaagagctctgcgagacgtgttcctgcacaaatacatcggtgaccatgcgattgcgatccaaataggtttgctggtacaaagattgctggtgcagcgactgcatggtcaccgagggcacttggtagatggggatgttcatgatcctgcctggcagttgggttctaaaactgaataaaaaaaaactggcgaaagcaaacaacagaaatgctcagaattcgtatctcgattttaaggttatcctatccaaatcacacgtgtggattgtcgagtcactgcggcaactacacggactggtgttggtatcccctgacgacgaagatttggctaaaagtaagaaccgtctgctccctagggtttcagaacagaaaaggagttttttcaaaacgtcgaccagagttgccaagcaatcgaaaaagctatcgtctttcaattctaatatcgctagcttttagtaggaccaaaggattggagttgagtgacaatatttttacagggtattcagataaaccatctcatggtttgacacagattatcggctctattattatatttgggcaaatcattgtgattggttggaattaaatgagataatgggatgtagcccgtgtttaaaaacttattaaataagtaaaattttgttaagcacagtggatattccacatgtttacttatattaccttattttgtttgtaagaacggaaacggaaaccccttttttgaattttgtggcttaacggcggcgataagtatcgtctatcgataacgacacagtgtgaccactcaacggcatagtgttgtaaagcgtctgcttgggtatcaactgattacattttacgcatttgttgcaaaattgagataattccacaaaaaaatgacagaggaagctgattttagcgagcaaatcaccgatgggaaaaacaaatcaaatgtgcgctgccagttttgcaactgtttgatgctgaaagcacaagagggcacctacaaccaggaggaggtaagtgccgaacggctaaacccttctgactgggcaagcaatccaattgtttacgtttctttgcgaccaggtggatgtgccactgatgacgcagaagcaggatcgaacggcggacagcctaaacagcgagccactgaaagacttctggctggtcaaggacatgatgacattcgagaacatcgggttctccaacacggtggacggcagaaagtttctggtttgcgcggactgcgagcgaggacctgtgggctaccatgatctgagcacccgccactgctatctggccctcaagagggtggtgcacaaggacacctagctgcagcgatgccaaacacgtgtgtccagtctcttgcaatccattttatcatgccacttatccgctaatcttt

SEQ ID NO: 17309 - DNA, 2176 bp, DROSOPHILA
tttgaaaaaactccttttctgttctgaaaccctagggagcagacggttcttacttttagccaaatcttcgtcgtcaggggataccaacaccagtccgtgtagttgccgcagtgactcgacaatccacacgtgtgatttggataggataaccttaaaatcgagatacgaattctgagcatttctgttgtttgctttcgccagtttttttttattcagttttagaacccaactgccaggcaggatcatgaacatccccatctaccaagtgccctcggtgaccatgcagtcgctgcaccagcaatctttgtaccagcaaacctatttggatcgcaatcgcatggtcaccgatgtatttgtgcaggaacacgtctcgcagagctcttggtcaatggccggttcatcggctgtttttataccaggccccattataactggtagtgcccatggacactgccatcataccgcgacagtttcgactgtaagtcctcaattagcgacctttatgccttttccgggcatgcagtactatgcggcaagctcagccacgatgaacgcctatggccataatcagatgtattctactcgtgcttcggcctccgtcggcttctatttgccacagtaccatgcaagctgcagtcatgaacagccgaaaaagacgttctgtgcggctcaaacgcagacccagcagacggctaagaccagttgcgatgtgggcacccaggtggatttggatgctgaagaattgcgctcggaggctaggaagccaagaccagaaagtgttgttcctgaagaatcgagcattagttcattggaaagcggcgcaggcgatggtttccgagtgcaaaaaaagctgcgcaactcggaggtaaagctgctggaccagcgtctccatgatattaccagagtttcacttcatggcagtgagatagccgaacgtctggccaatgcccatcgcaatcgtccgtgcttcaagaagatcgatacactgtgcgcccgcctgaagcaggatctgctgcgtccggatggcgtgctgccaaatataaactcacagggcattgcttgggccgttaaggatttcatattcgtctttacgcgcattgtgaatgcctgggtcatactgaagggctacgtgtataatactcccgatgctttgaacaagattaaagatgagctgccgtcgggctttatggcttcctttgattcttggcagatctcaaccctgtccatcgtaaagatgattgtaaaatcctttgtaaatctggatgagctgctgcagaagcagaagaacagcttttccggaaaagatggggctcccattaaccaaagcaatagcatctctctaagaagttttatagatagcaacgatagcagcggcttggcacagaagtacctgggaatgaccactggacatggacccagtgcctttagtacacctaataaccaaatacgtaataatgcagcctcaaaaggccaagaacccacttcatctgcactttacaaaccgaaatgtgcattaaatctaaactatctgtacaccatgatagaggattcggaggaaacccaacgccatgtagatgccaatggtacttatctgaaaaccggaacgtatcaaccactgcaaaaggagtcgatgcaactggagatgccgccagccaagccaaatgaccattatgtggagcggaatgctaaccaacaggctttgccatctcaagagattcctaacgctccaactccgaaatcatctccacagtcggatcgtccgcgagatgtgaggtcgtacacgaatccatttagcgcgatcggaaaagaggttacccggcagctgtacgagttcagtgaccgtgtcatggagctaaaaaacttggagcgcttctttaagaagcagttcactcgcaactatcattgccaggatgattttatagacgtgcgtgccattattttgcggtgcgagaattcctcataccatcacatttatcaggctatccatgatctgcgccggatcatctttacggtgcgctgttatctgcagatgtacacggacgagaacctcctctactacattgatctctacgagcgctctgtgaacgacatgctttccaagccgccacattatcccaaccagtttgatcacatcatgggcaggccaggcgaaaagctcttcaactatgaaatctaa

SEQ ID NO: 17310 - protein, 643 aa, DROSOPHILA
MNIPIYQVPSVTMQSLHQQSLYQQTYLDRNRMVTDVFVQEHVSQSSWSMAGSSAVFIPGPIITGSAHGHCHHTATVSTVSPQLATFMPFPGMQYYAASSATMNAYGHNQMYSTRASASVGFYLPQYHASCSHEQPKKTFCAAQTQTQQTAKTSCDVGTQVDLDAEELRSEARKPRPESVVPEESSISSLESGAGDGFRVQKKLRNSEVKLLDQRLHDITRVSLHGSEIAERLANAHRNRPCFKKIDTLCARLKQDLLRPDGVLPNINSQGIAWAVKDFIFVFTRIVNAWVILKGYVYNTPDALNKIKDELPSGFMASFDSWQISTLSIVKMIVKSFVNLDELLQKQKNSFSGKDGAPINQSNSISLRSFIDSNDSSGLAQKYLGMTTGHGPSAFSTPNNQIRNNAASKGQEPTSSALYKPKCALNLNYLYTMIEDSEETQRHVDANGTYLKTGTYQPLQKESMQLEMPPAKPNDHYVERNANQQALPSQEIPNAPTPKSSPQSDRPRDVRSYTNPFSAIGKEVTRQLYEFSDRVMELKNLERFFKKQFTRNYHCQDDFIDVRAIILRCENSSYHHIYQAIHDLRRIIFTVRCYLQMYTDENLLYYIDLYERSVNDMLSKPPHYPNQFDHIMGRPGEKLFNYEI

SEQ ID NO: 17311 - DNA, 2447 bp, DROSOPHILA
tctgtgctatacgtgcattgtggcctacgcctcggcggtggctcctccgggaacatcggccaccgttcaaggattgatggccggcatggacgatggacttggcttctccatcggatccctaatcggcggacttatgttcaaaagcctgggcggacgagagagcttcaaatactttgccatagccgccatttgcacatgcgtagcacacatcgttatacgtcccacatccaggaagaggcaattcctgccgagacagggatatgtgccgccaacggaacaggagatcaagcagccgcccgctcaggaaatggaggagattcgtttgggataaacatagtatcaacacatgccatttttattgcatatttttgtactaattttttacgttaaacaaaaacaaagaaagaacgacaagttgtccaaaagttgaatgactttgctctctcggggtttttgttcgattgttggcgcacacgcgatctcaagtgctccggcccctccagctgtcaacatggttatataatacctgagcatcgcacaaaagaacccattgaaagtgaatctggggccaggcagatgcctcgcttaaatggcgagcgattcccactccatatattaacgaaactggcccgatcggcctgtttcaatgatcgagaattgaaagtctgacactcatctgcatgtttgggatttaagttaagttagagaattgtagttttagttctacaccctaaaataaccatatatctactgatttctcagagcaatagcctttccgaaatagctccaacaaaataaaagaattggagatggttatgacttccaatctttgtcgcctagtgttgataatttatgctcgagtgtgggccacacttcagagctgtccaaatgagtgcttgtaaaaattagattgggccaagttgtgctccgaatctcgcagcaaactggatggctatataagccacgagttaccattagaagcctgcattgtttctggaagatgtggcccatttggctgctggtgctcttaacgctatcactggccactggccgccaggtgggcagatgcagtttggcccggcagctgtatcgatacggaatggcttacaacgagctacccgattggctgtgcctcgtggagggcgagagctcgttcaacacaaaagccatcaatccctcgaacgttgatggatccgtggactggggtctcttccagatcaacgatcgttactggtgcaagccggcggatggtcgtccatccaacgatctgtgtcgcttgccctgccgcctgctgttgagcgacgatatccggtattccattgcctgtgcgaagtacatcaggaaacagcaaggattctccgcctgggtggcttggaacaatcgatgtcagggtgtcaagcccaatgtgaatcactgcttccggcggcgacacagaaattcgggttgagcatcggtaaaaagctaaaaaaaatacgaaacttaagaacctaaatgcagaataaaatattataatattaaagagcaatatattttatgagtatgagcattaaaagagcgaacaattgtggtgcgatatatcatctggtaaacaagaatagaaaaaactggtctatacctttttaccttcaatttatattcaaaactaaccgccaagctaataaaattaaatataatgtaaaatgtaagtcaacatgtagaaaacatgtccaaagggatgtagctaaacacgttatcttaccgatgacatttttgaatttcggctcggaaccagttcgattggcagagctagttgctcccctccctgggtcaaatcgatagccaggcgactgatagttgtcgctgcgttttatcgcttaagtaaaacagctgtgggaaaagcgcgcttggccaaaagcaaagtggcggttgaataatttgtttctcgaccaacgagcgcacggatgcgtgcagactgacgggtaataaagtgcagttaaatactaaattcaaagtactaaatactgctaaagaaaaccaaaaatagcgaagcagtagataaaaatacaaaaagtgaagttgacattgaagtcgcttcgtatgtgtgtgtgtgtgagtgcttaaaacttgtgctggtgtgcgaaattcttttgtgctccgttttgttgtgcattaaataatctcgatataagctgaaaaccgagtttcaaatgcaaacggcacgcttcgtgttcgaatagttgttttgtaaaaaatcaataaagcgccgtaattgtcgccgttctgtagttgttgttgctgctgcttgctgcgacaggagtttccgccaacaactcgcgtcgttctcgctctcaccaacagctctctctctctctctttccccacgcggcgttgcttatcttatttgctcacacttatttcttgttttactatatctcatgttggattcgcatttgttagatacttctaat

SEQ ID NO: 17312 - DNA, 447 bp, DROSOPHILA
atgtggcccatttggctgctggtgctcttaacgctatcactggccactggccgccaggtgggcagatgcagtttggcccggcagctgtatcgatacggaatggcttacaacgagctacccgattggctgtgcctcgtggagggcgagagctcgttcaacacaaaagccatcaatccctcgaacgttgatggatccgtggactggggtctcttccagatcaacgatcgttactggtgcaagccggcggatggtcgtccatccaacgatctgtgtcgcttgccctgccgcctgctgttgagcgacgatatccggtattccattgcctgtgcgaagtacatcaggaaacagcaaggattctccgcctgggtggcttggaacaatcgatgtcagggtgtcaagcccaatgtgaatcactgcttccggcggcgacacagaaattcgggttga

SEQ ID NO: 17313 - protein, 148 aa, DROSOPHILA
MWPIWLLVLLTLSLATGRQVGRCSLARQLYRYGMAYNELPDWLCLVEGESSFNTKAINPSNVDGSVDWGLFQINDRYWCKPADGRPSNDLCRLPCRLLLSDDIRYSIACAKYIRKQQGFSAWVAWNNRCQGVKPNVNHCFRRRHRNSG

SEQ ID NO: 17314 - DNA, 4213 bp, DROSOPHILA
tgaagctcctgctcattccgccatccaccgtggccttcaaatactccgctgctgagtccgctggcctatagtaggcatagtacccgtctatatcctcattttgagtcgaggataccagggaccaatggagcaccacggccgactcggaaagcgtctccacctcgcgtagttccggcactggcagattcgacttggacgttccattctgcaggaagaacttgagggaggtgttgccctccttgttgtcgttattggagtacaccgccacgatccggaagcggtagtacttgccggcggtcagtcccgtaacggaggaggtgaagttcttgggcggattgcccatttcatactccctgtcccggttccgcgcccgccagtgactgttcccctggccaggcccggatccgtgcgcgtttccgtacgggatattgtcgctggtcgtctgccagttcttcctccgattttttccgtcgcccaacatgcgatactgcaccttgaaaaaggtgatctggagtccagagttttgtggcacactccagcgcagcatcacggactcgtccgacagacgggtgacattgggtcgtgacggaggcaccatgctcgctgtaacaagcgtttttattaggtttattttaattaattgtcttgatgttattatttacaattctgaacatttgaatatctggcgttgccagaccagatcatcgatgtacattttcatataaaatcgatgataaggaataagatcggataattgctattcagaaagctcatgaacactaagcaactgacggaacaataaatttatagatacaaaaatgtaaattgttaaaaatgctgcagaagttaacttgttaaaattaaacgtgtaaaagaccaacattatcgatagattagtgatgcagaatttagagtacacatgatatcgattggtatcgacactacggcatcgataccaactctcgcatatcgtaagtgtttaccagctctgatattcgagtgaaaatgtgtgcgtgtaagcgatttatttattgagcggcgactctcgggcgtccaaaaacttttttatttctttatgtaaaccaacgcgagccaagtcaagtgcaatatagaattggtggctgcatgtcgggtgcaaggggtaccaagacggtgactgacgcacactaacacacgggcgcgcgcgctgctgcgtctgtgtgtgcgtgtgtgtgtgccagccactactgtgtgtgtataagtgtatacagcgaagaagaagcaaggactcaaactcaagtgaaaaactcaaaacaaactcaaatgtcggcgcagggtgaagggggcggtgctggcggaagcggcggcggtggtgctggttcggatggaggcggcaatgctggccaaagctccacggggagtggcacagtggcggtcaccaacggaggcaactcgtccgccaaaaaccagctgccgctcaccccgcgcttcaccgccgaggaaaaggaggtcctgtacaccctgttccatttgcacgaggaggtcatcgatatcaagcatcgcaagaagcagcgcaacaagtactccgtccgagaaacatgggacaagatcgtcaaggacttcaactcgcacccgcatgtgagcgccatgcggaatatcaagcagatccagaaattctggctaaactccaggtgcgaaatagtgtttatgtggttggaaaatgttgctagagtggtccaggttccacaattcccacctcagcaaaatctagcttttaactccctatcttgttatttgtgattttctgtttagactccgcaaacagtatccgtacagggatggcagctcctcaaatctcagctctggtagcgccaaaatcagctccgtatccgtgtccgttgcgtcggcggtgccacaacagcagcagcaacagcatcaccagcagcatgacagcgttaaggtggaacccgagtaccagattagtcccgatgcctccgagcacaatccacaggcggacacattcgacgagatcgagatggatgccaacgatgtgagcgagattgacgaggacccaatggagcagcagcagcaacagcagcaggaggctcaggcccaagcccaagcccaagcccaagctcaggcccaagtgcaatccgccgccgccgagatgcagaagatgcaacaggtgaacgcggtggctgcggcggcggcggccaatgccaccatgatcaacacccaccagataaacgtggaccagatcagtgctgagaagctgactctgaatgatctgctgcacttcaagacagctcgcccccgcgaggagatcatattgattaagcacccagaggctaccggtgagattgtacacccttcttaaagatccccttcaaagtctaaattcttccttttcgtttagccacccagatccacaccatacccacccaggcgcagcagcatccaatggccacaattaccgccggcggctacaatcagcagatcattagtgagatcaagccgcagcaaatcactttggcccagtaccaggctcagcagcaacagcaggctcaagcgcaggcccaggcccaagcgcaggctcaagcgcaagctcaggcacaagcccaggcccaagcacaggcgcaacagcttgcccagcagcaacttgctgccgctcaacatcagcaactagccgccgccgtccaagtgcatcaccagcagcagcagcaacaacaggcggccgttgccgtccaacagcaacaggcagcagcggcggcggcggttaagatgcaactaaccgccgccacgcccacgtttaccttcagcgccctgcccacagttacggctgcaacgacagtgcccgcggcggttccagtgcctgtggccactgcatcatcgggatctgcgaactcagtggcggtcaacacatcaacagcctcctccgtgagtatcaacaacaccagcctgggcggaggagggggtaatggagccactaatgcgtctgctaccgctgcggacagcttcgaagagcgaatgaactacttcaaaatccgcgaggctgaactgcgctgcaaggagcagcagctggccacagaagccaagcgcattgaactcaacaaggcgcaggatgaactcaagtacatgaaggaggtgcatcgacttcgagtcgaggagctgacaatgaagatacgcatcctgcaaaaagaggaggaacaactgcggaagtgctccacttcatgaggtctggaggacataagcgacgccgacggtgacgatgatgaggaggatgcggatgcctatttggatcgcttcaaccatgggggcttttaattcgttagttttaggtatacaactaccatcaacctatccctatcccaattccactttccacacacatttttttgtttaggttttttttctagttgtcgcggggcgggggacagcggtgcgactttagtccatcgctggccaggattaccgactaagccatcataaattgtaaatcgcaatcaatcaattatacagacacgcaattatactgtgggcgtggccagctaatccacgatgaaaacttaggcaagttaaaacgtgacttttttttatgaatttcaaccgaatcgaatcgaacactgattgacgaatatttccaactgattcgaatgcattcacaacttctgctgtttggttaagatttccactcacccttaaactttcgtctgccgctcttgtttttggagcctccagatgttgacgaggtgcccattccagtgttggattcatgaactggccacacgggaacttcgccaagtggttcgtcatcctcgccggtgatttccaggggattcacgcgcaatatgtttccctcgctcgtctgcagggtgtgggaaaagttgattagaactgcgtatcccatgagaacactactccaagcttacctctcccaaaatgttctttgcaaagcactgaaccacgccagcgtgacgcttttgaactcgcttcagctgcaggctccggttatccaccacagcctccggatctttggtggcatcctcaccgtttatgagccaataaatatcgggttggggattccccgaggcggagcaatccagcagcaaaggattgctctcattcgtcagagtggcggccggtcctcttaagatcgtgggccgctgcaaaacactcaacttgatggtgtgatcgatcggtggtgcaataccattgtccagcatgcagatatagg

SEQ ID NO: 17315 - DNA, 2030 bp, DROSOPHILA
tgaaaatgtgtgcgtgtaagcgatttatttattgagcggcgactctcgggcgtccaaaaacttttttatttctttatgtaaaccaacgcgagccaagtcaagtgcaatatagaattggtggctgcatgtcgggtgcaaggggtaccaagacggtgactgacgcacactaacacacgggcgcgcgcgctgctgcgtctgtgtgtgcgtgtgtgtgtgccagccactactgtgtgtgtataagtgtatacagcgaagaagaagcaaggactcaaactcaagtgaaaaactcaaaacaaactcaaatgtcggcgcagggtgaagggggcggtgctggcggaagcggcggcggtggtgctggttcggatggaggcggcaatgctggccaaagctccacggggagtggcacagtggcggtcaccaacggaggcaactcgtccgccaaaaaccagctgccgctcaccccgcgcttcaccgccgaggaaaaggaggtcctgtacaccctgttccatttgcacgaggaggtcatcgatatcaagcatcgcaagaagcagcgcaacaagtactccgtccgagaaacatgggacaagatcgtcaaggacttcaactcgcacccgcatgtgagcgccatgcggaatatcaagcagatccagaaattctggctaaactccagactccgcaaacagtatccgtacagggatggcagctcctcaaatctcagctctggtagcgccaaaatcagctccgtatccgtgtccgttgcgtcggcggtgccacaacagcagcagcaacagcatcaccagcagcatgacagcgttaaggtggaacccgagtaccagattagtcccgatgcctccgagcacaatccacaggcggacacattcgacgagatcgagatggatgccaacgatgtgagcgagattgacgaggacccaatggagcagcagcagcaacagcagcaggaggctcaggcccaagcccaagcccaagcccaagctcaggcccaagtgcaatccgccgccgccgagatgcagaagatgcaacaggtgaacgcggtggctgcggcggcggcggccaatgccaccatgatcaacacccaccagataaacgtggaccagatcagtgctgagaagctgactctgaatgatctgctgcacttcaagacagctcgcccccgcgaggagatcatattgattaagcacccagaggctaccgccacccagatccacaccatacccacccaggcgcagcagcatccaatggccacaattaccgccggcggctacaatcagcagatcattagtgagatcaagccgcagcaaatcactttggcccagtaccaggctcagcagcaacagcaggctcaagcgcaggcccaggcccaagcgcaggctcaagcgcaagctcaggcacaagcccaggcccaagcacaggcgcaacagcttgcccagcagcaacttgctgccgctcaacatcagcaactagccgccgccgtccaagtgcatcaccagcagcagcagcaacaacaggcggccgttgccgtccaacagcaacaggcagcagcggcggcggcggttaagatgcaactaaccgccgccacgcccacgtttaccttcagcgccctgcccacagttacggctgcaacgacagtgcccgcggcggttccagtgcctgtggccactgcatcatcgggatctgcgaactcagtggcggtcaacacatcaacagcctcctccgtgagtatcaacaacaccagcctgggcggaggagggggtaatggagccactaatgcgtctgctaccgctgcggacagcttcgaagagcgaatgaactacttcaaaatccgcgaggctgaactgcgctgcaaggagcagcagctggccacagaagccaagcgcattgaactcaacaaggcgcaggatgaactcaagtacatgaaggaggtgcatcgacttcgagtcgaggagctgacaatgaagatacgcatcctgcaaaaagaggaggaacaactgcggaagtgctccacttcatga

SEQ ID NO: 17316 - protein, 575 aa, DROSOPHILA
MSAQGEGGGAGGSGGGGAGSDGGGNAGQSSTGSGTVAVTNGGNSSAKNQLPLTPRFTAEEKEVLYTLFHLHEEVIDIKHRKKQRNKYSVRETWDKIVKDFNSHPHVSAMRNIKQIQKFWLNSRLRKQYPYRDGSSSNLSSGSAKISSVSVSVASAVPQQQQQQHHQQHDSVKVEPEYQISPDASEHNPQADTFDEIEMDANDVSEIDEDPMEQQQQQQQEAQAQAQAQAQAQAQVQSAAAEMQKMQQVNAVAAAAAANATMINTHQINVDQISAEKLTLNDLLHFKTARPREEIILIKHPEATATQIHTIPTQAQQHPMATITAGGYNQQIISEIKPQQITLAQYQAQQQQQAQAQAQAQAQAQAQAQAQAQAQAQAQQLAQQQLAAAQHQQLAAAVQVHHQQQQQQQAAVAVQQQQAAAAAAVKMQLTAATPTFTFSALPTVTAATTVPAAVPVPVATASSGSANSVAVNTSTASSVSINNTSLGGGGGNGATNASATAADSFEERMNYFKIREAELRCKEQQLATEAKRIELNKAQDELKYMKEVHRLRVEELTMKIRILQKEEEQLRKCSTS

SEQ ID NO: 17317 - DNA, 4793 bp, DROSOPHILA
tatctttaaactgaatcacgaactgaaatcgtttttggcttgcaacgaagcggcgaatgtagctaatacagcgttagcttcctgcctttcactttgctccttggaaatggaatacgtttggcgcgttcgctcgtcaaaactcaactgaaacttgttattatgcactgtcactagtttccaatattcgagaatagtttttcgctgtgattttatgggactcaggcacgtacacgaagccaccgagtgctgatcggaccgatattgcttatgcgagcgacggagattctgttcccaagtgtttgatcaagaccaagcttatcagtttgttttcgaacggcaaagacaaagaaaatgcgttatgccgattttcaaaagcagtttcaggctgttttcagcgaacgcgcagcgaagctcgaatgcaaactgcaactgcaactgccaaacatcgacagaagttgcagggtcagctgtcagagtttacctctgctcaacgcacaatctattcgaatccaaaacgttcatccatcaggaggcagctagcgatatttttagtccggtcataactaaatgcgttaatttcaattaaggcatgagcgtctcagacgcaaacgcagcggcatcgtgcgaaaatagctcaaatggctcacacgccggcatcttgaatctggaggccccttaaattgctcaacgagtgctttatggtcgcattagtgccattcataatctcgggacacgggaggcgccaacgagcttaacaagcggacaatacatgtcctccaccgcccctggatttcactataagccgaaggactacactcgaaaaattaagagcaaatctacttttaattagcaagcactcgattaatgggtgttcacgactaaagagaactgaaggtccgggttcttatatttttctttgctattaaagttttgaattaggataactggcttgaaccttaagctaattaggatgaaagggtatgataaccacttttttctctcagtgcacgcatgtgtgacccacctgtgtccaaatgtatatgggattcgttgtgggacggtagacctccagcttgggcttgccatcctcggttatctggcgcacgaagggcaccgcatgacggatgttctcgccgcgtttgttgtccatctcgtccatctcgtagagtcgccggctgaggaaggagaagagaaggttgcaaaactgcgtgtcagtcgattgtattggaagatggcctttgctaacagtctattaaagtgtggcccattgcgaaggcgcgtgtacggcggatttgcccgagccggagatactatgagatcgctcaaaatagtcggagcaacgtcaggggtgcccaatttgtatgccacttggattaaatgaatcaacgaaagtgcgtaaatagtttgaaatagcaatcttaggcatgcgagaagctaactattcaattacttagattgctcatcgtttactacgggcatatttggagtggcttacttttcaatcataactacatacaagcatataaagttaaatatgcaaaaacaaataaacaaaattagagttatgtgattaatgtgcctaatctgatggtttcaaaacgattttgttaaacgaattcgattgaaaaacaacaaagagctaatcgcattttgtcatctttcttggtattgagtgacacctttttcgctgaacttatcagttctaagaaatatttgattaatgcctgctttatctcatcgttctaaaattgcccataaggtgatatccaagttcgtacaaggctaacaaaatattcactttcttaattggctttagcaatacatgtatgtggttaccgtgcgctttattgcattcatggtaatttcctacaattttacctatactacaaagtccggagacagaagagcgtgttgcagataacccctggctatgaactttcgcgggttttcacccaatttgtttgctatatttgattatttttcttcatcaagaagacactcacctcttgcgggaatctgtgctgatggaacgctgctgttggaagtgctgacgggatgtgagaaagtcctcgtcgctctcgctttccagatccttaagatcgatgatcaccggcttggtaatgtccttgggtcgatggatcaggcgtttgtgctcggcatcttcgccctcctcgtcactgtcggtactcgatccctggaggactttgtcgagcttgaatgtgacacgtggatccaaactctggtgcttgcgaccctggaactcccgccgtgtcttgtggaactcctcttccgatgacgattccttcagtagatcctgcaggaagcgtgtgcccttaacgtccagggatacgtgcttcttggcctgaaactgccggcgattgtcgttggccaaaatgtgcttcaggtccttcaagatgcccttgtgatcgacgctggttgccttctgttgctggaaaccagttcgcttctcctcgaaactgtcctcgtcgctgctctccgctgctttgttactgttggtattgctgtttccggtatcccgtcgctcgaaggacacgcgtgatcctttcaagctctgcttgctgcgctgcagctcgtcaccctgggcacctctctgctggcgatcgcgatgctcacgtatctccaatgatgtgggcggcggtggcaagggagtcaactccaaactaccgctggcgcgcaggggagtcctctgttgctgctgtgtaggtggctcgttgatgtcgtcgtcctccaaaagcgggcgaaacgatagcggtggctcgtcctccagcaaacgctgtgtccttactgtattttgtggatgcctttggggtgacacttgggggaataggaacggatcctctggcagaattgtgtccaaactggtcgctgtgttcgatgtggacaaattgctctccacacgatgatagcccagctcgtcctgtggattggattcgattcgaatcgaaagacagtcgcgaattaattaaatcgaatcataagcatggcataactaagaagcctccccatctctacatcaaaataaaaccgctccaaaccgcccgaaatctttgcgattaagtcgcggtatttgttcttgaacaccaatctcaaaggttggaagaggtccagcattatcggacatgtgcgtacttgatgctgctctttgaaatgttgtttttggatccttctggtgtctttaattgccctatactcatagcgaattaagtggctcatataatattttatttacaaattttatagatagtttttattcaagtttttaataggctaattttcagtttacgaactgttagctacaatttgttgctgagtaattaaatatttaatgatttcaaagtttgcttaaagaataagattaactgtttctgatgtaaataatctcaatctgtagattaagtataaaaaaatctaagaatgcccaactatctatgtatctattgaagtggatgtgggcttttcaggctggtcgactaccccaatattgttttcgatgagatacttacacctactcgggttagtttttccttgagcttgcccatggcgttgctcagcggttgatgaccgccgcctccgccgccggctcctctgttgtcgcgtccactcatcttatcagctcaatagcttgctaggtgaacttgaacttgaaggttttcctcgggaagtttgtttttgccacaaattttcacttgttttgtttttgcctttcaatcgacaacataaacaatgtcttttactctgcgttgatttgattttttgtctttgctgtaagaaaagagaagatttcagatcgttagaaaattatacaaagctatttgaatatatgtttgcatttcactttgtaatcaaatatgcatttatcagcagttctaatttgtctgatgtctggcacagttgtattgctttcataatattgtccgatagtaattgactactgatatagtggaaaaatctagagtattattatgcattaattgaaatggcctgatgtctgaaaaaagggggcaaatcgcaacgattttgttcaaaaatagtttggtactcgattatttatagataaatgcacctatatcagcgatttttgcctgtttcaaatcgtctgatgtctgcgctattatcgctaagaatttatgggttgggttttagataacgctcgagccccctgagcacccaaacacgcccactttctgttgccggttgtccttgatattcacatgtgaccaactttgtagccacagtggaggcactgtttttcatgcatagttgtttttatttacttttaacgcaaacttgtgtgagcggctgtttttcacggcaacgtggaatttatttatgatcttttatatttggcatgcggcagttggctaaaaaatatacattcgaaatgtatttcaaaaaatttccacccacttttccttgtgcatatatttgctgattaatgaccgcatcgcggaaaaaagggaaataaattcgtttttttttttggctttgtcaaattttgtttggtctatttgtatttatgttgacttttcactttgcgtcatgtgatgcctgggaaaatgtgtgggcgccatgacgtcgaggattcgtctctgctttttttttgccaacgcttttccaccaagcctcccgctttccctttccacatagaacgtttgtctattttctgcaattctattctgtttttggaattccgtgcaaatatcagcaggcgtgacataatgctaggtctaattcatgtgtgtgtggtgggcgtggcctcccacccgaaagtt

SEQ ID NO: 17318 - DNA, 1379 bp, DROSOPHILA
tttcttacagcaaagacaaaaaatcaaatcaacgcagagtaaaagacattgtttatgttgtcgattgaaaggcaaaaacaaaacaagtgaaaatttgtggcaaaaacaaacttcccgaggaaaaccttcaagttcaagttcacctagcaagctattgagctgataagatgagtggacgcgacaacagaggagccggcggcggaggcggcggtcatcaaccgctgagcaacgccatgggcaagctcaaggaaaaactaacccgagtaggtgacgagctgggctatcatcgtgtggagagcaatttgtccacatcgaacacagcgaccagtttggacacaattctgccagaggatccgttcctattcccccaagtgtcaccccaaaggcatccacaaaatacagtaaggacacagcgtttgctggaggacgagccaccgctatcgtttcgcccgcttttggaggacgacgacatcaacgagccacctacacagcagcaacagaggactcccctgcgcgccagcggtagtttggagttgactcccttgccaccgccgcccacatcattggagatacgtgagcatcgcgatcgccagcagagaggtgcccagggtgacgagctgcagcgcagcaagcagagcttgaaaggatcacgcgtgtccttcgagcgacgggataccggaaacagcaataccaacagtaacaaagcagcggagagcagcgacgaggacagtttcgaggagaagcgaactggtttccagcaacagaaggcaaccagcgtcgatcacaagggcatcttgaaggacctgaagcacattttggccaacgacaatcgccggcagtttcaggccaagaagcacgtatccctggacgttaagggcacacgcttcctgcaggatctactgaaggaatcgtcatcggaagaggagttccacaagacacggcgggagttccagggtcgcaagcaccagagtttggatccacgtgtcacattcaagctcgacaaagtcctccagggatcgagtaccgacagtgacgaggagggcgaagatgccgagcacaaacgcctgatccatcgacccaaggacattaccaagccggtgatcatcgatcttaaggatctggaaagcgagagcgacgaggactttctcacatcccgtcagcacttccaacagcagcgttccatcagcacagattcccgcaagagccggcgactctacgagatggacgagatggacaacaaacgcggcgagaacatccgtcatgcggtgcccttcgtgcgccagataaccgaggatggcaagcccaagctggaggtctaccgtcccacaacgaatcccatatacatttggacacaggtgggtcacacatgcgtgcactga

SEQ ID NO: 17319 - protein, 403 aa, DROSOPHILA
MSGRDNRGAGGGGGGHQPLSNAMGKLKEKLTRVGDELGYHRVESNLSTSNTATSLDTILPEDPFLFPQVSPQRHPQNTVRTQRLLEDEPPLSFRPLLEDDDINEPPTQQQQRTPLRASGSLELTPLPPPPTSLEIREHRDRQQRGAQGDELQRSKQSLKGSRVSFERRDTGNSNTNSNKAAESSDEDSFEEKRTGFQQQKATSVDHKGILKDLKHILANDNRRQFQAKKHVSLDVKGTRFLQDLLKESSSEEEFHKTRREFQGRKHQSLDPRVTFKLDKVLQGSSTDSDEEGEDAEHKRLIHRPKDITKPVIIDLKDLESESDEDFLTSRQHFQQQRSISTDSRKSRRLYEMDEMDNKRGENIRHAVPFVRQITEDGKPKLEVYRPTTNPIYIWTQVGHTCVH

SEQ ID NO: 17320 - DNA, 4727 bp, DROSOPHILA
agcgcgcttcagatgtcgccttcttcgcagttccatttggccaacttgttgctcatcacgttggccgagaaggcggtaaacgataagaactatattccgctgtggtaggtgcataagagcttgcttttcgaacccagtgtaactattattttgttgcaggaactttctggtgaccaatagcaaatatcacaccaacatgacgagcattgttctctgccaaagtggactcttctcgtcggccattatactggctaagatacggggcgtatgcctggatactttcaatgccctgatcagcgtggtggcccaggagtttggatggtacaacgagctgaacgtctgcctgtacaatctgagcgagaatatatttttggagacaataacttacttgccgcatgtatccatggattactttgctttcattcaggagaagttgcatcatataagaccgtgtgtgttgcaggtaatgactatttttctacatcttcaacagtttacttacgtaaaataattatctttcagcgcctgtcgaagcaactgaatcctttttctcccgctctgagacccattgtgtcccataatagtgactgcgccatgtcaaacgataacaatccgcagttgtttgagttctgcaagagtctaattgaaacctatctggcagtgcttatacatatggaatcccagcgagtaaagtatgactctattgtaaatgctttatccaatttccgcatcaactatgaagacaatcaggcaagtatttaggacattttccaatcatccctcatatctaatttgtttgaaatcctttagttcgccattgaatcatcacgcttcaaaccgatctcagctggttgtgcctactgcgcctgtgttgtggatggtaccgcctacttctggggctccagcggcattcccagctattacagtgctcagaagtccacgggttcgtacgatgatttataaatattcagttggtatatattaaaaactttttttttttcagagccacctgagcctgcgcacgccgtaaaaagtctagatctcctctcgcagctcaatttgcaggtgcacgctatcaagtgcggtcgtcagcacacacttattttgactaataatggcgtaggtttttcaaacacgatacccaatggcctctaaattaactgactctgctatttgcagctctattccctgggaaacaacaacctttgccaactgggcataggacgccacatgcagatggccttgcagccgatgctggtgacggcattggacggcatgaacataacgatgctcgaggcgggacaatatcataatgcggctgtggccgatgggaagctctatatgtgggggtgagttaagaaaccctgtctagtgaactttgtttttaatgatccgcttgcagatggggcatctatgggcagcttggacagggaagctgcgagaatatagctacaccacaactagtcagttttttcaaatttaaggtgcgtcatttaatccatatgcactttatagtcttgctacattgacacatgcctctcaatgttgcagaaaattttacaaatatcgctagggcatgcgcacaccttggtgctgtgtggagcacccaacagccacatggaggctaaccactgcggcaacgagctcttcgtgttcggctccaatcactttggccagctgggcaccggcaatagtgaccatggcgacaccaagacgaacctgcctgtgcgcctggaagtgggcgactgcagcctaagactgatacacaccaaattttttaccaatgtaagtgttcagcaattacagatgggatccaagctacattctaaaatcccccacagttagctgtagacgaacaggatcgtctgttcacttggggaagctcgccgcaggccttgcgtctggccaatcagatcaagcggcgtgccaatgccaagcagaagatggaggagaatcagcagcgggagctgttgagcaagcaactggaggctaccctgctgccggcacccatcccgagtaccagcactctggtggagcccaccacatcatatgcggcggtggtggccggctccactccgaagtccagcgtcagcgacaccaaagattgccaggacgtgcagaacgaggctgcgccatcagacgctacggaaacaattgcaccggcgtctgcaaaagcggcgccaccgccagtgcccgtggcttctccgccagttcttgtcccagaaccggatcccacggagcacctgacgccccatctagtggacaccagcgaggtggcaggacgaatcctgcaggtaatttatgacagagtgcagccatggcttgcttttttaatttgaaatctccttttttatagatctccagtggcttgttccacttctgcctgatctcgtccagctgcacactctatacgtggggcaagaacctggaacaccaactcggcaccgaggacaaagatcgaagggcggtgcttaagccctcgcccatcgacagcatcgagcgtccgatgtacgtagactgtggttcggatttcacgctggtcatgaccaccgatcacgttgtgcgtgccttcggcggcaactcgaacggtcagtgcggtcgggacttggggcccagtgtggagaggatgcgtcagagggtggtgtgccttccagcgaccaagcgtctggtgcgattcgagagccagtgcgtggaagtaccggtggagatcaatctgccgagaccgcgcattcgactagaccaggatccggtcagataccttaaggttatgccaccatatcagccgcatttcttgcagccggcaaacataagcttcgatcagcactgctcggtgggcactccgaactacaaaagcagcacggagcacgcggccaccggtcaggactcggacgacatgctgagtagcctcgaaaacctgagtcagaacgatgccagcttctcttacaatgctcctgtgctgggcgacgcccacagttcgctggacatggactacacacccgaggagcagagctacgtgccgctgccagaacaggcagttggatctggtatgcccgcgaatgcagagcagttgctgggccgcgacgatgacgatggcagcacctacactcagagcaccgagggaatgggagagtcgtcgctgcagcatctgcgccactacatccattactgtctgtacgcctttcacgggttgtataatcccgacaagattggcgagtgcgcccgtccacatcgcaacgagtaccgcatacgtatctgcatgctcaactttcgcttcgtagaggccttccggctgtgcctgcaaagctgcggttccgcccagcgcaccctcaagttgtttgagtacttcagcaaggacacgggctatgtgccgctgaggagaaccgacctaaagcacctcatctaccacctgtgtctgcacttcctggaacgcaagttcgatatgctggagtgcgagcggttcttcatgggcgacctggactactatctgctggagctggcctacgtgttctacttcaacaacaacaactcgacgctggagcagaatctcaaccagaagttcaagcagctcatcgcggctgcggacagcaatcaagcggccacgtccgccggccaggagctcgagcagctgcaggacaccgatgtcatattcgatagctttacggtcaagttcaagacgatcctgtgccagcgcctgctcagctactcggactgcgatgctgccaattagcagtggctgggccctggagcttcgtttccggttcagatcctggatcctctgaaatttcgttcaacacgcatcagttgagggcccgtctgtcttgtttaatatgtttcgttatgagttctgacctagaaccgaggactgcccccagcacacacaaccccagactcacagactcccggactcccaactcctagaacccatcttcccttacatttttacgcgtaactatatatatataccataattgttgtttgcggttatttatacatcaaatgctttttacagcgctgttatttaaacgaaatatttaagacaaacaaattgtttaaagaatccaatttttgtaacgctttgtttgccattggccacgcctgcttttatttgtttactcaataaactacacaaaaatctgagaccgaaggaaagtaatccaaaactgctcatcgaacagatcaacggaggctgcaggatatacacatgaaacatacaaatgatacaaatttttgttttttattcgatattcagcttgtgatttgcaattatttaataaaaccagagtagtagtaatataattatatacacatataaatgattaacaataaaatacgtttatacaagtaaaagaaagtcaattttacaacttgagcttgatgttgtccgtagtccatcgcttgctctggaggcttttcagcgcattctcgcagtagaactgctcctcggatcgctcgggcagggtgtccttgagctgctgtagctcctgctgctgcttcaacccggccatggcatctatgaccgccttgatgcacttcacccgctgggctagcgccagtttctcaacgctgttgcccatcttggagaggaatagctgaaggacggtcgagggagcctgcagctcgtacagccggagcacggccagcgtcagatcgaagctgatgtgaaactgtttggtcttcagcggatgccaactgggcacccgctcaaatatgcactccagatccgcata

SEQ ID NO: 17321 - DNA, 2321 bp, DROSOPHILA
cagagccacctgagcctgcgcacgccgtaaaaagtctagatctcctctcgcagctcaatttgcaggtgcacgctatcaagtgcggtcgtcagcacacacttattttgactaataatggcctctattccctgggaaacaacaacctttgccaactgggcataggacgccacatgcagatggccttgcagccgatgctggtgacggcattggacggcatgaacataacgatgctcgaggcgggacaatatcataatgcggctgtggccgatgggaagctctatatgtggggatggggcatctatgggcagcttggacagggaagctgcgagaatatagctacaccacaactagtcagttttttcaaatttaagaaaattttacaaatatcgctagggcatgcgcacaccttggtgctgtgtggagcacccaacagccacatggaggctaaccactgcggcaacgagctcttcgtgttcggctccaatcactttggccagctgggcaccggcaatagtgaccatggcgacaccaagacgaacctgcctgtgcgcctggaagtgggcgactgcagcctaagactgatacacaccaaattttttaccaatttagctgtagacgaacaggatcgtctgttcacttggggaagctcgccgcaggccttgcgtctggccaatcagatcaagcggcgtgccaatgccaagcagaagatggaggagaatcagcagcgggagctgttgagcaagcaactggaggctaccctgctgccggcacccatcccgagtaccagcactctggtggagcccaccacatcatatgcggcggtggtggccggctccactccgaagtccagcgtcagcgacaccaaagattgccaggacgtgcagaacgaggctgcgccatcagacgctacggaaacaattgcaccggcgtctgcaaaagcggcgccaccgccagtgcccgtggcttctccgccagttcttgtcccagaaccggatcccacggagcacctgacgccccatctagtggacaccagcgaggtggcaggacgaatcctgcagatctccagtggcttgttccacttctgcctgatctcgtccagctgcacactctatacgtggggcaagaacctggaacaccaactcggcaccgaggacaaagatcgaagggcggtgcttaagccctcgcccatcgacagcatcgagcgtccgattgtggagaggatgcgtcagagggtggtgtgccttccagcgaccaagcgtctggtgcgattcgagagccagtgcgtggaagtaccggtggagatcaatctgccgagaccgcgcattcgactagaccaggatccggtcagataccttaaggttatgccaccatatcagccgcatttcttgcagccggcaaacataagcttcgatcagcactgctcggtgggcactccgaactacaaaagcagcacggagcacgcggccaccggtcaggactcggacgacatgctgagtagcctcgaaaacctgagtcagaacgatgccagcttctcttacaatgctcctgtgctgggcgacgcccacagttcgctggacatggactacacacccgaggagcagagctacgtgccgctgccagaacaggcagttggatctggtatgcccgcgaatgcagagcagttgctgggccgcgacgatgacgatggcagcacctacactcagagcaccgagggaatgggagagtcgtcgctgcagcatctgcgccactacatccattactgtctgtacgcctttcacgggttgtataatcccgacaagattggcgagtgcgcccgtccacatcgcaacgagtaccgcatacgtatctgcatgctcaactttcgcttcgtagaggccttccggctgtgcctgcaaagctgcggttccgcccagcgcaccctcaagttgtttgagtacttcagcaaggacacgggctatgtgccgctgaggagaaccgacctaaagcacctcatctaccacctgtgtctgcacttcctggaacgcaagttcgatatgctggagtgcgagcggttcttcatgggcgacctggactactatctgctggagctggcctacgtgttctacttcaacaacaacaactcgacgctggagcagaatctcaaccagaagttcaagcagctcatcgcggctgcggacagcaatcaagcggccacgtccgccggccaggagctcgagcagctgcaggacaccgatgtcatattcgatagctttacggtcaagttcaagacgatcctgtgccagcgcctgctcagctactcggactgcgatgctgccaattag

SEQ ID NO: 17322 - protein, 716 aa, DROSOPHILA
MQMALQPMLVTALDGMNITMLEAGQYHNAAVADGKLYMWGWGIYGQLGQGSCENIATPQLVSFFKFKKILQISLGHAHTLVLCGAPNSHMEANHCGNELFVFGSNHFGQLGTGNSDHGDTKTNLPVRLEVGDCSLRLIHTKFFTNLAVDEQDRLFTWGSSPQALRLANQIKRRANAKQKMEENQQRELLSKQLEATLLPAPIPSTSTLVEPTTSYAAVVAGSTPKSSVSDTKDCQDVQNEAAPSDATETIAPASAKAAPPPVPVASPPVLVPEPDPTEHLTPHLVDTSEVAGRILQISSGLFHFCLISSSCTLYTWGKNLEHQLGTEDKDRRAVLKPSPIDSIERPIVERMRQRVVCLPATKRLVRFESQCVEVPVEINLPRPRIRLDQDPVRYLKVMPPYQPHFLQPANISFDQHCSVGTPNYKSSTEHAATGQDSDDMLSSLENLSQNDASFSYNAPVLGDAHSSLDMDYTPEEQSYVPLPEQAVGSGMPANAEQLLGRDDDDGSTYTQSTEGMGESSLQHLRHYIHYCLYAFHGLYNPDKIGECARPHRNEYRIRICMLNFRFVEAFRLCLQSCGSAQRTLKLFEYFSKDTGYVPLRRTDLKHLIYHLCLHFLERKFDMLECERFFMGDLDYYLLELAYVFYFNNNNSTLEQNLNQKFKQLIAAADSNQAATSAGQELEQLQDTDVIFDSFTVKFKTILCQRLLSYSDCDAAN

SEQ ID NO: 17323 - DNA, 4471 bp, DROSOPHILA
tttgatagatactaagaaatgtaatgaatctttattcgttatcatcatctattatgcactttctttgcgtcactacgagtgacctattattagctgacatttctattatatgaagatctgattgcattaccggttgcaactgattcaataaatgacaagactcagcattaataagtacgaataccaaaaatatcacccacaagtaaacaataaataaattagattaacacataatcgcccagccatcgcacggatgcatctttcgcaattgtttattcgcttaatggtccaccgataagattcgaacctaaacagatgcgatgcggggtccatgtaatgctcctccttatcgaggctattcggtcaagtggtcggcagcagctagatttttgcgataattgccagtgcaaaatcgagcacacgcgtttctatttttgcatttggcatgtgcctctggaatggccatctagccgattggtcatctagacacttaacaatatatatgtatacatacatatatttagaacggagtgcggggacacattcggtatgaaactcacgtatctgaggcgctgacattgctgcaactgtaaactgcattctgaaggtcgtatgcaaagcgatttttcgaggaaagtaaacgtaacttggatttggtttgatttgtattttaaattagtctacatatagatacacttacagcgtaggtaaagtacaatatatattcgatatatagccaattggtgtatttttccagggagattttggttttttgcgcttgcttttgcactacaactaactacgattcatgtcattttttttacaccgataaattcacgcaacattcatcaaaatgtcaacaaattagtgctagaaatcataatttacataataaaactatgcacttaatgattataaataataataacaatttaagcactaaaggcactagtctagtatttggtttgatcgcatattcagatccttggcaacacgccatttacatgttgaaggacaatggcttgatattggccaccgaggacatgcggcgcacacggcccatcatcttccgctcgatgtcctccagcgtcttgccctgcgtttcgggcacgtagattatcacaaagaacagacccacgaagcagatggcgccgaatagccagaacgctccatgcgcgcccatagcaactgtacataaaaatatcaaatattattaaaccactcatttttgttagctctatgcttgcactacgcacccgtgaggtcctggaaggtcttggtcaccacaaacgtgcagaaccagttgaaagccgtggccaccgaggcagccgatccgcgaattttggccggcagaatctcacccatcatcagccagggaatgggtccgaagcccagggagaatcccagaatgtagatgacgaagcaagtgagtggcaaccaacccaaatgggacacatccggaccgtacgtcttgcagtagaagaagccgcccagaacgaacagggtcagaaccatggcgatgtcggagacatatagaagaatctaaaaatgacaaattttagtaaacaaggattttcattaatatgcagctttaaacccacctttctgcccgcccgatcaatcagaacgatgcctataaacgtagccaaaaagttaacaattcccacaatgatcgtgcagagattgccatcaatggtggatcccgcatccttgaagatctggaccgtgtagaagataaccgcgttgataccgctgaactgttggaagaacatcagacccaaggaaattgatagtggcttcagattgttgagcttaagcagctccaacatggtgtttcgcgatgcctgacgatcggcatcggcctgggatcgcatcaaacccttcagttcgggctccacatcagcctccttgccacgcagccatttcaaagccttcctggcgcgctcctccagaccacggcccacaaaccagcgcggagtttccggaataaggaacattaaaatcaggaagggaacgggcagagcagctcccaagaaggccagcatcgaccaattcataaaggatcccgccacgaagcagagcaggatgcctatgttaccaaaggccgtgggcagcaaacccaaagtgcctcgcacctcaggctgcacagtttcacccaggtagacgggcagggataaagaggcaatgccaacgcagaatccagccaggaatcgtccgcacagaaccatagccacattcacagcacaggcaatcagtagtgatgagacaatgaagggcaccgcagtggccaggatggtgttgcgcctgcccagatattcgatcaagggtcctccggctatgccacctgccaatccagccagcggcatgatgccaccaacccaagaaccctgcaatatgatagatttcaagtgattagatagggttttagcttcgtttgagaatgggaattcgagtttcgatggaaaagtgtgactttgaaacgctcctttgggacttattagcttgggattagctaatctccaacaatttcaagagatgcgaacaaagagttaacttaacctcgacaaattacattttaatagtacttacagcatcttgggtgacctcaaacgaggtgatattccgatcggtcatcgacacaagagcaggcgacgtgtaagcgctgacaaatccgaccactagggagcccagcgagacactcagagcagccaagacctggaaataggaaggaaaacgattttaattagtaagactcgaacttttccacagtagttactcgtagagtaaaagggtatactagattcgttgaaaagtgtgtgtcgaaagcgactccgaccatataagtcgagtcgaactggccatgtccgtatgaacgcctcgatctccggaactattaaaactagagagttgagattcgagtttacttcgaaatgttgcaccgcccacaaaccgcccaatactgttcacactgtttaaatttttttgattttttcttattttattcccgaatatctagcgataagcctacaaatttacgaattttcgcttttgggatttccactagctgagtaataggtatttgatagtatacgactattgcattcacacttgttaattaatataattcaggcacctgggagaaggtacaaatggccttgggctcctcgacgggcacggagaaggacacatgggtgtccgctcgcatcaggatcttcatcgcggtgctgtatctttaaactgaatcacgaactgaaatcgtttttggcttgcaacgaagcggcgaatgtagctaatacagcgttagcttcctgcctttcactttgctccttggaaatggaatacgtttggcgcgttcgctcgtcaaaactcaactgaaacttgttattatgcactgtcactagtttccaatattcgagaatagtttttcgctgtgattttatgggactcaggcacgtacacgaagccaccgagtgctgatcggaccgatattgcttatgcgagcgacggagattctgttcccaagtgtttgatcaagaccaagcttatcagtttgttttcgaacggcaaagacaaagaaaatgcgttatgccgattttcaaaagcagtttcaggctgttttcagcgaacgcgcagcgaagctcgaatgcaaactgcaactgcaactgccaaacatcgacagaagttgcagggtcagctgtcagagtttacctctgctcaacgcacaatctattcgaatccaaaacgttcatccatcaggaggcagctagcgatatttttagtccggtcataactaaatgcgttaatttcaattaaggcatgagcgtctcagacgcaaacgcagcggcatcgtgcgaaaatagctcaaatggctcacacgccggcatcttgaatctggaggccccttaaattgctcaacgagtgctttatggtcgcattagtgccattcataatctcgggacacgggaggcgccaacgagcttaacaagcggacaatacatgtcctccaccgcccctggatttcactataagccgaaggactacactcgaaaaattaagagcaaatctacttttaattagcaagcactcgattaatgggtgttcacgactaaagagaactgaaggtccgggttcttatatttttctttgctattaaagttttgaattaggataactggcttgaaccttaagctaattaggatgaaagggtatgataaccacttttttctctcagtgcacgcatgtgtgacccacctgtgtccaaatgtatatgggattcgttgtgggacggtagacctccagcttgggcttgccatcctcggttatctggcgcacgaagggcaccgcatgacggatgttctcgccgcgtttgttgtccatctcgtccatctcgtagagtcgccggctgaggaaggagaagagaaggttgcaaaactgcgtgtcagtcgattgtattggaagatggcctttgcta

SEQ ID NO: 17324 - DNA, 1724 bp, DROSOPHILA
ctcggtggcttcgtgtacgtgcctgagtcccataaaatcacagcgaaaaactattctcgaatattggaaactagtgacagtgcataataacaagtttcagttgagttttgacgagcgaacgcgccaaacgtattccatttccaaggagcaaagtgaaaggcaggaagctaacgctgtattagctacattcgccgcttcgttgcaagccaaaaacgatttcagttcgtgattcagtttaaagatacagcaccgcgatgaagatcctgatgcgagcggacacccatgtgtccttctccgtgcccgtcgaggagcccaaggccatttgtaccttctcccaggtcttggctgctctgagtgtctcgctgggctccctagtggtcggatttgtcagcgcttacacgtcgcctgctcttgtgtcgatgaccgatcggaatatcacctcgtttgaggtcacccaagatgctggttcttgggttggtggcatcatgccgctggctggattggcaggtggcatagccggaggacccttgatcgaatatctgggcaggcgcaacaccatcctggccactgcggtgcccttcattgtctcatcactactgattgcctgtgctgtgaatgtggctatggttctgtgcggacgattcctggctggattctgcgttggcattgcctctttatccctgcccgtctacctgggtgaaactgtgcagcctgaggtgcgaggcactttgggtttgctgcccacggcctttggtaacataggcatcctgctctgcttcgtggcgggatcctttatgaattggtcgatgctggccttcttgggagctgctctgcccgttcccttcctgattttaatgttccttattccggaaactccgcgctggtttgtgggccgtggtctggaggagcgcgccaggaaggctttgaaatggctgcgtggcaaggaggctgatgtggagcccgaactgaagggtttgatgcgatcccaggccgatgccgatcgtcaggcatcgcgaaacaccatgttggagctgcttaagctcaacaatctgaagccactatcaatttccttgggtctgatgttcttccaacagttcagcggtatcaacgcggttatcttctacacggtccagatcttcaaggatgcgggatccaccattgatggcaatctctgcacgatcattgtgggaattgttaactttttggctacgtttataggcatcgttctgattgatcgggcgggcagaaagattcttctatatgtctccgacatcgccatggttctgaccctgttcgttctgggcggcttcttctactgcaagacgtacggtccggatgtgtcccatttgggttggttgccactcacttgcttcgtcatctacattctgggattctccctgggcttcggacccattccctggctgatgatgggtgagattctgccggccaaaattcgcggatcggctgcctcggtggccacggctttcaactggttctgcacgtttgtggtgaccaagaccttccaggacctcacggttgctatgggcgcgcatggagcgttctggctattcggcgccatctgcttcgtgggtctgttctttgtgataatctacgtgcccgaaacgcagggcaagacgctggaggacatcgagcggaagatgatgggccgtgtgcgccgcatgtcctcggtggccaatatcaagccattgtccttcaacatgtaa

SEQ ID NO: 17325 - protein, 489 aa, DROSOPHILA
MKILMRADTHVSFSVPVEEPKAICTFSQVLAALSVSLGSLVVGFVSAYTSPALVSMTDRNITSFEVTQDAGSWVGGIMPLAGLAGGIAGGPLIEYLGRRNTILATAVPFIVSSLLIACAVNVAMVLCGRFLAGFCVGIASLSLPVYLGETVQPEVRGTLGLLPTAFGNIGILLCFVAGSFMNWSMLAFLGAALPVPFLILMFLIPETPRWFVGRGLEERARKALKWLRGKEADVEPELKGLMRSQADADRQASRNTMLELLKLNNLKPLSISLGLMFFQQFSGINAVIFYTVQIFKDAGSTIDGNLCTIIVGIVNFLATFIGIVLIDRAGRKILLYVSDIAMVLTLFVLGGFFYCKTYGPDVSHLGWLPLTCFVIYILGFSLGFGPIPWLMMGEILPAKIRGSAASVATAFNWFCTFVVTKTFQDLTVAMGAHGAFWLFGAICFVGLFFVIIYVPETQGKTLEDIERKMMGRVRRMSSVANIKPLSFNM

SEQ ID NO: 17326 - DNA, 2973 bp, DROSOPHILA
ccatccagcttcttttgtaaataaaggtataatataatcttgattaaatcatatattaattaatctttagttatcctgaattgacatgggaacttaaatgagatcggaagtaactataggggttgggtagagaaagcaaggtccacattaaaccaaagaccttgctacagtttgttcttgccgaaagagctaatgaacttgatgattcgctcgccattattcataactgagtagaagagtgagataccgaatcaccagtgtttgggtactgcgagaggtgagaataaccatccattacaccgttttatattcattcgtttgtcgagagcttggaaactaaagaatgtttatcacataggaaaaaaaatgaaacaacaggctaggaagaacctttcactctgtagaaaatttggtgagctctcagttgtgaatatagcctcattaaccattccgtttcgaatgaaagtggttgtacatcggaaattgtgctgtgtcgagaatcgagcgtgaaacatacagtgaatactttttgaatttgcctgggtgtgaatcgaattcgagtgagttaaagtgagatctgggataagaaatcgtaatttacttgccatacacagaatcagacattacagcacgcatcccaaagtaatccttatcaataaaactataatatctaaagaatgtttatcacacaggaaaaaaaatcaaaataacaggctaggaagatagttttctgagctctcaattgtgaataaatcctcattcgcattttgctacgaatgaaagtggttgtgcatcggaaattgtgctgtgtcgagaagcgtgcgtgaaacttacagtgaataccttattggattttcctaggtgtgaatcgaattcgtgtgagtgcgatctgagatctgggatcagaaatctaaatttactctctccatacataagacatcagaatcagacagtacagaacaaatccctaggcaatccttatcaatagtccgccgaataaatggttttcgttcacgtttcggagaaggagggcgacgagcccatcgagctgccggctgaggaggatggcactttgctgctgtccacactgcaggcgcagtttccggaatctagcggtctgcagtaccgcaacgtggacacgaaggcggtgcgtggagttcgctccaacgagggccgactgtattcgcccagcgaagaaaccggctggggcgagtaccattacttttgcgtctttcccaagaagaacaagcgccagagcgaagataacttggaaaactcaactgccaaaaccaagcgcactgaggcccatctgcgctgctttgatctcatcgtgctcggcttgtcctataacaccaccgagcaggatttgcgtgagtacttcgagacctacggcgatgtggtgaaggctgagatcaagaaggacaccaggtcgggccactccaagggtttcgggttcgtgcgcttcggctcttacgatgtccagatgcacgtactctctaagcgccattcaattgatggtcgctggtgcgaggttaaggtgcccgcctcgaggggcatgggcaatcaggagcctggcaaggtattcgtcggccgctgcaccgaggacatagaggcggatgacttgcgcgagtacttctcaaagtttggcgaagtgatcgacgtgttcattcccaagcccttcagggcttttagctttgtaacctttctcgatccgtatgtaccacgcgtcgtgtgcggagagaaacacataatcaagggagtttcggtccatgtgtcgactgctgacaaaaagaacgtgcagaacaaaaaccaactgttccagaccaacaactacaacaatttggacaacaactttaagatgcaaccggccaacaactttagaatgcacccagccaacaactttagcatgcattcatttaatccacatggttaccaaatgaatcgcgtcatgaactagacccacaagaccaatgtgggcggcagcaactgttggatatgcccaacctgcaggcgctagtcttcaactcccaggcatcgagctcctccaaccagctggtcgagttggtacccaataatgtgatgctgtcgctcatacacaaatataaacagacatacatataaacagacatacatataaacagacatacatataaacagacatacatataaacatacttatgtgcatacttatatgcatacttatgtgcatacttatatgcatactgatatgcttatttatatataaacttatatgcatacttatatgtaaacttacatgcatacttaaaagcatacttaaatacatacatgcatgcttacatacttgtagacataaatacatacatacataccacacgtccaaaaataaaattctaaaaaatgatttgattttttttgattttacttcaaagtagttattttgtttcagtgtatctgcctgttctcaatctccgatattgcaattctcgcaattcctcctctttccctgccattttacctaattggtaatttttactccgcccgttcgacagccccgcccctcagatccttcagatactcaaatacttgccatcgttcagatattccggctttagttcctttcgtccgccggtccgtctgttggcaattgatttcggcctggtgtgcgagtcggcaaaggacgattgacgagtcgcctggaggacacttcagcgcgacacttcaggtatgtcctggctgcttttcacgtgctctttagcctatttcccgtttcctgcaccgaattcgaatccgagtgccttctggccagcggacgggacgggtgttctttctgcgattcgttagcaaggggaggaccgccaaaggaccttcttgggtctgcggcatgcgcatgctaatcagtaaatccagcgatccaatccagagaataaatatttgacaaacgtacgcagggcggaaaacttggaatgtaagtataataaatgcgattttgaa

SEQ ID NO: 17327 - DNA, 922 bp, DROSOPHILA
atggttttcgttcacgtttcggagaaggagggcgacgagcccatcgagctgccggctgaggaggatggcactttgctgctgtccacactgcaggcgcagtttccggaatctagcggtctgcagtaccgcaacgtggacacgaaggcggtgcgtggagttcgctccaacgagggccgactgtattcgcccagcgaagaaaccggctggggcgagtaccattacttttgcgtctttcccaagaagaacaagcgccagagcgaagataacttggaaaactcaactgccaaaaccaagcgcactgaggcccatctgcgctgctttgatctcatcgtgctcggcttgtcctataacaccaccgagcaggatttgcgtgagtacttcgagacctacggcgatgtggtgaaggctgagatcaagaaggacaccaggtcgggccactccaagggtttcgggttcgtgcgcttcggctcttacgatgtccagatgcacgtactctctaagcgccattcaattgatggtcgctggtgcgaggttaaggtgcccgcctcgaggggcatgggcaatcaggagcctggcaaggtattcgtcggccgctgcaccgaggacatagaggcggatgacttgcgcgagtacttctcaaagtttggcgaagtgatcgacgtgttcattcccaagcccttcagggcttttagctttgtaacctttctcgatccgtatgtaccacgcgtcgtgtgcggagagaaacacataatcaagggagtttcggtccatgtgtcgactgctgacaaaaagaacgtgcagaacaaaaaccaactgttccagaccaacaactacaacaattccaacaactttagcatgcattcatttaatccacatggttaccaaatgaatcgcgtcatgaactagacccacaagaccaatg

SEQ ID NO: 17328 - protein, 301 aa, DROSOPHILA
MVFVHVSEKEGDEPIELPAEEDGTLLLSTLQAQFPESSGLQYRNVDTKAVRGVRSNEGRLYSPSEETGWGEYHYFCVFPKKNKRQSEDNLENSTAKTKRTEAHLRCFDLIVLGLSYNTTEQDLREYFETYGDVVKAEIKKDTRSGHSKGFGFVRFGSYDVQMHVLSKRHSIDGRWCEVKVPASRGMGNQEPGKVFVGRCTEDIEADDLREYFSKFGEVIDVFIPKPFRAFSFVTFLDPYVPRVVCGEKHIIKGVSVHVSTADKKNVQNKNQLFQTNNYNNSNNFSMHSFNPHGYQMNRVMN

SEQ ID NO: 17329 - DNA, 7240 bp, DROSOPHILA
tcggcaagcgacaggaacgtcacagtctgcctgaggattggattcacttgtgacctgcacgctctgctttccttcctgctgcgtttcctctagtaattcatctctttgctttttctccaacgtatgcattagtattcctgagaagctagtattccgaacatcgtaactatcccgagccttcttttccgcctccgttaggtactgacccactagctcctggtagagatccggcgccctttgcatcatctcgtgttcgctaaagtattctcccttgtcaaggagctgctgcatggcatggtatcttcggtttttaatggataccgcacgagtgttgagtttcctcctaaaatcctctagcagcaggcacatctcctccagattttcatctgctttaatgggttccttgacagccagttcctggaaggaacccagttgtcttacattcaggaagcctccaaatcggatgagaaagttctcacggttcttatcgaaggcatctcgtgctatttgttgcttctcttcgaccggaatttccggatcatcaatttgctgcgacttaaagacgatttgattgttttcggccaaggatttgaagatgtctattatctccggaggatgttctggatttgggacgatgtcattgttgccctggtggtcaccatccccgtcagcatcgcttccagttgtcataattgtttacacaaattgcacaaagtgtgaaatagaaacgtaaacaaatgcttcttctttcttagccaatgtcatttacatagagttgccagagtaattaaatttttcgataaaaaattagcgattgtgaaaataaaccaagttctctgtctgaaaaaaaaattacgatctttgaaaatatgtattatgcataatacaatgaaaatatttccattcaaaaaaaaagacgaaaaggaaaccgttcaacgattttgatagttggcaaccctgcggctccacatagcggctgtattttcattacgaactttatctgaggtccaattgttgtgtttatcgctttgtttaacgccactcggtggttcagtggtgcaaatatgcaggcagcgatgactaactgagcaagtttagcggaagaccaaagaatccatcaaagatttcgatcgagatgtcatctgtggtggactggggcgactttgcctggaactggacgcagttctgtccgacgggattgaaaccgttcgccaacgagaccaacgatctgctgccttgctttcaggagatcctgctccagctgcccgtatacacgctcttcgccgccatatccgcctacaatttcggcaatcagtcacgacatgtcgtacgtaatggattgcaattgcgtatgctttcgattcgtaccttcctggccatggtactggccctgctaccggtggccaaggtgttcgccttccatcagcagggcgttgaactgtttgcggcggatctgctggttgtcagtgccgaatgcattatgtgggtggttcacagcggtgagtgtgcggttttcctttctccgggggtttacatctcgattcaatatcttaggtgcatatgcgggtttcccttttaggggctgcgattgtatatccgactttctttttatcaaatacaaatatgtaattagtccttatcagtttaatgcttaacacattttaacttggcacatttatttgctttttgaaatgaattgccattttatccgcaaaacaaacgtagttctttcttttcatatatctagatttattcaggcaattacaacttcctttgtttcacttcctaactttacaaatatatggcgttttatgttgtctgttaaatagaagcatacataaatttctgagaaaagcagagaagtagtattctgcaataaaatgataagtctacaaacaataatttatgacccctttgctaatcagttttcctattcctcccccactcacaggtttcctactgacagcccgtcaatatggagagcttagtcatcggggatcgctgctaatcaatgtcgtttggctcacagtagtcgttttggatgcagtctggctgcggacaagtcgacactttagctggtggccctggagcttggccacgttggtctgcgatcttctgtttggagtcaccttaataccaaaaggaagtgctgtttactccagtttgcccagatcaggagtttctgccagagaggatgagggcctgctatcccagcgatatacatattttcaattcgatctgaatgagagccatttgggtcatgcccaggacgaagccaatttgggatcgcgtttcctcttccactgggttcagcccctaatcttgaaaggagtggctggaaagctgagaaagattgaggatctgttcgatctccccgatgccctgaacatcacacgactgagcgagaagttgcacttggctctatcgcaatcgcaaagtttatggagagccctgcatagatgctttggtgtggagttttaccttattggtatccttcgattgatcgccgacttgagtggctttgctggacctctactgctcggaggacttctccgacaggatcacgcagatcctaatcaagtatactattatgccctgggtctattcggcagcacattgctatcggctgtgtgtgccacccacttcgattggcgcatggccatggtttcgatgaaaatgcgagtgggagtggtcaactccatatacaggaaagcactagaggcgaggggcttaaaggaatccaagccagatttgctaaatcttatgtcaacggatacggataggattgtgaactcttgcataagttttcacttcttctggagcattcccttcaagctgtttaccacattgtacttgctgtatcttcaactaggagcagcatttctggcgggagtaatattcgctgctcttttgattccaattaatagatggttggccaagaggattggcatattttcaagtggtttaatgacggccaaggatgcaaggctatctgccacgacggaaacaatgcaaggagccaagcagatcaagatcaatgcctgggaggatatattcataacaaagatacgaggactccggcaggaggagctgcgatttttatcgaagaggaaatatctggatgccatgtgcgtttacttttgggccaccactcccgtgcttatgtgcctgctcacatttggcgtatccgtactaatgggaaatccgttgatagcttctaccacctataccagcgtggccttgctctatatgctcattggaccattgaatgcctttccatgggtgctcaatggtttaattgaagcatgggtttccattaagagagtccaacaactgatggatgtgcccaatttggattattcatcgtactataatcccataatgagaggaagcggaggatccggcgcaggggatgatgcgcccttggatgcgccaaaagccagtgtgctgcagatgaagtgcgccagcttttgtcatgatagcgatgaacaaacatctccaactccattccgcatgaaggatataaatgtggacataaaggcaggacagcttgtttgcatcgaaggacctgtgggtggtggtaagagtagctttctatctgccattgttgccaatctgcagtgcaccgatggcgaggtgtgcgtccaggaattgacaactggatttggttacgtgccccagtcaccatggctccaaaggggcaccattagggacaacatagtttggggcgcccagtttgatgaacagtggtacaaaacagttttgcatgcctgcgctttggaggaggatctccaaatccttggaggcgatctggtcggtgtcggtgagaatggaagaacactttcgggagggcagagagccagagttgcactggcaagagcggtttatcaggataaaaagggttggtatttcttgaacatgttttctagtttccaaactaaaatttcctattctattgatagtttacctcttggacgacgtgctctcgtctttggatgcccatgtggccaggcatatcattaagcactgcatcctgcgacttcttaagcacaaaactcgcattgtggtcacacgaaatattcaattgttcttccacgccaatcagattcttcaggtgaaggatggtcaactccttccgagtgaatacatgacccagagcattgagctaagcctagatgaagatgcggacgatgagcaggaaccaacagtcaggcgacgttcagtggagttatccaaccagtacgacaaaaagagtctggatagtctgcttttggaagaattaagggagtacggacatctttctggaaacgtttttacatgctactggaaggctgtgacttcccccctcgctttcactgttttgctatctgtagtcctcatgcaattgacacgaaatttgagtgatgcctggctggcttattgggtcactgaaacaaccttggatccccacaagaatgatacatccctggatcacattcttatgcgaccgacagtgggcaatgaaacggagtctgggcacacaacaaagttctatttgagcatttttaccgccattgctgtgagcaattccttggtgactttggccagggcgtttctgtttgcctacgctggaataaaagcggccatctttatgcacgagaagctactgaagaaagtcatgtttgtaagtagctgctgggcataattatgtaaagaaaacgtttaatacaaactcatttttcaggccaaattcaacttttttgacatcacctcagtgggacgcatactgaaccgattctcttcggacaccaacactgtggacgattcgctgccattcattttgaatatactattggcgcaacttgctggcttagtgggagctctctgtgtcagtctatatgcgatgccttggctgggattggtgattatacccatggtgcccatctacctaagcttacagcagcgatatcggcacgcctccagggacatcaaacgattatcgagcaatgcaatgtcaccgctttacacacattttacggagactctacagggcttgacgacaataaggagtatgcgagctagtccgagatttcagcgggacttccaagtgaaactcgaggagagcataaaggctcagttgacacagtcggctgcgcaacaatggttagctctgcgacttcagttgctgggaacactacttgtcggaggagcaggtcttctggctgccattaccgcctctcacacaacgaatcctggcttggtgggtctatgcatctcctacgcgctctccataactggtcaattgggagatctacttcatgctgtggctgaaacagagcaggaactggtcgcagttgagcgtatagatcagtatctgcagctggaggaagagcagaatgcatccggaagtgctgagcctccttttggatggcctacccaaggagttttaagttttcgagaagtccaactgagctacagagagcacttggcgccggcattgagaggtataaccttccaaaccgaagctttcgagcgtattggcatcgttggacgaactggagctggtaaaacttctgtcttagctgccctactgcgggtggcaccattgacgcacggagagattcgattggatcaggtgaatctaaaaacattgcctttgagtgtgctcagggaacgcataggagttatcactcaggagccctttctctttgaaggtgagcataacgattttttaatatgaactattagaaactaaaaaaaacatatttacaccattcctcaggcactgtgcgggaaaatctggatccgcgtcatggtttctacgactcggagatctggcacgccattaagaactccgcagcggccactctgctcgttcagcagttgggcggattggatggaaaagttgagacatgtggcaacaacctatccgccggtcaaaggcaacttctttgtttggccagggccctgctgaagaacgccaaggtggtggccatcgacgagggcacttcgaacttagacgacgaatctgatctgagcatacagcaggccttaagaaatgcattcaagagttgcacgctcctgttcatcgcacatcgcctgcgaggactgcacgccatggatcgtataatagtgctggatgatggacggatttgtgaggaaggcaatccccaaagcctggcctccgatagctcaactattttctacggcatgctattggcgcaggacattgatccaggggaatttatcagatcgaattagcactaagtaacgattatgaactacgaattgtatataagtcaattgttacacaattttatttattactttgtttaatttttatcatacttgtgttcctaactaacaattccattttgagtcacattcaaaattatgaaatttgatgagatctagcatcacttcgcaatttttatttaattgtacaaattcaaacttgattgacatactatttttgtagtgaatttaacaaagcagttgaatccgttcaatgtgtacaaaaaacaaaacgttatgttataaatactacattataaaatataagacctgtattaattacatgctgaataaatgttgcgaccaaagaacgggagttatggtattaatgaatctgatttaatgtcaattaacattaaagcatggatttgtcaaaatttgcctcaattcactgatttcgaaaattaatgaatctactcaacccacgcgtgtaaatgctaaataagtggcataaatcgtttaaatttcagttgataatctcaaccgtcaatactttttcacttagatttcatagttgaagagcttttcgcctggcctgcccatgatgtgatcaaactggttgggataatgtggcggcttggaaagcatgtcgttcacagagcgctcgtagagatcaatgtagtagaggaggttctcgtccgtgtacatctgtgataatcataaaatcaagattagtaatgcgccttgctgtttgtacacaagtagtaaatagttaattggtgatctggttaataggttatatatatgagattagtgcccgaatgagaccagtgtgattagtacattagttcattaaatggccaactcatactgataccttggattggatacattattccttgacctataaatgcagcagcgaatggcatttgaaaataaaaagttgtatagagtgtagcagatggttgcatggaatcaaaccaatacctgcagataacagcgcaccgtaaagatgatccggcgcaga

SEQ ID NO: 17330 - DNA, 4599 bp, DROSOPHILA
ctgaggtccaattgttgtgtttatcgctttgtttaacgccactcggtggttcagtggtgcaaatatgcaggcagcgatgactaactgagcaagtttagcggaagaccaaagaatccatcaaagatttcgatcgagatgtcatctgtggtggactggggcgactttgcctggaactggacgcagttctgtccgacgggattgaaaccgttcgccaacgagaccaacgatctgctgccttgctttcaggagatcctgctccagctgcccgtatacacgctcttcgccgccatatccgcctacaatttcggcaatcagtcacgacatgtcgtacgtaatggattgcaattgcgtatgctttcgattcgtaccttcctggccatggtactggccctgctaccggtggccaaggtgttcgccttccatcagcagggcgttgaactgtttgcggcggatctgctggttgtcagtgccgaatgcattatgtgggtggttcacagcggtttcctactgacagcccgtcaatatggagagcttagtcatcggggatcgctgctaatcaatgtcgtttggctcacagtagtcgttttggatgcagtctggctgcggacaagtcgacactttagctggtggccctggagcttggccacgttggtctgcgatcttctgtttggagtcaccttaataccaaaaggaagtgctgtttactccagtttgcccagatcaggagtttctgccagagaggatgagggcctgctatcccagcgatatacatattttcaattcgatctgaatgagagccatttgggtcatgcccaggacgaagccaatttgggatcgcgtttcctcttccactgggttcagcccctaatcttgaaaggagtggctggaaagctgagaaagattgaggatctgttcgatctccccgatgccctgaacatcacacgactgagcgagaagttgcacttggctctatcgcaatcgcaaagtttatggagagccctgcatagatgctttggtgtggagttttaccttattggtatccttcgattgatcgccgacttgagtggctttgctggacctctactgctcggaggacttctccgacaggatcacgcagatcctaatcaagtatactattatgccctgggtctattcggcagcacattgctatcggctgtgtgtgccacccacttcgattggcgcatggccatggtttcgatgaaaatgcgagtgggagtggtcaactccatatacaggaaagcactagaggcgaggggcttaaaggaatccaagccagatttgctaaatcttatgtcaacggatacggataggattgtgaactcttgcataagttttcacttcttctggagcattcccttcaagctgtttaccacattgtacttgctgtatcttcaactaggagcagcatttctggcgggagtaatattcgctgctcttttgattccaattaatagatggttggccaagaggattggcatattttcaagtggtttaatgacggccaaggatgcaaggctatctgccacgacggaaacaatgcaaggagccaagcagatcaagatcaatgcctgggaggatatattcataacaaagatacgaggactccggcaggaggagctgcgatttttatcgaagaggaaatatctggatgccatgtgcgtttacttttgggccaccactcccgtgcttatgtgcctgctcacatttggcgtatccgtactaatgggaaatccgttgatagcttctaccacctataccagcgtggccttgctctatatgctcattggaccattgaatgcctttccatgggtgctcaatggtttaattgaagcatgggtttccattaagagagtccaacaactgatggatgtgcccaatttggattattcatcgtactataatcccataatgagaggaagcggaggatccggcgcaggggatgatgcgcccttggatgcgccaaaagccagtgtgctgcagatgaagtgcgccagcttttgtcatgatagcgatgaacaaacatctccaactccattccgcatgaaggatataaatgtggacataaaggcaggacagcttgtttgcatcgaaggacctgtgggtggtggtaagagtagctttctatctgccattgttgccaatctgcagtgcaccgatggcgaggtgtgcgtccaggaattgacaactggatttggttacgtgccccagtcaccatggctccaaaggggcaccattagggacaacatagtttggggcgcccagtttgatgaacagtggtacaaaacagttttgcatgcctgcgctttggaggaggatctccaaatccttggaggcgatctggtcggtgtcggtgagaatggaagaacactttcgggagggcagagagccagagttgcactggcaagagcggtttatcaggataaaaaggtttacctcttggacgacgtgctctcgtctttggatgcccatgtggccaggcatatcattaagcactgcatcctgcgacttcttaagcacaaaactcgcattgtggtcacacgaaatattcaattgttcttccacgccaatcagattcttcaggtgaaggatggtcaactccttccgagtgaatacatgacccagagcattgagctaagcctagatgaagatgcggacgatgagcaggaaccaacagtcaggcgacgttcagtggagttatccaaccagtacgacaaaaagagtctggatagtctgcttttggaagaattaagggagtacggacatctttctggaaacgtttttacatgctactggaaggctgtgacttcccccctcgctttcactgttttgctatctgtagtcctcatgcaattgacacgaaatttgagtgatgcctggctggcttattgggtcactgaaacaaccttggatccccacaagaatgatacatccctggatcacattcttatgcgaccgacagtgggcaatgaaacggagtctgggcacacaacaaagttctatttgagcatttttaccgccattgctgtgagcaattccttggtgactttggccagggcgtttctgtttgcctacgctggaataaaagcggccatctttatgcacgagaagctactgaagaaagtcatgtttgccaaattcaacttttttgacatcacctcagtgggacgcatactgaaccgattctcttcggacaccaacactgtggacgattcgctgccattcattttgaatatactattggcgcaacttgctggcttagtgggagctctctgtgtcagtctatatgcgatgccttggctgggattggtgattatacccatggtgcccatctacctaagcttacagcagcgatatcggcacgcctccagggacatcaaacgattatcgagcaatgcaatgtcaccgctttacacacattttacggagactctacagggcttgacgacaataaggagtatgcgagctagtccgagatttcagcgggacttccaagtgaaactcgaggagagcataaaggctcagttgacacagtcggctgcgcaacaatggttagctctgcgacttcagttgctgggaacactacttgtcggaggagcaggtcttctggctgccattaccgcctctcacacaacgaatcctggcttggtgggtctatgcatctcctacgcgctctccataactggtcaattgggagatctacttcatgctgtggctgaaacagagcaggaactggtcgcagttgagcgtatagatcagtatctgcagctggaggaagagcagaatgcatccggaagtgctgagcctccttttggatggcctacccaaggagttttaagttttcgagaagtccaactgagctacagagagcacttggcgccggcattgagaggtataaccttccaaaccgaagctttcgagcgtattggcatcgttggacgaactggagctggtaaaacttctgtcttagctgccctactgcgggtggcaccattgacgcacggagagattcgattggatcaggtgaatctaaaaacattgcctttgagtgtgctcagggaacgcataggagttatcactcaggagccctttctctttgaaggcactgtgcgggaaaatctggatccgcgtcatggtttctacgactcggagatctggcacgccattaagaactccgcagcggccactctgctcgttcagcagttgggcggattggatggaaaagttgagacatgtggcaacaacctatccgccggtcaaaggcaacttctttgtttggccagggccctgctgaagaacgccaaggtggtggccatcgacgagggcacttcgaacttagacgacgaatctgatctgagcatacagcaggccttaagaaatgcattcaagagttgcacgctcctgttcatcgcacatcgcctgcgaggactgcacgccatggatcgtataatagtgctggatgatggacggatttgtgaggaaggcaatccccaaagcctggcctccgatagctcaactattttctacggcatgctattggcgcaggacattgatccaggggaatttatcagatcgaattag

SEQ ID NO: 17331 - protein, 1487 aa, DROSOPHILA
MSSVVDWGDFAWNWTQFCPTGLKPFANETNDLLPCFQEILLQLPVYTLFAAISAYNFGNQSRHVVRNGLQLRMLSIRTFLAMVLALLPVAKVFAFHQQGVELFAADLLVVSAECIMWVVHSGFLLTARQYGELSHRGSLLINVVWLTVVVLDAVWLRTSRHFSWWPWSLATLVCDLLFGVTLIPKGSAVYSSLPRSGVSAREDEGLLSQRYTYFQFDLNESHLGHAQDEANLGSRFLFHWVQPLILKGVAGKLRKIEDLFDLPDALNITRLSEKLHLALSQSQSLWRALHRCFGVEFYLIGILRLIADLSGFAGPLLLGGLLRQDHADPNQVYYYALGLFGSTLLSAVCATHFDWRMAMVSMKMRVGVVNSIYRKALEARGLKESKPDLLNLMSTDTDRIVNSCISFHFFWSIPFKLFTTLYLLYLQLGAAFLAGVIFAALLIPINRWLAKRIGIFSSGLMTAKDARLSATTETMQGAKQIKINAWEDIFITKIRGLRQEELRFLSKRKYLDAMCVYFWATTPVLMCLLTFGVSVLMGNPLIASTTYTSVALLYMLIGPLNAFPWVLNGLIEAWVSIKRVQQLMDVPNLDYSSYYNPIMRGSGGSGAGDDAPLDAPKASVLQMKCASFCHDSDEQTSPTPFRMKDINVDIKAGQLVCIEGPVGGGKSSFLSAIVANLQCTDGEVCVQELTTGFGYVPQSPWLQRGTIRDNIVWGAQFDEQWYKTVLHACALEEDLQILGGDLVGVGENGRTLSGGQRARVALARAVYQDKKVYLLDDVLSSLDAHVARHIIKHCILRLLKHKTRIVVTRNIQLFFHANQILQVKDGQLLPSEYMTQSIELSLDEDADDEQEPTVRRRSVELSNQYDKKSLDSLLLEELREYGHLSGNVFTCYWKAVTSPLAFTVLLSVVLMQLTRNLSDAWLAYWVTETTLDPHKNDTSLDHILMRPTVGNETESGHTTKFYLSIFTAIAVSNSLVTLARAFLFAYAGIKAAIFMHEKLLKKVMFAKFNFFDITSVGRILNRFSSDTNTVDDSLPFILNILLAQLAGLVGALCVSLYAMPWLGLVIIPMVPIYLSLQQRYRHASRDIKRLSSNAMSPLYTHFTETLQGLTTIRSMRASPRFQRDFQVKLEESIKAQLTQSAAQQWLALRLQLLGTLLVGGAGLLAAITASHTTNPGLVGLCISYALSITGQLGDLLHAVAETEQELVAVERIDQYLQLEEEQNASGSAEPPFGWPTQGVLSFREVQLSYREHLAPALRGITFQTEAFERIGIVGRTGAGKTSVLAALLRVAPLTHGEIRLDQVNLKTLPLSVLRERIGVITQEPFLFEGTVRENLDPRHGFYDSEIWHAIKNSAAATLLVQQLGGLDGKVETCGNNLSAGQRQLLCLARALLKNAKVVAIDEGTSNLDDESDLSIQQALRNAFKSCTLLFIAHRLRGLHAMDRIIVLDDGRICEEGNPQSLASDSSTIFYGMLLAQDIDPGEFIRSN

SEQ ID NO: 17332 - DNA, 7231 bp, DROSOPHILA
tccaaagaacagttcgaaatatgcccagttaacttgctattattaataataaaaccaatagaaccattttcatttgccaagctcgacacaagtctgctttataaacacgagccaatggttatagctgcgaatgtctaactgaatcacctattattcggccattcactaataactactcctcagaggtaaataattgagctgctatttggatgtgtaagcaatatgaattagttgattaagccgatgcacaatgattcaggcgatggggaagtagagcgcttgggcagggccttccttgtttggttcacctggaggagttccttatttggaccacaatgaaggccgatcctccgcgatccgtggtccgcccgcccaacacactcttgcacaatcgaataaacatgttcgatttgtgaaaacctcaacgttttgtgtcaaattactgtcattcttttccgcaatccccgggcacaatgctgaattaagtagcaggtaaatgagagcagctagcctaagcaggcaagagtataaataaaatttgttatggaatggcgcgcagcgggcaaattcagggaatcaatagccgcagttatggatacctaatgggcgtaccccaccggagcgtccttatcgcgcgcatcgcccattgacactgcatcctgcgagtcctggcaattcaaaagcgcgcgactgggcaggatgtcaaatggcttgtgtgataccattcactaagccgagcttccgacctcattatgcgactcctttatgccgcacacatttaaatgtgctttcgcccaccacaaagatctcaaatcggcgacaatctctccctatagccgccatccatccatccatccgtccatccgtccatctatccgcctatccgacctctaacggtagcgactgcgaagtgaagccggcgtcgccggcgaaaaccttttcgcctttttggcacactggcgagcgactagttctcatttcgcgttcgtcgctcgtagactactgatgctgatgcgtcggtgcggcaaagtcgaaaaattcgagaaagcgcgaatcggatttagaatttagaatttacaacttgtgattgtgatccgccgtgatatagcgaattagcgaattattctggaatatatcgacttgtgccccagaacagctggatagccccatcgatatgtgtgcataaggtttcggcggacttaaatatgataacatgactttagcgtatgtggatatgccagctgtaattcaggttcaggtatatttcggacttaggatctcactgggattaagattgatgagattgacagtgtgtcgaatttcgcggcgctttaagaacatggcctcagaagactttctgtgtttcggatcggatatagatggtgcattcttgaatgttatatatatgagctcgcaatttgagttcgctgtggaacctcacaatgaaaatattgaacaaatattgtggttttgcaattcaattaaaaaatgaaatcaattttaatagcaaacccaattttaaccaaaactgacaatttttggtcgaactatcgaattaatcatgcatctaaaaatatcagtgaattattggttcccatgtctgacaactggaatgttgaatctcattaaagctactttcatgtgatgtaaacgatcaccagtagccaacccaaaaagccacgctcaaagtacctgcttcatgttgcttttcggtgtctatttaagttttgatgcgaggaaattgatatacaaagtgttacaaaaactgtgttaccgacgggattttactttcaaccacatactaaacttatcttaggaacctgaaaaacgccctcaaaggaatgggattctttgtagtcgttttgacttaaatgtactaacttgggaaaattatattcttcacgaaatggattttacgttttaatagtctgatattgagagccctcataacataaacttatcagtttaatcgtcatatataccgccataactgtataatctacaccaaatcttcgactttttcccggaactatgtacgtgttttgcccactctcggccacaggactaaacgtatcttgagagcatccagtattatatgcatatgcttcgccaaatgtgatcccaataatagtaactgacatcccattttcgacaactgcataaccttatctgggaaactctaaatccttcccaccacttatcctaatcatcagacttacaattgaacatttggtgactgtatccacggaatgttttcgcaattcgagtaaccaacaattccgcttgtcttccccaggaacgcctcagtggacatgggagtctagggctgtccagcggcagtgcggcgtacacaacgcattccggcggccacacgggacgcagcggaccggccacggggcacagtgggcacagcagcacccatggatcggcggccaccatgcaccaccagtcgctgcagtccgacttccagccgccgtacttcccgccccccttccaccactccacccagagtcctccccagcaacaggtaagccaccacctccgcacggcgctcctgatgatcccaagcgctatctagatatccggctacttgcagaaccatggagccctcgagtacttgggcacggatccgtatggccagcccctctcctcgcttcaccacgccccactgcaccactacaaccagctggcgggactgagatccacgcaggaccaactggggatccacaggacccacagagaggctgagctgcagggacatgtcgtaagtagtttactgaaaaggacttcgtttgtatttactttatgtcatatgcttcagttttattggcttaagggaaaaggcttacgtttgaaaatgtgggcgtggcagtcttttaaagacttaaaagagttactttagaatgggatacattaatatttgcgaaataaaataaaataactctaacaactaaatgcttaagaaaatcaaaaaggaaaacacgttcacatttttattacattataaatagggatcgcagggataacaaaatagtaatcgatttaaaagaaaaattttcatataagcatctccttggcaattttagctgagttaggttaaatattttagccctcgtatacgccgattgccggcaaattacaataactgctaacaagaaggcaggactcaatcttttcatccgtttaagaatttgcgtcttgttccacattattcttgcatattttgctacattcttggcttcgcaggccatggaacattggggggtggaagctggctcgctctgtgaaagttgtcgaagttattttggaatggattccattcgagtgcattaaaaaacatactcgggaaaatgtgaaaaatgttcttgggatttcgcaagaaactcttcccaacaacgatgaaattcctagctcagccttagcccgccgaagggagtccttcagcatcgccaccctaccggtcgttcccccgccaagcggtgcagcgaaacgcagccttgtgccccgaaaaggcgtatcctcacaggctctgtgcgcatctgtccgcccaaaggactctcacacacacgcagctctgtcgagagtccgtcagagtgtgtgtgtgtgtgtgccaggcagttgccagccggtctgcatacattagcggcaaggacctcggattggctatgcggcgacttcaaccccttggccaagccgaagccccgatgtattaataatctcgcagttattggcatcatttccaccatacccttgaaaacactgaactgcaagaattacgtttccgcttcaattgaggcactgtgtgaggcaatttatagatgaatgaatatgtagaagttgtatgtattattgtatagcaaaatggatgtatctgggtatcgaaactttagattttgcccgaacttaccaaacctaactgaacaaaactaaaacttaagggtaataaatatagagacactcatctagttggtagataacatttagctgcaaagcggaaattaatcttgaaagcctttgcagacccaattgtcacatggatttccgtacacggataggaggagcgattacggcagtgcaatatccgcgggagctgcccacggaacgagacttggccacgagcacgagtccctggcgctgcaccaagcccttcaaaacgccgtcgatgatgtccaagctcctgccctcgacgacaatgtggcgttcatgtcagacttgccgctcataaagagtaagttataattccctagatctatacactatcataagagggaccgacaagttcttatttacgattagttgtgatattttacataccaacccaaaaacatccctttgagtagtaatcctaaatggtcgtacccatccacacgatttcaataaaagttaagttgtatatgcatatgctcatatttttttggatcgcggattcaattactttaacttatttactttattatttcctgttcgattaatgtaaattatgtttagatacaagttatataaatattactgcatttatattgtaatgttatccaaaatatatattattattagcatattcatggcgaacttgcaagttacattccactccatgtggcgttcgaggcggaacctcgaacacgcctaaataacaatacgaggacctacccctgaacatatcgagtttgtgtgcattgtgaaactcaatcttgcgcttctaattggcaggattcgggtaaaacgatgcccacgtcctggtttcacacttggcaccgtcggaacaataacaacaaaagccataataatatattttccctagcatatgaacaatatggtgtactatacatgctcatactcatggaggctaattttcggtgttgcgtttatttgcaggcatgaaaagcggaaaagaagccgggaacattggatcgggttcgcccagcgaggtattctgtgcagttcctggtcgcctcagtctcctatcgagcacctcgaaatacaaggtcaccatagccgaagtacagcgtcgactctcgccgcccgagtgcttgaacgcctccctgctgggcggagtgctccgaaggtgggttcagatggcatccccacctggttgggtcgttagctaaccaatttcgcgtttcagggctaagagcaagaacggaggtcgcctgttgagggagaagctggaaaagatcggcctcaatctacccgccggtagacggaaagcggccaacgtcaccctactgacatccttggttgagggggaggcaacgcacctggccaaggactttcacttcgtttgcgaaaccgaattccccgccaggcagctggccgagtacatcgtgcgccaccaaacggagccgcaggactcgtaccgtcgaaaagagctcattctccactcccagcaggtatatttatatttataacgtataagtcttccactaaaaataagttctattgtatcagtgctgattaaaaactacacatattaactccgtaaaaatattccagataacaaaagagcttatgcagatcctgagccaagatcgaacgacccactttgggacgagatcacagcatctgctggaaccatcgatgcagcgccacttgacgcacttctccctgataacgcacggattcggatcgcccgcgattatggctgttctgcacgcttttcaggtgaggattcggttgtagtattcgagaaatggcagccactaggtccaaaatctctcattgcagacatttttaaacgagtcattaaactacttggaaaagctgtacccttcgaacggcggagggatggtgtcgtcgtcgttggacaaaagtaaaattgacaacgaaaagaaatgataggctatgttgtatattgccacagattgaagcaagccgtactttaagattaactttccatacactaggcacaacattaataaaaattataaaattcctgtaaattaatttatttagttaagtgtaaattattggacattttgtatatctataactgtaatttgaatgtacaatattcaaatatattaaatacgtataatttatttaacttagaaaaatacatcgacattttgtgaaaagcacaaagctttttacaactaattcaaacaaaatctttacaaatacacttatttgtatgtagaaacgattgaaatgctctcatttttaattttttaagtaacttacaatttaaagattttaaaattatacaaatgaataaaatgtgtttttaaaactaaactcgataaatccgttaaaataaaggcatctggctaggtaggaataaaacaaatcgtcaagtaagtacaagtaaaatagggagatagtcgatttccttcacccttctgatcaagatgtgaggtgtgaatttgttgaaatatttagtgcaattagcaagaaaaacattcttgaaaattgtaggtctgacttatgaacaacaaactacaaatcaaaatatagtgtttgtagtgtagtgtttgcatagcgttttctgtcctctcgacgttcatacggacagacagacgaacaaagccagatcgatatacttaaatgattcggaaacgcttcctcccacctaatctggtataatttttaccgaatctggtatagcctggtataattatgttagttttaaatattgctattccctgagaaacccaggaaagatattttcgaagagttttaccgttttttaaaagtggaagtatttatttacaaaatgaatcgacgctttaaaaataaaacaaataacatgataacaattaggcttaatataattaagaatataattggagtcattagactatccgcggattgcattcctgttaaataatcattgttttgccctagttttgcgatctcctcacccaataaatttttgattaaatttatctcgtgttctgaaacaaacaaatatgagactttgtagttgaactaaatgtatataaataccttcattttccagtatggttacgtctattatagaagatttcctttcctcggcgttattttgcttcgtcggtgcaagccacttaaattgttcacaattattgtcctgtgaacgagattttataatactttgcgatatcctaaggggtaatggtgctctctctaatttgtgaaattcagttatacgatttagattctgcaataaacttgatttgtgcgagtttattgcaaaatctaaaaacgttattagcagccagtagcaagccttctccagatgcgtggagtcgaggca

SEQ ID NO: 17333 - DNA, 1998 bp, DROSOPHILA
tactgatgctgatgcgtcggtgcggcaaagtcgaaaaattcgagaaagcgcgaatcggatttagaatttagaatttacaacttgtgattgtgatccgccgtgatatagcgaattagcgaattattctggaatatatcgacttgtgccccagaacagctggatagccccatcgatatgtgtgcataaggtttcggcggacttaaatatgataacatgactttagcgtatgtggatatgccagctgtaattcaggttcaggaacgcctcagtggacatgggagtctagggctgtccagcggcagtgcggcgtacacaacgcattccggcggccacacgggacgcagcggaccggccacggggcacagtgggcacagcagcacccatggatcggcggccaccatgcaccaccagtcgctgcagtccgacttccagccgccgtacttcccgccccccttccaccactccacccagagtcctccccagcaacagaaccatggagccctcgagtacttgggcacggatccgtatggccagcccctctcctcgcttcaccacgccccactgcaccactacaaccagctggcgggactgagatccacgcaggaccaactggggatccacaggacccacagagaggctgagctgcagggacatgtcacccaattgtcacatggatttccgtacacggataggaggagcgattacggcagtgcaatatccgcgggagctgcccacggaacgagacttggccacgagcacgagtccctggcgctgcaccaagcccttcaaaacgccgtcgatgatgtccaagctcctgccctcgacgacaatgtggcgttcatgtcagacttgccgctcataaagagcatgaaaagcggaaaagaagccgggaacattggatcgggttcgcccagcgaggtattctgtgcagttcctggtcgcctcagtctcctatcgagcacctcgaaatacaaggtcaccatagccgaagtacagcgtcgactctcgccgcccgagtgcttgaacgcctccctgctgggcggagtgctccgaagggctaagagcaagaacggaggtcgcctgttgagggagaagctggaaaagatcggcctcaatctacccgccggtagacggaaagcggccaacgtcaccctactgacatccttggttgagggggaggcaacgcacctggccaaggactttcacttcgtttgcgaaaccgaattccccgccaggcagctggccgagtacatcgtgcgccaccaaacggagccgcaggactcgtaccgtcgaaaagagctcattctccactcccagcagataacaaaagagcttatgcagatcctgagccaagatcgaacgacccactttgggacgagatcacagcatctgctggaaccatcgatgcagcgccacttgacgcacttctccctgataacgcacggattcggatcgcccgcgattatggctgttctgcacgcttttcagacatttttaaacgagtcattaaactacttggaaaagctgtacccttcgaacggcggagggatggtgtcgtcgtcgttggacaaaagtaaaattgacaacgaaaagaaatgataggctatgttgtatattgccacagattgaagcaagccgtactttaagattaactttccatacactaggcacaacattaataaaaattataaaattcctgtaaattaatttatttagttaagtgtaaattattggacattttgtatatctataactgtaatttgaatgtacaatattcaaatatattaaatacgtataatttatttaacttagaaaaatacatcgacattttgtgaaaagcacaaagctttttacaactaattcaaacaaaatctttacaaatacacttatttgtatgtagaaacgattgaaatgctctcatttttaattttttaagtaacttacaatttaaagattttaaaattatacaaatgaataaaatgtgtttttaaaactaaa

SEQ ID NO: 17334 - protein, 461 aa, DROSOPHILA
MTLAYVDMPAVIQVQERLSGHGSLGLSSGSAAYTTHSGGHTGRSGPATGHSGHSSTHGSAATMHHQSLQSDFQPPYFPPPFHHSTQSPPQQQNHGALEYLGTDPYGQPLSSLHHAPLHHYNQLAGLRSTQDQLGIHRTHREAELQGHVTQLSHGFPYTDRRSDYGSAISAGAAHGTRLGHEHESLALHQALQNAVDDVQAPALDDNVAFMSDLPLIKSMKSGKEAGNIGSGSPSEVFCAVPGRLSLLSSTSKYKVTIAEVQRRLSPPECLNASLLGGVLRRAKSKNGGRLLREKLEKIGLNLPAGRRKAANVTLLTSLVEGEATHLAKDFHFVCETEFPARQLAEYIVRHQTEPQDSYRRKELILHSQQITKELMQILSQDRTTHFGTRSQHLLEPSMQRHLTHFSLITHGFGSPAIMAVLHAFQTFLNESLNYLEKLYPSNGGGMVSSSLDKSKIDNEKK

SEQ ID NO: 17335 - DNA, 4451 bp, DROSOPHILA
ttgtatggtacacacaaacacgcgaaaaggaacatgaacacagatgaagttaagttgactgtgggcttatttgtgtttatagatgggtgccaacgtaatcacaaccattgttcactatttggattcataaatcttaagtttcactcgagttttaattattttaaatgcgaaaacacagaaaaataggcatacaaatttacagacgctcgaattttgctgtcaaacggagcagacaatctcttgctctctctctcgccgttcctctttccatgcgtttcgtcctgcgagagcgaggcagctgttcgagtcctgtagggaaaggtccttgttggtggtgagaggacattcgcaactgtcaaaatgacagcgaaacattcacagagcgcaggcgcatgtttcgtttcgttccaaaacgtttaaaggagcatatcctgcgattccagcaggggttgcaattcgcacaccctctctcgcaccatgattctctagagaaagagagtgagagggagagagagagagagcagacgacaattacctgaagaattggcattagcccattttcgttgcgttataaattgcgtttgtcactttggagcattcgcagactcgagaggtcccaaacacatacgcatatcctgggtgtgattttacatttccacccactccacccacttggcaatgccaccccaaaaataccccatctccatgcaattacatttaactttccttgagcagtctgctgggttggaattaattttcgattttattgtcagttagtcaaacccacttgcttagctgtcgctgcgcctgactctgatttaattgaaactgcatgaatatgcaatttcgggctataaattgaaatctcgatttctccgcccaccccgtttttttttatagccttttggaattttcacttttaatggctctcagttggctccttaggagttttcaacacacacacacacactacgcactcacatatttgtacaagttatagaacagactggaggccaatgtgaacacacctgaacatacacatatataaatccataaaaatactgctaaagaatccgaaggatgtgggaaaagctggtgaactgcatcaagagcaatggtggcaatggtggcgtcaagaatgtaagctgccaagttgtcgaactggcggatctgatgaaacaggtgccgccgaaccagatgcacaagttcaaaatgtttgccaagaagcacgaggagtacaaggagtaagatggggtcaccaaaaacagggaattggggtcacctgggggagcatgaattaagtctaccttagaagggcagggtctttactaattatttaggttacagcttatgttgctttatatgagaattatttcccattgtagagaataatataaatatattttatagccgcgttcgtaagtatccggaatcgatgccgacaatcgactgggaatactaccgtcagaatgtgagagaagagtttgtcgattgggtgaagggatacgagaccaagtatgataaattgcattccgtattcgagaatcgacatgccatagtagatcacaagcgatactttgaactcgtcgatgaagaaaagaaggtggtgacaaaatgtattagcgaatacaaggcggagtcggataaaagaatccaggagctaaccgaaaagttggagttcgtgaaggcaatgcgaccctattccgaaatgaccatggaggaattttgttttgcccgtccgcacttggcacccgatttcatcaacaagcccactttctggccacacactcctgaagagcaaatgccaggtccatcggatccagaggcagcagctgctttgcatcacgaagaggagcccgaaccgccaaagaaaccagctcccgaaaagttaccagataagcctagtggagaaggaaagcctccggcggctgcggctccaaaggagccaaaagaacccgttgtcgacacctctcagttggccgaaaaggccactttaatcgccaaagatttgatggccaaagctattgttctttttaatagtcttaaagaaaagatgtcgggtctggccaagaatgttcagaaaaaggcagacgccgccaaagctgcgcgttccgaaactgccagcaaatccgcaacgcctacagccgcaccaaccaagtcactggacagcattacggaacgagagtctggaccgaacatctgcaaccaaactataatacgcagcgaggaggcagaggccaatccggaggttaaggccaggcatactaacctttccattgaggcggatccttgcgatgcccaggaggagcgagccagggagatagctaggacattggagcgcaagagacaattaaaagaggcggaggaatgggagaaacacaagaccaagaaagatccttgtgacgccgaaaaggaaactgatccttgcaagctcatggaagaggaaaccgtttgcaagccagatccttgcaaagcgaaagaggaagaagcagtctgtaagccagatccctgccagcagaaggagaaagaagatgacatttgcaagcccgatccttgtaagccgaaggacgaagagggctcctgtgaagatgaggaggatccttgcaagaagaagccgaaatgcgatggtgattaccaattcggtggtgacaatgaaggcggttcgacaaaatcgaagcagcaggaccaggtcttcatcaacatatccgagtgcagtaaggaactcgccaagcaggaagaaaagaaatctggtgattcgggtaagcccaaggaaaaggcatcactgtcagaaattccacaaggatcagatcaaaaacccgtgcttggcatgcagataacagaatccaaggactctaaaaaggatcacaaagctagtattgaaggcgcaaatgaaattggtcctgtgtatacagatcccaatcaacttgcagagctgctagtccagaaaaaggaaaaaccagttataattgaagaagcacagaagcccgaagatgacaaaccaattaccatatatcccaagctagagatatcagccaatccgaagggcgatcaagtcaagcaagaagctgaaggacaaaagtcacccaaggatatggccaagcaggtgttcacaatggcctcaggagctgctactctactaacagaagccaccaacacactggaggacttgaagaggaagaaggaggctcgtctggaggcactggaacaggcctacacttcggcccaaaggcaggcccaaggagctctggccgaggcatcgaaggccgtggaagccgccaacaatttggccataagatctgccgaacaaactggcgaagtgagcagccgagatcgcgaggcattggaaatggccgaaaagcatgccattttggccaaaatgctggccggacgtgcagtggccttgaaggacgaaatcgctcgagttctcaaggatcttaagaagaaaaagtaatcagcacaaacactatttcgtaataattttctaccaatttgtgttagttgtttttcgtattaaattttatgttacatttgtttaccgttcaaagtttcgctttcatttgatttcgaatctcgttacgtttgttttcatgcaaatttttttccaggccagctttgctgaccaaaaagttggttggtgggcatgggcaataaatttattcttttccactagcttcgctttgctgttacggctaaaaagttttctatttggattttgcaagcgaaatgagtgtgaggcgtttgtagattgcataattatgctaattttgttgtttatccacccgccaagtgtaaaggggtatagtgtgcggatatgaaaaggtgagtttacagaattatcaaacctgtttttacatctctgtatgtgtttactaaaaagtgcatttgtattgattgttttacaataattgaaggtgagtttatcctaccttatcacaatcttacctgtaaaaaaagcagggtataaccaagtcaaactagtccactttttagtttctccattttgtttggcatttcaaagcagccgttcgaaaagtgttgcctacattttggcgcagggttttcgcaatcaaacacatttgcataattagctggtcctgcttgtgtaagtgtgtgggtgtgtgtgtgtttgtgtgtgtgttactgttcttgctggtgcgtgtttaattccagtttgatagtttgttataagctttaagctgaaacattccttttgttcgcacataacaatggctcggtctgctttttggcgggcaatgtaaacatttcgcttaaaccctgctttaatttatgtgtattcattggccaacacagctaggtatataaatgtgcatacctatatatttgttaacttaagcggcgttaaacaagccatataaattcaatttgaaagcgctttgtctgccgctttttgtgagttttcattgtatccaccttatcgcttaatcgattac

SEQ ID NO: 17336 - DNA, 2285 bp, DROSOPHILA
aacagactggaggccaatgtgaacacacctgaacatacacatatataaatccataaaaatactgctaaagaatccgaaggatgtgggaaaagctggtgaactgcatcaagagcaatggtggcaatggtggcgtcaagaatgtaagctgccaagttgtcgaactggcggatctgatgaaacaggtgccgccgaaccagatgcacaagttcaaaatgtttgccaagaagcacgaggagtacaaggaccgcgttcgtaagtatccggaatcgatgccgacaatcgactgggaatactaccgtcagaatgtgagagaagagtttgtcgattgggtgaagggatacgagaccaagtatgataaattgcattccgtattcgagaatcgacatgccatagtagatcacaagcgatactttgaactcgtcgatgaagaaaagaaggtggtgacaaaatgtattagcgaatacaaggcggagtcggataaaagaatccaggagctaaccgaaaagttggagttcgtgaaggcaatgcgaccctattccgaaatgaccatggaggaattttgttttgcccgtccgcacttggcacccgatttcatcaacaagcccactttctggccacacactcctgaagagcaaatgccaggtccatcggatccagaggcagcagctgctttgcatcacgaagaggagcccgaaccgccaaagaaaccagctcccgaaaagttaccagataagcctagtggagaaggaaagcctccggcggctgcggctccaaaggagccaaaagaacccgttgtcgacacctctcagttggccgaaaaggccactttaatcgccaaagatttgatggccaaagctattgttctttttaatagtcttaaagaaaagatgtcgggtctggccaagaatgttcagaaaaaggcagacgccgccaaagctgcgcgttccgaaactgccagcaaatccgcaacgcctacagccgcaccaaccaagtcactggacagcattacggaacgagagtctggaccgaacatctgcaaccaaactataatacgcagcgaggaggcagaggccaatccggaggttaaggccaggcatactaacctttccattgaggcggatccttgcgatgcccaggaggagcgagccagggagatagctaggacattggagcgcaagagacaattaaaagaggcggaggaatgggagaaacacaagaccaagaaagatccttgtgacgccgaaaaggaaactgatccttgcaagctcatggaagaggaaaccgtttgcaagccagatccttgcaaagcgaaagaggaagaagcagtctgtaagccagatccctgccagcagaaggagaaagaagatgacatttgcaagcccgatccttgtaagccgaaggacgaagagggctcctgtgaagatgaggaggatccttgcaagaagaagccgaaatgcgatggtgattaccaattcggtggtgacaatgaaggcggttcgacaaaatcgaagcagcaggaccaggtcttcatcaacatatccgagtgcagtaaggaactcgccaagcaggaagaaaagaaatctggtgattcgggtaagcccaaggaaaaggcatcactgtcagaaattccacaaggatcagatcaaaaacccgtgcttggcatgcagataacagaatccaaggactctaaaaaggatcacaaagctagtattgaaggcgcaaatgaaattggtcctgtgtatacagatcccaatcaacttgcagagctgctagtccagaaaaaggaaaaaccagttataattgaagaagcacagaagcccgaagatgacaaaccaattaccatatatcccaagctagagatatcagccaatccgaagggcgatcaagtcaagcaagaagctgaaggacaaaagtcacccaaggatatggccaagcaggtgttcacaatggcctcaggagctgctactctactaacagaagccaccaacacactggaggacttgaagaggaagaaggaggctcgtctggaggcactggaacaggcctacacttcggcccaaaggcaggcccaaggagctctggccgaggcatcgaaggccgtggaagccgccaacaatttggccataagatctgccgaacaaactggcgaagtgagcagccgagatcgcgaggcattggaaatggccgaaaagcatgccattttggccaaaatgctggccggacgtgcagtggccttgaaggacgaaatcgctcgagttctcaaggatcttaagaagaaaaagtaa

SEQ ID NO: 17337 - protein, 734 aa, DROSOPHILA
MWEKLVNCIKSNGGNGGVKNVSCQVVELADLMKQVPPNQMHKFKMFAKKHEEYKDRVRKYPESMPTIDWEYYRQNVREEFVDWVKGYETKYDKLHSVFENRHAIVDHKRYFELVDEEKKVVTKCISEYKAESDKRIQELTEKLEFVKAMRPYSEMTMEEFCFARPHLAPDFINKPTFWPHTPEEQMPGPSDPEAAAALHHEEEPEPPKKPAPEKLPDKPSGEGKPPAAAAPKEPKEPVVDTSQLAEKATLIAKDLMAKAIVLFNSLKEKMSGLAKNVQKKADAAKAARSETASKSATPTAAPTKSLDSITERESGPNICNQTIIRSEEAEANPEVKARHTNLSIEADPCDAQEERAREIARTLERKRQLKEAEEWEKHKTKKDPCDAEKETDPCKLMEEETVCKPDPCKAKEEEAVCKPDPCQQKEKEDDICKPDPCKPKDEEGSCEDEEDPCKKKPKCDGDYQFGGDNEGGSTKSKQQDQVFINISECSKELAKQEEKKSGDSGKPKEKASLSEIPQGSDQKPVLGMQITESKDSKKDHKASIEGANEIGPVYTDPNQLAELLVQKKEKPVIIEEAQKPEDDKPITIYPKLEISANPKGDQVKQEAEGQKSPKDMAKQVFTMASGAATLLTEATNTLEDLKRKKEARLEALEQAYTSAQRQAQGALAEASKAVEAANNLAIRSAEQTGEVSSRDREALEMAEKHAILAKMLAGRAVALKDEIARVLKDLKKKK

SEQ ID NO: 17338 - DNA, 39746 bp, DROSOPHILA
aatcacaacgtttaaaatttcaaaatcttctcttaggtataattgttatttttcatttgtccgtgtttttttttttatttttttatttataagcttcatttgttttcttgatggcacataagtttcacacattcatttgcattttggatactttgtgacttacttcgaacactatgctagctaagaaatgacaaactttcaatacaaatatatagattaatgttaaacttcttggtgaaaagttgttttccatgctggcactgcccttcttcacctatttcctagttatacaataagtttatagctaactcggttctaatgctaatttgtgactgattttagcggctatgcaaaatatatgtatgttcaccattgtttttgctataaaatagattcgaatttaaaacattctcaaaccattcgttactttcgtcactttcgttactatcgtattttagctatcgttgctctctacatttatgtatgtacgagtatgtatgtatacatcaacaaatatatttgtcaagtggcacaagagtttcatttaagtttctgtttcggttactgcgtttttcgtgcttttccacactttctacttcgctttcatgttcgttaggctaacatttttgaggcgccagactcattcagaataagccgagctttaaaatttcgttatctaatttcatttatacttattttatatgtatactgtgtgattcatagccatacaaaagttcgtatggctatggaaaatacatagtttttggaataagtttcgaattgggacttttggattttcttgtacttgtactgctgcgtattcaatatttctattgtctaacaactacgaagttcttaacgttttatgcgatccttattgccaaatactacgagccgaaaccatctacttagcatgcaccattcgtttttttttgcttttgaaaatcaataaataacacaataaataataacacaaatgaaatattttttttttttttttaaattgttatatattttgcaaggtaaagtaaactaaaaatataaaaattacttaaacttaaaataaaccattacgaactaagaagaaatttcttttctacagtagattgaacataaacgtattcaagataaatatatgtatttataatgtataataacatttcattttcatttgccgttttgatttcgaatcaattaaggaagtacactgggttcatttttcaattttaagttttttcgtcgtttccgtttccgttaaacaagtttctcgttttttagcacacgaaaattccatttaccgattttaaatgtaacttttgttttgaacttatgcaatttataatgcttagaggaaaaactgatatgctaagatttgtgtgtgttcgttttcgtgtattctgtatgttaaaacctaaatctaaacctctaagataataagttaataattataatagatatacatattacgtatatgtataattattttaaaatgcaataaattagtgtttgtgtgtttcgtttgtgttagcatttttaaaaaatgaacattagctaggcaaaggcgaaaggattataatttttaaaattattactggttacttgcagttatgtaaagaaattaaaattaataattattacacatgagatcacagtattagagacataagttaaatattttcccatttcaattacatcgaatatagttagtaatcaatcaatttgctttagttaggctttgtatggttagtaactctgttttgtttgttcgatttcttgattctcttaatttcatgattactcgatatctcgatttcctatcctgaccattcttggatgtgtgaaatattatctaggctaactgtagcatattgtatcttctttactatttaatgtcttgcatagattttgctgttagcacaaccccgttcctacgactaccgtttaagtatacactaagtgattattcagcatcagcgattgattccactcgacggcttgccttccggatgagctctacttctcctggacgctgacgttgtccttgtagaagaagggctgactggagtcctggccaacccaaacgtaattgaactgcctgggactggtgagcggcgacagggtgccatagtcggatgtcagctcgaagggaaaggcgctctcgtcgagatccagagccagggccagactaactttctgtgttgcagccggagctggtgttggagttggagtctgggcctggtcaacgctggatgccgagttctctagtctctacatgctcgcactggaggtgactatggccaaatcggcggagtgcagcaggtgatgctgctgatactgctgatgttgctgcaggctcaaatgatgctgctcctgttgttgctgcaactgctgctgctgctgctgttgttgttgctgctgctgctgttgctgttgctgctgctgttcgccgcgcaccttttccttcttgatgcgctgcttcagatgcaccttggcgtggcgcttcttctcatcggatcgcgcgaacttcctgccgcaaatgtcgcagctaaagggcttctcgccggtatgggtgcgaatgtgggtggtgaggtgatcactgcgactaaagctgcgcatgcagatgcggcactggaagggcttctggcccgtatggatgcgtatgtggcgggtgagctcgtcggaacgggagaacctacggtcgcagttctccaccggacaggcgtagggtcgctcatgcacgggcgtcttgctggggcgattgggatacttgcgcggcttcacgggcaccagtttcaagggcacagtgctctgctgatagacctgcgacaggatctcgtgtcccttgctggtggatggactgtactcggccagttgcactgctgctgctgctgcagcagcggcggcagcagctgccgccgaactgccaccagatccgccggaatagccggtgccattcgagctgggctgcatatcgggatagttctcctgcttgggtattaaaacgcccagagcggcattgctggaactggcggatgaagtgggtcctggcagcaccagagtctgctgttgctgctgctgctgctgcacctgctgcacttgctgttgctgctgggcatagtccgctggtgagtcaagccattgatatttcggctgtgatcgcacatactgttgctgttgcaactgctgctcgtgactgctgtgcaggtcacccagacccgggaagccggcggaggctccggcgtaacttggtggcggttgtttcagcaagagaggtgtgcaatccatggtcaagcccaagagctcggcatgctgtgccgccgctgctgctgcagctcgtccatcgtcgtagggcgagggagcagctcctgctgcttgctgttgttgctgctgctgctgctgctgctgctgctgttgctgctgctgctgcatggtggcatagtgagcgggcaggctgaacaggggcggctggaacatggtcttgtccggactgggcagaccccagctgttgcccaagctatttgagggcggagacatcggtcctgccaggacgcccagttgcggggagggaagttgttgctggtgctgctgctgctgttggtgttgctgctgtgctgcggcggctgctgcggcagctgctgcgttcatcgcgttgcctgtggtggtgaaaatgccacgatatgagattttgctagcctgctgttgtgattgctggtgttgaatggcatgttgttgatagtgttgttggtggtgttgttgctgttgctggtgttgcagttgttgttgttggtgtagcggctgttgttggtgttgctgctgttgttgttgttgttgctgttgttgttggagttgttgtagctgactgtgatggtggtggtggtgatggtgatgatggtggtgatttggcaattgttgttgttggtgtaatatttggtgttgttggtattgttgttgcggggagctcatgtgttgctgctgctgctgctgctgctgctgttggtgactgtggtggcaattgctgttgctgctgctcgtgttgttgtgttgcagctgttgttgttgctgttggtgtgattgtgtatggttgcctggtgagccaacgcactcggtgttgctttcgcttgttgtctgtttgcttgttgttgttgttgatgatgatgttgtgttgttgttgttgttgttgttgttgttgtgttgtgggtacatattacaactattattacttgattcttccttgacaatggccaatgctggcggagtgctgcgctcctccttcaacggactgcaatgtgacaacacgggactggccacagatatcacctggggttccaaagacagatcctcggattcgatggaacctgcaattgaggacgaaagtatatttgagttagttgagtggttctttttaaggaaatattttcatcctaatgatttaaaagtcacaatagtgcaatatttcttgaacctatgatctgtttggttttttgcataaagttctaaagaattccatgccgcattatgacagaatgaaaccctctggctgatattttgggttatatgaaacagtaaatcattgccctgaaagccttgattgctggtgtgctgcttgagttgctggtgttgctgttgcaacgatatcaatcacagttcgcccgaacggcattggcattggcactgggcaactgcaactgcagctgggcgcgctttgatttcgcggaaatcgaacgacacgggaggtcgcatcatcgctcatcgctcatcgtgcccagaagtccagaggagcagaagtgcagaagctgccagttgccattgggggccaggcaaaagtgtcggcgagaagactaattacgcggctaccatgccgggaatatatcttttccagctctactctactccccccccccctcgtttctgtttctttttttttttactgctcacgattgtcgtcattaatgccggagttggagttgagctttagcctggatattgattgagttgcaatgcgcctaatgtgctgcgacatcaatctggttttcggagtggcaaagcgcgcaatgcattgcgattcacagaaattttcgcgatagcgtttctattgttccataaaatatatatttgcaagccccattaatgctgtcagggcaaattatgtgtgccgccagaaaaaaaaaaaaaaaaaaccaaaccaaaaaaagaaaaagaaaaagaaagaagaaaaagttgacaacaaattatgtttcattttgtgacagggccgaaagcagacgcattccagtctggccaatatggagccttggtccaaccaactcgtccaaaccctccaatccgagtgagtgagacatggccagcagtttcgccagcttgccaagtttggcgattaaatgccgctccatcattgtcatgcaaattgttttaatggattttcatttgaaaattgcccatgtctatgatttctgccgttctgctgcttcgctgtgcttctttcatttagcgttttggccaagaagtcgtcgctgcgtgggttgtggccagaatttacgagtgacatttttttggcttctggcaaactttatagctaaaacatattttagacacaaatgaatctgatatatgtttttatgcattttcaatggatctaaacgctctcggcggctagagatgaggcgcaaaatttgtcattctttgtggcagagaagagagcaattaaactcaattgtttttgatagcagcagcagcagcagcaaatctagtatactttatttgctttgccttaattcaattagaaatgcagctccatatgtccgtagatatatacatacgtatatatatattcaagtccgatacgcgtatcttgcggcagcgtctagtgagaaaattgcgctcgaaacattgacactgaacggaaatgtttaatacatgcgccgctgttgttgccttctctagattaattaagcgatgttgttgctgttttgttgttgttgttttttttatatattttttttattattagtatgcagtcttagaaatatgagaacgctgcgccgtgatcattgcaaaattcaattttatttgacattaatgaaaagtgagcgcaaaaataaaactgaaaattttatgacataaattttgtgaagtctatacggcgatatagccattgggatgtcaacatttttattaatttatatttatgtgagcaaagaccaaaagtatatatgaaactcttggctggaggccgctttaaatgcctcataacttaataatacgaaacgaatttattacggcaaacgcacacaccaaataacaaaatctcaaaaataataatgaaaaaaaaaagaaatccaaaattgaaaaacaagatcaacaaatcagaagacgtgcaaataaagaaatgcctcaaaaaattggtacttcaacatttttcgaatgtttattttcgattttgaacttgccgctgtggggcaagggggcaagccgaatggagaaaaggttgtggtaagtcgtccggtgaaagacaaagccgagatactttggagtggcgcagaagtaagtcaagatatggggccaacataacgacagtttctgcgctctccgctcgagctgatttatgttgagacttaggactgacaacggattagttgcggactccatgcggactgcaactgcgccactactgccactgcaacatgtggcagctgcaagctgcatccattagcagcagataaagaaaactcacggtccgacttttcctaccagacgatggggcgcagccaccaggcaaaactctataaatgttttgaggcttttgtgtcgacgatttataggccgtattacaatattgaactatcttgacaaggaatatatatgtactttcgctacgttctaaattatctccactacggtagttcctttctaaggagatacgagtatttatggaatgaataaaaagctaagattactaactctgcatattcgtactagcgaactgatcaacaaaaatgatttcaatatgtttatatgttttgtaatgtaatgtaattcttataagatctctcttaatgcaactatcagtccaagtatttcatagtttttagtactcaccagtaatgggcggtggctccacgacggtggtgggtccgaagaacgagggaatatcgctggacgtggtcaccggtgtgttgaggtcgcccggcagcgcctcgatcagctgcttgtgggcctccacctgctcgacggccgatgaggtgggactatgctggccactggtgttcagcaggctgagatgggaggccgaactgcgtccgctgctggcggtggcgctgggctgtacggccacgtgtcccggactaccgccctgggtgggcgtggccgtctgattgcgggcacgaagcactgaattgttggcggatgcagcagcggcggctgcagcagcggcagctgccgaagctgtggtgtagtggagcagcgaggacgacgtggacgacgaggatgcggtcgaggaggagttcagggagttgctgctggtgctggcgccgccgtgatgactgcctccgaattgggcgggactcaggtaggtggccgtcgacggactgccgctgctctgggccgccgtgctcgtcttgaacagacaggtgtcgaagctcagcacattgaagtgagcggccgcggccgtctcggtgagcaggaatgcgtgatgcgttggcgccaccagggtttcaagcccttccatgatcatggccgctgatggagttccaggggctacgccgcctgcaaaaatagaaagaaatgcgaattaataaattgagcagagctataacttaggtactaaatataaagtaaagaatttatacttcagttatttgttacttattatgtgcttatagtttccaactaattttatcgaactgatatatatttctattaaatttaagacgaaatgtcgagtgcaatcaaagctgttgaccgcagacggacacaaatgcaaaatcataattgcgaatgccgcgcactttggctttcaattgatttgccacgacagctgttcgattgcataacccgttcgctgaatgagtgagtacttcgggtcatcaagtggtgaaattacttaacaatttaatttgccatcgagttgttgtctttggggtctctgtcgcagagactttcgcctcctgcgcccacgattgcgatcgcaggcaattaaattaagatagattaagcacttagcagctcgtagtttgcagctctgagccctgagaagtagaacagtcgtctttcccatggctcatcatcatcattgtcatcctcatcaccccacaggtttcggatcggacctcgattccgggaagtgggtcattcggtgaccttacgcaatccactgccgcaaacttatgcaagtctctcaattagagatgtggctggccaatttttctaaacaaatgtctcataaacttggcttattatttattttgtagttatctctgtccatgtctatggctatggctatgtgtgtttatcacagataaactaaccgaatttgcgattgccatctgcaacgagtttgtggcattgggtctgggtcttcccccgccattcgatgtggcgtcatccgaggctctcgagtgttgttttattttattatttttacattttttccgttttttttgtttgttttttttttttgtttttcctccgtggcaaaggcttgaccgcgttgatttgcattacaagtgcacttgtgttgacaggcagctatgcgccaaaataactaccgtgccacggcgtatctgtcggatgtacgaagaggcaacatcggcggaagagagcgtcccgcttttggcacttttgctttttttttttctcctttatttacatttgatttcacgcataatttccatggcaaagtgcactccagacgggcagcgagtgaaattacattcaaaaacgtcgggccgcagatataccgactcagataccgactacagctacagatgcagatacagatacatttacacagcatgttgtagatacacatttgtgttggctgagaccgcgcgtgctgtgctttgtgcctttttgtgttttgttcattcataaaattatgcgcccgagtcaataatttttacagtcgatcaaagatttgtatctgcctttatttttttaattttttttttctcttcactggcttgccacatgaatcatccgcgggcggccgaaataaaatccaatacctcgaacctttcaaagtctgaaaaactggttggagtagagagcatcgaatcgaagccaactaccacctctttggacttcttggcccggtctttgtcttcccctgtggttcttaataacttggctaacaattgacactcccttaaatgaaaaaaaaaaaaaaaaaaatcaagaaaaaccaacaacggcaagcgatgctgttgcttatctacagtggcaactgcctaagaagattacgattggctgtggtatgaaactttgactgactaacagcgcaatcgctttagagatcttgcttgacgcccgtttaccatttagagattttccgattttccggctcacaacgttcgtcataggcaagtgccactgtttcgtaccgacgtctgcgtttatgtatattgtaaatcttgtctccggcccggatcccctgacttctttcactctgcatatttttgcatagcatttttcctgattttgtttttagtgtagtaggacagacaacacaacacacgtcaagatcgctttgccatgaatgaatattggcagtggctgtgcgccagagtgagatggatatccgaaagatacatttaacggctcgatgaggaagaaaaaaagaaaaaaaaaaaagcgccgagcatgaaaaaattgttatgttgatattattttaattaagttttgccaaaccggttgcagctgtcgctataactctagccatttccatagttccacttggagttctatacgctcttcccccctccttattattattattattattatttcgccccggtcgagagtgttaacaatcgtatagatgggcgccaatttgtttgctttggcaattgaggaagggggaataggataggccatggctgacccccaggtcccaggttatttttttgatttttaaccatttgttttcattggcagcattgaagacctcattgaggattaaattttgagacgcactaagcgacctttggctacttaacggctccaaaaataaactacaagtttgttgtcttgggggatcttgtgcaatactatacggtactcaaatatcgacagatttgcattcacagccttggtacacagcacgaaaaaaaaaaaaatatatctcaattaataataacaataataatacaagtttttgctttgttttttgttttcttattaatatgaaaagaaattggagaaacgtttaaaggagaagggatggcgatcattagtcaaatatgtgtgtgtgttggaaggaaaaagtatcttgcagatacatagatagaaaacatgcaagttgcatgcgacacggagccaaaacgaaacgatgatggaatggccgggcggcaacaaagtccatcattcacacagcgggagcaggaaccccatctcccaatcccccaattcccccaccaatctctcctcaccaggagtgtccaacaagttaacatggacaacatgaaaatgtatcttttgccgccgtcttttgcatgcgtaacactttgtcacacttttcatgccaacagctctggttgcctgttttccctcctcatgagaacaattaatgaaaataaacagccgcgggccagacaacaacaacaacaacacgactactctacaccacaccgaatatgtatatttttataaagattgctttttcgcctctttgtttgaaatcattttagtgggcacttaaatgaaaattttcttgtttgacttggcagccaaaacgcacgaaaaacaagacaaaaaaaaaacgcactaccgacggcaactttacgcgtttcggtcacttaaagttgagaaaaatccaaaaggagctgggggatttggtgtcaaagtgccatttggcaactgcggcaagtgttaaatgaactctacgatgacccgttcgtcgcagtcgtcggcaccttttgttttgatctcataattaattgaccaaatacgaaaattcgacgaaaagtgatggaaaagctttttggattgatagatgatagctcggttatgggaggttgcatgtaaatcattttgctaattgtttttcccattccactaactaggaaatgcattagcgggaaagcttttgggcgttttggttcgtaggatatgtatgttacatatgtatgtaagtgcattaatgtgcggaatgcggacggaccaaaaacatttgccatcaaattgtaaacaactgagctgagcagattgctctttttaattgagcgctaagtgtatgacaataatttaattacaaaaactgcaaatggctaatgcagattgcacttgtgcttgcttggccacataaattcggttatacatagttgcagtcgtaaattttgccgcttggctgtgtctctgcgcccaggtgctttctaaataacgtgcagaaatttttattatgcgttaaatgaatttttatatctttcatctaaaactgagaaaataaagtagtctggctatagtatatttatactaatactaagatgagcaggcttctgaaactatcgaatttattcataaaacccaaagcctctgggttatttcaaaattattatctaaatattatttttcaaaatcaaaaaatcaaaaaatcaaaaaaatttaatcaaaatcttctgcagtttataacttttttactatttagaaaatttttaaatttattttcaaagacaactggactctaaatcaaatgccaataggaagtctcaaaaatgtttctgcgctcaaaattgaattttccaatcgacaaggcggcacacataaatcagcaattaaatttatgcttcttagcgttcttataaatttaattcgctgaccaataattcaagcagaattaagaaaatttttcatttaattttaaagaacgaccacaatttcagaacttatttattttatatcgagagcctaagtcactaaaatgtttggtttagcttcacttttttaacaaacacccacctggatcgcaatggcacttgcagaagaattcaaaggggttttcctttggctttttttttgttgttgttgcctttgcggctttacgtcgctcctagtagtcggtctgcgaaattttcacagtcagtttgacgaaagtttcgttctcgttttcactgcgaggcaaaaatcaataaagcactgctcgtgtaatcatcttataaggcggtgggctttcattcatgccgtcgccaatttgccgaaatatcctttcacttttaagtttgataagcacgaaattgcttctatgctctatttcatttatttgtgatgaaaattaaatattttgcttttttggcactaacttattttttttcacttcacaaacgatgatttcaatttatattccgcgttgaacatatatatctgtatatttattgtttgcttgtgaattggctttcttgatttcttgctagcttggctggcttgctttttagataattctatttcaacccgtcgcgtttgcttgtccgaacacaactgaggcacgagatgcgccctctttcggtttttatgaatgaaactcaacatcgctgtgcgctcacacacactgctatgagtgcgggtccctgttcgggcgctataccgcaatgcccctgctcgggcggcacgcgcctcagagtcgaaatcgaaatcgaaaaactcgctctctgcggcggggaaatctcgctgctcatcgacgtcatatgtctcgaatgtatggtatatatatatatgtgtgtgtgagtgtagtatagccggccggtttggcggctcgatgttgatccaatcgtaggtctggttgcctccctacactgcagccattttcatcgcgcacgcgcactccagccaatcaacagtttgccaggcctttccgccgtggtgagtttcgttgctctccctctcacttcgggcaagcagcgctttttcgacttcgactctctccggtctcgcttgaggtaaaaataatacaacaggtaccccccctataccaagaccatttgtgtataagtatgtgtatgtgtattcagtatctctcggtatccatcgattcgtgcgcttgtgtgagacttttagcggctggcaaatgttatgatttcccgaaatacgtcatcagtgtgcgcgaaaattgtgcggcccattagacatagcaattttcgcatcgacgtaaacaactgagatccatccaaaatcgtttgcatgagccggccgccaaaaatgtaccaatttctaaacaaatgattcacttgaccatttatggacagttttttggtcgatgtctggcattattgcatatccgagatacttttcacggtaggcagcaaaggtcagggtggaaaattgtttggaaaagttgttgagcaagtgttttggcaagtatctgtcttaaacaatttacttgctgtgtctacgaaagggggatttgtttgggcaatttcgggttaattgggcacttttatgaactctaacaaatcagtttggacaattggctactccaaaagcttttcgagaatacaaaaggctagggaataaaggttcccatgaaagttacttaatgaaatgcggtttatttccacgcgtcagtggaatcatttgagactggtataatcataggttctggtgactgattttcgtgagaattatataagatggaagacttcttaagttgattgatctatgtgactggtggaaaatatttatgtgcttgactgaacgtgtaaaatctaaagaaatatagttatatatattctcaatatatatttatttttataataataacacgaaatatgatgttgttatttttctctgatgtttttgatgttcttaggcatatttaatctagcttgtattgaaaattcctaacaatgtaagttctgtgctgctcctctgttctgtttctgttccgattctgaaatggacagcatttggaatttcggttcatatgtttatcattcgttcacattgtaaacgaaacaacagttttcatgtgctaaggacaaggttgcacgtcagatgtgcaatgtgcaatgtgcaggggcaataattccgcaaatgtttttactgcgaaacaacataaacaaaactgcagttgcaaatagtgcgaaaataaattttgggcgacgctgtgtaggaattccaataaaaatcttcacagtttaagcttatggatgggttaactaaaatggttcgggttaattaagaaaacctcagaataaccgagacacttttttttgtgtgtgtgtgtgttgattggagcacacgccatgacctaaaaataaacacctgaagatatgttttcgttttgttttttttttttttttgccggcaaaaagttgagcggcacacaataactgagtacgtcagatatctggcaaatacacaagggatacggatacagatacagatacagatatatgcgcccccacccaaaaatagaactttgcctcatttgtgaaagttttttgccaaacaaaataaaaacaaatcgcatcgctcccgattatttttaaccttcacataatgctgaccgatcagggtaaaaatcgaagggggaatattgttaaaatagagcaaaggaaatggccacgtagatgccgacgcgtcggccacctgtaggccaacgtacgcgccaataaaaacttgtgcttttcattgggtcggtagcgaggaaaatgaaaactcattacgctaaatatagcaaaatctattcagaaaatttctataatttttcaccatacattttcgtgtgctctgttgatgttttatattattgctaaggagaattgaagatgggaaagggcgagagggggtgcctgggtgcccggcccctgacaaaacacccacgaaaatagtttgcaaaatctaaaaataaataaaaagtacacttttgtggccattgtaaattattcgctgcccgctgactgactgactgactggctggctgtttgattgccgatcatcccaagatggacatggttggttgttggattcggattccattcggttgtgggggggcgttcttgtgacttaagcccagctgagctaccaggtgatgactgttgatgactggttgccccagcactgcaccttttacccaatttggtggcagtatctctcagacagcgcacccaggacaggtcgggcctccaataaacgtgcccaacacagacgtctacataaattggcacacagtcattgatggttttttttttttttttttttttttttggggttttaacaaactaattaccgctcgaagttgaggtgggcatatgtacacgcgaagtaacacatctaataaaaagttttggcttgtgcttaatgtcaaatagtgaagttttatgcgagtgcgaccaattaaagtgttttttttcttggttttattttacaaaaaaatatctgtaaaataattgaataaagtgatttcaaggatcattgttctgaaacttaaaactgagaaaccagtgccttgaaaatacgccatgatcagctaatttattcaccctttttgcgtgcttagttcgatacatggtgccttgcctatctgaatatccaacatcgcattgatatctatatctgtctatatgccaatttcacagatgtgtgggtttcctcagccgtgttatctcattgagaacgttgctgaacgtgcgtgggtcaattgctgagacgacggctgatgaggcagaggcgttagatagtcgcaagtcgcaactctcgagtcgcaagccagatgacacatggcacgcgcccagcgcagacacagatacagacacagacacagacacagtcacagatacagatacagatacacgacagatgcagatacaaatatacaaaaccaaaagctgacaaataaacaaagtaacaaacaaacattgccatcaatgccaccaagccgagcttgagcatatctatctgtctgtctgcctgtccttttggccaaggtccgcgttttgccgtaaatggtgaaaagttttgttagggcaacttttgagttaaagctctcgccacgcgtaggctgtaattaaaagcgtattgactggcagtgcaactcgtttgctgccatcccgcttccactccagtgtatagatacaagtgagatatctatgagattcacttgagctgtggctgtgtggctttctattcacttgttattggttggcaagtctttggattgccctcgccgctactgaaattgttttgttttttttttttcgtttttgttgccctatttgaaaagccaatggggtctttgtagggttttcactccgcttgaaaacgcacttaatttctactgctgctgctgctgctgctgcgcattacgcaagccaacttcattttggtttcggccaaataggtgagagccataaaccaatcgacaagtgggcgtcgtcatcagctttggatttgaggtgtgaataaatttatatacctctgtcgcacatataatacatacatatatacatttaacatataattattacgaagtaaccgttttgatagtgcttaaatttcccaacctgctaattgccaggatataaaatataaatcgagtcagcgagtgaagttaaatattattcaccgtctgtccgtatgattttcgttgtaagtttcataaataaaatgtggatttctgttcgtttatattttatttcagttaatttatgagcatcataatatgctttatgatcttggcatgttgccgtaaattgctgcagtcaacagcaaaaaggggggaaatattgttgttcagagacacaaattagaaatttaaacatttcaagaccctcaaaaaatattccattggctgaaatagagcgatggggacaaggagtgggcagggcagggcggtgagatcggtggggcatggagaatcagagaaacagatagacatctccagcgccattttcccccacatttttttttaagagaggtcggcgaaaaatgaggtgagaattaaatttgattttcggttttttatgagttgtcagtattccaaaacaagtgcataaaatctaagaaattagtaagataattagtggcactaaaattgttgctatccgtttttttttggaaaatcctgaacttgattaaagggtgacagtttatgattcgtaaatttagcaacattaggttggattttttaagacatcactatgagcctatcttgtgaataaattgtagaaaattatgtattggttttatattcagttgaatttcgatttctcgtattatatatatttttcaggatttttggctaacactttctctgcgctgtccaatttgtcagtctcaattttggaaagcgaaaaaccaaatgtctggcaattgtttagcagctacccacaggcgcaaagctgttgtctaattgcaaactctatgagttttggcacaaacatgaatattcataaataataactcggcgcgatcccaattaggaataagccgctcgactcagcctgattcgtcgtccggtgaaagtgggtcaaatgaaatggcatcggaaatagattgcacgaatgataagtacttcatatgcgctatttatgttgaacgccgctactgtttttattttctttttttttttggcgcacacgaaaaacatggcaatcttctaaatataaaacgcgtggctcactcgaactaattttaaaaacgcttgtcgatgaacatatttagacttagccaaaacaaaaagcgaagaatcgcaaaaccaaaacaaatcaaaaatacgttcgttcatctttattttattattattattttagccagagcgtgaggggggaaaacaaatggctaaaatgctcaatcagctggccgaaaatagagaaaacagagcaaatacgtgtgccgcccaaaaggaaacaagacctaaattggccaaagtcagcaggaggtctggcggcgatctcgctatccgctggatacgtcagcaaacaattaactgccgagcgatccgaaagatacgagagatgcgaaagatccaagtatccgagcattccaattggcaattgcccatcgcatcgatctcacggcaatgacgtgaaaagcgccgcgtgcaaatagctaaataattacaatataaattttccacgtcaagttcataaattctgtggcgcttaatcagcttcgcccgcttttggatgctcacgttaattttcccgccccaaaatctatttataggcttttgttattttctaaacgctcggtcaaggtaattttaggaactcacacactacgtacactaatttcccaatgacgttcaatttcagttctttgcgagatgggcgaaaactaaatatagcgcacacaatgattggcaaatcacatgggtaagaaaatagactttcggttgcatttagcgcttttttttcggccttttgttgttaccaatatctctgctcgttttgatggattgggcgtattgcattttcccgctcgctgaaaattcgttgaattccattttaatggctttatttatggggcgtgcatgggcagcattttctcgctttttattttttttttcttgatttttgtatatttatgagagtgccgtctccggccacaaaaagttaatcccactaaatgccgttgatagtttatattacgatttgttgtgctggctaaaatgaaagatattggggcattttaattttagaattgtgacaaatgcgcaacttttttttaacggctgcatatgcgacgaatgatccaggttctagttttatgattgattttcattgtttttcatttggcttagtgagatagttttactcggtagcgatttagtgggcttttcgtgcttaatttgggctttatgaatttttcactttatttatgcagttcagttctgagaaatgagaagttcttgtttttatagcttaagaactagttagttaataaaatccattaaatttcttcacttctttcatcatcattagataaaacacatttgtctgacgttttgctgacccaaattttcccctagccagtcgcgaattattatgtttccttatcaattggcatgaacgtcacagattatagattacagatttttagatagcagataacagatcggagattaaactgcgtacgtgttaccatatagagataagtcgggcagcgtcacagaagccgctctgaaaagcattgtgcgtcaatcagcataatatacacggatatatggatgtcacacggctaaatataggcagtgtttagtataccttatagctgttatagccggcgatatcgggaaaaatgtatatatccgtttgattagcgacacaaaaggggcctggcaactcagtcggccgaatgcgaaccaatattccaataatattgtcagctgctaatgagcagattcttttgggttgtgtgtaagtttgagaaaatatgtatgttttgggctctcgattctcgattttggtggcatccgtgacacacttcgcagttgcatcattaattttcagttttcgtttcgccttttccatctcagccatatggatactcgatggcagtccctcgcatctctatgcggctaatgacacaaaactatctgcttgtgggacaatgggccaaggcacacggcacacggctagagaaacaaatttcgtcgtgtttacgctgccagattgccattaattttatatctatatagatatatatcccttgcgatgaaagtcgtgaggggggcgaggggcggggttggagacattcccgatatatcttgtaatttttaatgttcgcagtgttgtcgagtggaatttttgattcaaactgaagtgtgtcacgtcgttggtgctgtgctgtttttattgatttagtggcccatttccttgttggctcctcttccattcagggggtagatatttttagagcccccctcctccgtgacgaaccagaaattgcaagcctataattagccccaaaaatctggaggagcacagacatcatatagatggaccgtgtttacttcgcacccacacacacacacacacatttattcgtggcttgtgtttggatttgtttagatgggcgggcaagcgacgtcatagttgtgttttcctcgagactttcaaattctcatgaacttgacgtcggcaaataattagctgaaagcattccgcttgttgttcaataataatcagcagctaatactcgttacgtgaaacgatataaatagtacgcgtgggttatatttagccaaagatacgaatactcatcgcagcggaactataaacgcgtctgtctataaagttttgaactctaaggctaagccaaacaaattgggcggaataaagagagagaaataaatgaaaggtctacggatatgtgcaaagatatgtatatttttttggtagccagctaatggctaatacaattcagatacatttgtatctgtttcggcttcctgggtgcgtttccatcatttttcatggcggaaagtccggggtgaatgtgccgtcgtctacaagtcaggcaggtctcccattggggccacataaatcccttcaaatgccatgacatgtaaatattttccaagtcttatgggccgcaaaagcaacagtcgaagcaacaacaacaacgtggcgaacaactctcttgacttgcagagcgcttataaaatataatttcattctataagaaaaatgcaaagtgacaacataattcgccagtttatcataatcaaaatacgcctacattgttcgccttattttttgtagttgtactcttatttttttcttctcttttctgtgctttccacacgctggcatgcaaaaacactttacactggcacgctttaaacaacaaatccacaccgcgtatatatgtatctccatgcaacaccaacacaacaatgacacagacgagtgtcaggccaagttgtgcaaaaataacttcaaatagttttttggatctcggtgctatgcacttccatccatcgctcccctgcagcatttactctatccgctataaaggtacatggaatttcttttgccccaactgacaacttgcttttcaaatggatttgcagatactctcagcaaaataagatacttcacttcttgatctaacttgcattcaaatattattaaataggaataataatcatatattttagtaacgaatctagctatgaatctataacatatatacatatatcatgattaatacttagagtatctaactctcgacctatttgaacttcaacgatgtctccttgctgatttagacttgatttcggacactaatctgtttgctcctggtctaatgttgataatctcacggcaaattaatgctgaacacgatgtggaaaagtcttaacatgcatcagtatgaatcattgcgagtgttgttcttaattaacagcgaattgttggatgcacctagcggcgaggacaggcgatataaatgtgtctcaagatctcacttcatgccatttcattcaagagttaccagccaaatcgaaagaagcgacaaaaaaaaaaaaaaaaaattattaaaaacccgaaagctctttaatgaaatgtcagacacttaaaagcgtaattttattttggcactctttgagccgatgtcgaaaaacaggtcaagtaacaaagtgattttaatgctcagacaaaactgaacgagcgcatattatacaattcataaaagagacccatccaaatttggtcaaaagtaggcaccacaaatttagtgtctgctggctttttattattattattgttttttgttttcagccatcatcttgtcgtttcggccttttcggctgttttgcttggctcccttcgactggtcttaaccaattttgggcaaactttgtgatttgtgcttaattgcggttttcgcttctctccctctcagctcagcaagccatgtatggtagcatttgtgtcgagagtcgtgaaaacaagttaataatttcatggctggcttaatcatcgttgttagccacgtcagattctgagccgactatttttaacaaaacatttcaccaggcaaacgtgttgcgatttattctgattctgtcagctaatttgcttttgaactagacagttaagtcgaagaactaagcaaatgaattaaagcttaaagaaatatcatttttatagttacatacatttctttaaattatttattttgccttcttattttgctttaaattcgttcgataaatattttgacagagttattttcttaaacagaaatgtttaatatgtatttatgtatgtaacttccttaacttcccaatggcgttaaatgttttaaaaataacactctattcacactccttgtttggtcctcaattaccgtaactatttttatcgccgctgtgtgtcaactgtacaagcgtctaatgaaaatttacgaggcgcgcaactttgttcgcccgcccgcccaactgcgtcaaacgcaattctgtgaaagtgaaaatgggggggtgggagcagaaaaaagaaccaggcgcagacacagacatctttaaaattccattccacctgttgtgtgaaactttccgcagtcaaggacattcattgcagggccttgctttcgtcatcgcaaacttccgcaaacacaccgataggcgtgcgcacgcacacattcgcagaatggcaacgcaggcgcgctgttaagtatgctataaattgccgcattcattcataaaaattcaccgggcacacaaaaaagtttacgcaagccagagaaagcgaaataccaagagagagagagagggagagagagagggggagggaggtagagcgagatggggagaaagctggagaatttgcaggagaacagtgccggcaatgtttagctctatcgattttcgaactttccgggccgagagaaagtgagtgaaaggggttggagaaatatctccttgactttgaaccaagctaagttttccacacgtggcacgcggttcaaagtgcactagtctttatgccaggcactcttttcatattattattattttttttttgcctaccggttgacgaacaaaaccggtaagcatttatcatctttgccgtcgctcaaccaacccgattcctttgcaaaggccttgccaagaaggcgttcaaaattaaaagtcgctcaactgtggcaaaaaaaaaagtaaaaaaaatccacagaaacaacaacaaaatgcattgcgcaaatgcgaatgatattaaaatgaaaagtttgccaagtaataaactgataaagaggcgacgtctgcgcccgacgtcgacatatcgcaagaaggtaacttattaaacaacatggcgctggtttttgataccctcacctgtgcggacctacaaacgggtaataatatcctttaaagtcggtttgttacatatagtgagcataaaggaagtctggttcaaatcaagacgttcttcttattgatcgttataagaagcatattataccaaactctaatgtacaaaatatatcaaaattttattagaatctaacaagagttataattcaagatatattctattatatgaatataatctaagcacataatataacataacattcgattgtttcccttttttgttgatgccttgcaaggacatttttagttcggtcatggggaaatggacttttcctttcttgttattaatacacacacgcacttatgcagcgatccagttgtttttgttgctatggcagtgtgactgcctcgttgcagcagataaatgtaaattattatgtcgtaaatttgttgactgccatgtttgtggctgcagcctcacactgacatggccgaaagagtaaaaatgcaaaaaaataaaaaataagaaccgactccaaacagccaacaacaatgcgactcaaccagatcggtgcaaattaaaacccctgaaaatgcttaataaaatgccttgattgagtcgccgtttgcataatgcgctaaaaacaaaagccaaaaaaaaaaaaaaaaaaatgaaaaaagaacgaggtaataagaaatattgtgtggaaatatgtattgagcctgggcgaaccggatgcctaagataggcagcaacacgttgatttatttgagtcggcacacgaccagacgacaatgacatacgcatctagagagtggcaaaaagtgcaagttgcaagttgctagctgcacgctgcaagtcgccagttgccagttgccagttaccagttgccagttgacgtgtgggccaaaatggcgaagaggcgttccagatcgaagcgtgccaagaacgcctccgtcttagatttctctgtagcctgtggcgtgtgccaagaaggtttgcttccaacgcccttgaactcaacgcatacagtacatgtatctgtatctgttcctcatgactgaccgacatttggcagatcagcgcctcaggtgggtggatatgtggagaatcaacaacccccgcataagcaaaaaccggccacaaacattttacgacgtcatccgtacgcttcctctctacacttgtcgatgccaagttcgcacgcagaattttcgctttttttttttttgtgtggatgtggaggtggaggaggagtatatggccccacgtgatctgcgatctgcggccgagtcgcgtgccacattgtcctacacaccgacacatgggtcactcactcgcacactgaacttgctccataaaaagaaggcagcgcgacgaaacacaaaaaaaaaaaaaaaatacaactagtaagcaaaacgtaaccgatctgccagagaatggaggcgtttgccaatttggcttggaaagtgggtgcacttaatatgcacactttgcttaggcgcgatcaattttcgtctagtgggggtgtgggaactttttggcatacgccgcccgctggctttttgaattatcacacataaatttcacacacaaagtagtttggcccgactgcaacagccgcccacccagcataacggaacccgaaaaaaaaacaaaaaaaaaaaaaaaaccaagccgatgccatccggaaccccgaaagacctgggtgagatcgcctctaatttaattagttgcgcgtgcaacagcctctcccgattttctgggatcttcgagctgccggtttggcgttgcccagggtccatggctaccatgcttcggttggaacgccttgttatttatgcgtcgcctgctttatggcttcccatataaattctcatttcgcttgtcatcattttcggttcgttctctgggttggttttcagtttctgggcgagttccactgatgcgttaagtgcatggcatttggttgcaagttgatgatcgctgcaggaaattatgtgcatttcggtagatccattttgggggtggcaagtgagtggtggtcagttagagcaattgaacttgacaataaaattaagccatttattggtcatttcaaagtgagaaaatgagaatttactatgggattatttcattatcttcaacaagaattaaagaaatatacagttaacatttattgaaaatatttattactttgttttagagttaaaaaaaacttaatgtgcgtcggccgggaatcgaacccgggtcaactgcttggaaggcaactatgctaaccattacaccaccgacgccacactttctcaccgatttcacatgtgtttgtaaattaatacattcatacattcagttaaaaaaaaaaaacattttatcaattaggaccaaatttttttttaaataccaaatgtagccaaatgattagtggtattcgtttaataaaattgtttagttactttttgtactctccaacgaaataaacgaaataatttattttatatgttgtttgttcaagcacgtgacatttttgaaaataattaaaaataaaaaatttttttaagaaatctatcaaaaagttacctgcgtcggccgggaatcgaacccgggtcaactgcttggaaggcaactatgctaaccattacaccaccgacgccgcataatctgcgcgcgctagtcacagcataaaaagttagtgcagacaactagttggaaacactatgttgacaactacatctgcattatcaagttaatatttgcctggaagcaaaagtaatttatcgtgttaatggggtggctagccttggcagcactagtgtcgaatcatttctctgccagcctttttaattggttctgtttagagtaagctctttcactcgtcggcgacaggaaacactttgtgtaactatatttcttatgaatataattaaaacgcattgaaaacgaataaagcaaacagtcggctgatcgattcacaaaggcaaccagccgatccgaacaacatcggcttcaacttgacttgtgagtgtctgtcgctggttgttatggttgttgtaatggacgcccacccagtaaatgtcttttgctgtaataatttattatcacatttacgtcttggcatcgccagcaattaatatgaaaagtaaacggtggaaacagccacagcaacagaaacagaaaatagaaaattaaatgaatgaatgaatgaatgaacggggcgaggggtgagaaacgccaagtgatcaatgaacaaaaaccgagttgtagctccatctccaaagcaatatctatctgtatctgaggccgtatcttttgtgttggcgtccgaaacagcagaaacaacaatcggcagcttttgacttagttggcaaagcgtttgccaatgcagaaatccgaaatcaaattagccgcaacacacagtcgcagtctgtagtttgtcttgcgtatcttacagatacagatacttgtcgcgtttgttgtgctgtgtgggttgccactgtgttgtccactgtgccgtgtgcgtaggtcgcgcacaagtcggcagcaccctgtatccgcggcgcagaataataaaatttaacaatttattgcatttgttgctttaatttgttgttgttacttgcccgaaagcaaaatcgaagaaaaaaaaaaaacgaaaatattttttcattcacaaaacggccgccgttgtatgcaaattgatcgtgttgttgttgttgttgttgtcgatgttaactttagtttggctctttgcagtagctgctctgccaacttcgcagtcgacacacttggcaagcgatgttcgatgattgcaacagcagcagcagcagcagcagcaacaacacagtaactgcaacaccaaacagcaaccaaatgaatgaattgggtttgtgccttgggccagggcatgttgttcgttgccgtttcgcctctgcctacgtggcggctacgtgttggcataaattatatattaatgctctttgaatggtggatttgaatggttattggatggattaggagctgattatgcgagatgaaagcaccaggaaaattgataataagtaaattgcgcttaatgatagaagaagagcagatagcaatcaaagtgtttgatttaaaatatatcatttgaaaaaagttcaaattcaaattgggtttggttcaatttcacttttctattatttaaatataatataatataatgcagttcaatatccggataataataataatgcacgaacataatacatacttaaataaaccttagatttaagagctgattgttatacatcaatatatcgcattgaaaagggtattcaacaaccatttggctttttcagtttaaatctccactcgttttttttttctgcaattgcatgcacattttatttatttaaagcattaaacaaagacacagacatatgttaaactatggctgtggcccgtgttgtttgtgttccactggcgacatgcaacaaatgttagacattcaatttgttgttgacacttcattagcaaacaaaaaattaagcgaacgaagatgcagcggccaaaaactgggttaaatgttgctaaaattaagcgaggcaagcgagaagatgcagccagcagcaaatcaagatatggaaagtacatcccattcccattccgaatccaaatcccaatcgcatacccattccccagttgcaaggctaaccaaataaaagcgagtattgggttactggccaactggtcgcgaagtgaaagagatatcgggaattggaattggtaagggctgggccacgcgttgttaatgaagaggcttttcccttcgtttgattttatgaatgaacaaacgcaacgcatcgtagtaaactgcgcccacatcgcgtcgatgatgaaatcatgaatgaaacgagtctcgaaacaaaactacggaacttttaaaaccccaggtgccaaaagggcacgcgagtcgtaaatgtgggcagacaaatgcaaattgatggccgtggccaagatgttgatggcaagatgctgcctcttggccattagccattagccaggcacaccggaaccgcattagcatgtctgagatccaagatccgagatccaaaaaaaaaactctggtaaccggaaagtgcctttccctgcgctttgtcaatgcaaacaaattaactgtcaaatgcgagatgcgttcaataaaaacatttcgaatgaaatcttggccatcaatgaaatgtttctgttgctcaaaagctcagtgggtaggaagcgaactaatcgtctagagaaccgtttcctctatcggaactatcatatttcaggcgtttgtcaacggctaccattgtcaaaaaaaaaaccctccttttctattcggaatagaattcttactttagtcgctttggttctccacgtgaaagcgatcgcagagtatgttgttaaatatgtgagaaaatgcacattaatggcgggattatcttaacgtatcttcggccataaatgtatctggcactagtaaaatctaaacttaaggtttttcgtaattaatttgcactttggcgctattcattatgggtcgcaaaatcttatccgtgaatggcttatttcccactcctccgccgggtagaatgggcttttttcttttgcggccattacaattttacgacttgccacagctgcaataacagtaacaacaactacaactagcactaaccacttctcatggccaggctgacgtcataaatgcataaatgcaagccgcgatgacataaattgcatttgaatattggccaacagcggaaaaaataggaaaaacaaaccataaccccagagtttaagttgagctttggttttgccgcttgtcacgatgtctgacagctctggggcattgatcgatttttgttcggactttatggattctgtggcagagaagggtagcactctttggcacttgataaattatttaatatttaaatttgcacgtaatagctgaaagcagtcttttgaaaaagttacaaacagcatgtttatttatttacgaaatatatttatttaaatatatatttacacagcatgctttgaaatcaaacaaatgtagtcacgattgtttctaacgaaatttttgagggcaataaataatatattaaatatatgtataaattattaaaaatttgtataacgatttaatatgaaatgatattcattcgcatcgcaatgttttgtatttttcaaaattttaaaaacatttgtatttaataatttaataataatttaataaacatcaattagtttttacttctttggtttaaaaaaattatgatttgcaataatcccttttgtttaatactacaaacacatttatatcttgtatattttttaaaattattttcatagatataaagtcgcattatttccaaaatcagttgacatttgctgctgcagcaacagcagcagcaagaactgcggtcgccaacaagagccactttagcatccacgcgtgggttgctccattcataacgaccgaaaattcgctgaatgaattgcagttttgtatctctcagatacacacgccaccgacaacttgggccacataacggcatcaaaagcagccaaaaaaaaaaaaaccaatgaaagagaagaaagccaacaagtagtgcagcggaggattagggagtggtgggcggctgagcgggagcattcaatacgctgattgggaagcagcgacaaaaagtgaaataaaactcgtcggcgatttacataaatcagctgcaaatttgttccactgttcaaatgcagtgtcgccgtttgtgcgagcgagaggttcgaggaagtggcaacagcttccaccagaaactcacagacggccaaaagcgacaaacagacggcaaaaaaaaaaaacaaaaccaaaaaaaaaaaaacagatcccaagtcgcggctgtggcccaaagtcaacgcgtgtcgcatttggaaaaacttgctgctggcttgactttttttctttttacttttatttatcttatattagtctttatttttgcgggggcccgttggcaaagttagtaactttggttacagtttttctccattttttgggtcaagtcggggaaaaaggtagagggagagagtgcgatagatacataggcaggaaacacagcgattgcattggcatatgtgatgggaaaagttggtactttaaggtggtaatcttaactcatatatgccattttataggcacttaagtgataattttttaacatcttcaatgaagttacgaaatcgcattaatcattgattatgcaaatgctcttttaatttgaattcaatgcgaagctgagaaaaaaaaaaaaatttatttttaaaattaattaaaaaattctacataccacattcattccatacatattccataccatatacatttggctgagttgagcgtttctgcaaggcaataagtacttttcagcaacttttcgcccatctgtagtttgccacttagcccattgactgttagatgactaagatgtgctggcactgcccccatccacccactaattagccctcctgctcacttaccggctggtccacaaattgtcgcgtctttcagcatttgacatggaaccaaaaatgccagcggacagttttcggcttttgtgctaacgatatgcgtctgtccaagccatcagttggcaccaattgccaaggatgatgagatggtggcggttggcggtgccaacgggggtttacggttgcccggcggatggagacgcataaatcttggtgtaccaccagggaaagaaatgaaaaaagaatctacttctcttttcgaattttcttgcgtgcgagtcgaatgatgccgaaccgtggcgatatgcggcatggttgagctcattagaaaatatgcgcgtaatttgtgagtttcggactttgaaaatggaaaacggggagcagctattttctgatttgtctgctcccctccattgaaatgtgtcaagtggcgtgagcacgcaaaagccccttgatgatatctttaatggcacacggggaggacgcacttgaaacttggctaccagacactgaccaccaatcgaattttacgtagcccatgaaagctgtgtgtatatatcgctttatggataaaaaaaaacaaaacaaaacacaaatcaccaaatcaccgaatcatacaatcaaacaacaagcagcggcactctgaataaggcaatcctcgagtgggcagcaaggcgcgcgctacgcccacaaaaagttcaagaaacaactagaggagcaataacataaaacttcaaatcacgctaaacaacagcaacaacaactgccgcaatatcaaaactataaacgctatagcgacaaacagcaaacagaacaataaagagcacaagagctcatgtaaattatttggctaccatatttagttggaaatcttgcgtgatctgtgatctccggcgatgatgatgatggctatgctgatggctgcccctgtttttgtcgagtggagtacccttgatgtgcggtatgatgggtatgatggacaggcgagatcaccatggtgaagaggggatttttcgaaaggttcattttgaattgactcgcagaaaagataataattgggggttattttgtaggaaaggatcgccagtcattgaactaataattatatggatatacatttaaatatagcaatttatgtaatttccataaaaatacaaaaaatatcacttattattgatagtttagcatctttttcatttacaaatatttaagtttctctcttgtgcgtaaagttttagcatctttttaccttctcatatccttgatgattaagacatcatatcttggtaaacaatcttctgtaagtttccttttttttgattttcagcctgttaatcctaagctgatttcaaaatcaagggcattcattcagggttcaactcctagcattgcagcactattgtcttctaagccatcttgggcagcccacggtggtaatggccgctaaccgctaactgaaacaccagtaagccaacatcagcggctcaagcgctctagactgaagccgttggccagaaagtgaagtaataaaatgtaaaaaaaaataaaataaaataaaaaggcgacaaacggacggacggacaatgatggcggtatgttgagctgtgactgacatttcgcttcaaaatgtcagccgaaagctggaactcactggtccgggccaagtacgagtgatccagcctgctgttcggggggggggggggggcatgacggttcaaatgtggccgaaaacacggccaagacgagaccattttgtgccgaatgcgccatatttgggcccagctgtgtgtgaatatccattgagattgtcatgggacgaggaaccccgcgcgccgccgaaaaagaagagcgtgatgaagtgcagctgagccaaagagctgggtgcttcatatatgtatattattttatttcattttttttttttttttttgggaactccgctccggctgaagtttatttgcgctacagcacatttgaggcacctcgagatgagcgggcaaaaggactgactgactttggtcgttaaccggaaacccccagcgacagcctataatttgcaaatttaatttgcaacacacgccaacatgtgaccccaaaacggcaaaatgttataaataatgtgcagttgcagcttgcagtttgcagtttgcagtatctggtgtgcagtatgcaagtctccagcggatcgtaggtgtccagtgtggcttaccttaaactagaaatgctcggcttatgaatggagctcagtgcctcatgaatgaaatcaactttggggcttggtcttgctcttggtcccccaacacacacacacacacaaacacacactacacacactcctcagtctgccgcatgttcgattgcctgctacagacagcaattttttatgcaaatgaaaaacgcgttttgcggtttttcaacgaaaatccaaacgatttcaactgaactgcgcttatggttctttttttttctatcattcgttcgatttcgctatatttaaatgattgtggttttcgatctacgtttggtcgaggctttatttttcccccgaggtttaactgcgtgggttgtgccaccaggttccgccacaagagatagacaggttgaccccctgaggtgtgggcgtttttctatcgagatcaagaagtccacttaaccgatagcgattgattacgatctctaagaggagtttaccatttatggatgcgttttaaagatgcaaaactatgatgaatggcaaaatgaaccaaattagggaattcgcgtggctctaataagtagctgcaacttacaaaattgacatattactctagacagcataactgtctcattcccttaatgagatttaagccgcatttaagccgcatttaattaatcccacgttctacgcttgccttcagcttctgagttaagcttgtatttttagattcgtgatggcaatttatttctacttgaaagttgtcaaaaagcttacacaaattataacttaactcgaatgcaaaccacaaaaaccaaaaatcagcccacatgctgcggctttcgatagatatatatgtatatatacattttagagttccaaatcgttttgatttgatttggccagcggcgcagacttggcgccaacttcaaaaccgcaggtgacaatgcaaaaaaaaaaaaaagagaaaaaatgaagaaaaaccaaataaaaacagataaacaatataataataatcaagttgacctatacgaagccatttgtggcacacttcttcgacccacacatattatgctaatcatgtgtcgaacctaacgcaacttttgatttgaaccagttcaagttgattatactaaactggctatgaagaataatcaatggctcctcatgccattatgcaaacctaaaaaaagggtgggggaatctggagggccatgtgcaatccatcaactgcattgtgccaccaacaaagcctggccgggagcaatcacaatttagcctcccatgtaaacggcaattaagttgccgtcgtcgcagtcgtgaacttgtgaaccattccaaaaggcatcatcatcatcagcatcaagtttgcaagtctgctggtctgttggtgtgcagatctaggaggaagttcggttccatttccatgtccactggttcctgcaattaatcgcggctcaagtggctcgctgattgcaattaatcttcattaaggccaccgctgcagattcgaactggccgtttcgtttcctcggagatgtcctttggcccaggcatttgacacaggtctacatagctcttcccttccctggcgaactgaactggctggcttatccttacaaaccaatttggcgatcgtgaggtgttgttgtcgttcgccaaaaccacaacagcagcagcagcaacaccaacagcagcagcagcaacatcgccaggtgaccgcacagcaatcaccttaattaaacattaggcaagcctcgctgagtgccaagcttctggagattgtgtttgtgcttggcttggtttccctgctacgctttggctgacttgactgctgtggtgtggtccatgtcagcgatttccgttcggcacagggtaacaaaggttgtgctgcacagtggttcagggtctggccaaatggaggtgccaagatcagccgatcctcacagaaagcactttctaaaatggcaagacagaagacagaactatccaccaactgcagttgcagcatccaattgtatttgctacttattttatattccagtacggatccatttcctctcatcacacacaaaaaggaaatgggcattcattaagaccaaattagccacatttaaaggagaaactaatgagttatatttgatactttgttaagcaaaggtcacaggttgaaattgataaaggaaatgccatccttcttctcgaatttccattcattagttcctcaatgataataagtttgctgtctaggtaacccaaaggtcacaggttaattaacttgatattctgcttattttgaataactattatatcttaaaagggagttcttaggaagtgttcaattgccaagaaaccaatgggaaggcaactcccttttctcagttaccaattctgctagcaacttggtaacacagaacttggcaacatttagagccagtgtgccatgtgtgcattgagccccggatggttgccttaattttcttgcagttttcttggctgttggctttcattcgttcgtgtttgttgtcgacggtgtcaacgtcgcctctcgttgacaaatgctgaaaggctttgtgtgcggagtgagtctgtctgggattttcattggaaaacgtggaccaagaaccgatcacccaggttgatttgacaaaaggaggcgaatgaatggcacccgagtgatattaaataaacgggtcacgttattaattggttaacccttgccaagagatttatgaatattgattgccagcgaagtgcagcagccaagatcgcgaaaagtgcaacagctgctgcatttggccctcgtctgcagttcgctcccagattgagtcagcttcctgtcgattagggtcactcagactcagctagtcttgaatgccaaatgctgagtatactgaatgcccctcggtcagtcggggtcatttcctggctaattagttgccatgagagatttgtttttattcttgcctctgctgccactactactattgttttttgctgcctgccccccttctgctctgcatcggcaattaagcgccgtcgcatatttatgatattaattaattaagacaatttgcgtggcgtgtcttttgctggtggagaaatacgagaactgcgatgggcttgcctttaatttgccatatatggcattggatcccaggagagcgaagttgtgagcaatctaactttggatataccaactttgatcgctttgaaagcgctgaagcagaacacgtaactatatggtttttgaaacttttaagaacgtttaagctaagttgttatgttttgtgcttagcagcacttggtattataacaataatgaattaaaattctattagctagctaatttatgtgttaaagaaagacgaagatactttctctattgaaccaatgatttttccctagctctctgatcccaaattgcattgcataaatgcaatcccttccgcttcacgcttgacacttagtcgcttcgcagccaaaattttaattgaatttgaagcggaaatagcgccgttaggcctcgatcgaagccacaacatatataatatatatgtgatttaatttgtacgcactgcgaagcgctgctcagcgccaacgtggccagcattgacacactttgggtggtcttggcgggctgacttaattttggcaagccggccgaagtcccaaaagagtgcagagacgcgcagcgagaaagatacagatacatcacgtcgagttcgaggcgcgtaatcgatgagacgtgcgatgggagccgcagtggcagagtgcggtgtgttgcatgtgtgaatgcatgtgccacctgttgaaagggcgcaagccggagcaatgtagcggcggggggggatccggacgaggcactgcatcatttgcggctgaaatttcaatttcagccttttggcagcgtttcaaaagagcgcccaaactgaccgaacaactcaagtagacgacgggcgccaaggcgccagcgagcggcattaaagtgcgcgaaaaatctcattttatttccattttatttattgagccattagagaggggcgcaggagtttcgcctgtcagctcattcacagattaattttggcaatttatagccggcgagatagtttttgagtaactgcatcatggacatatgcatggagtgcgtggaccgtaagttatgtaatgagtggaatgggggaatgggggacgccggatcgccaatttttgactaccatgttggcgacagagtaacagaaatgtcacgataccctgggaaaatgagccgtccggcgtgagttattgattggtatttgtaattggtattgtaatttttaggccactgaaaatatttgaattaaatgcaatgcaattgcaattgctgattgacaccgaacatgaaggaatttttttccattaatgtacgatttaatttccaatttaatgggtattcatattgtatggtaagtcttgtttcgctgtgtgtaaattcgtttttaatgagcaattttatatcaaaagttgtaatcgtagttaataatttagttagggtccgagttgattagtcatcaaattaaagtatatttatcaaaccaactactttccaaaagaatatgtacaatctaaggctattctagcgacatgaggtgaggactcacctgtgccattgctgccgaaccagagggcgactaggtcctcacctggcggcgtatggtggtgataaggattgccatacaagtagggactcggataatcgagcaggacacgacgcgagccgggcgaagaggactcggctggggggtcagatataggtatataggtatattggtatattgcagtaatgatcgctgatctgggatgctatatataaggcgtgcggatgtgagtccttaccctgagctaattgagcggcatactcggtggccttttgcagattaattcgcggtcgcggcttggcaagaatttgttgcggctgctgttgctgctgctgcggttgttgctgctgctgttgctgctgctgttgctgatgtggatgtggttgcaccacagtattttgttgtggctgctgaacggattgttcggttgtcggaggattattcgctgccgctgctgctgccgccgatgagtccaataaaagttgctgaacctgcagtatgtctacatactcatccagttccactggcggttgtggtgccgtactaacttcagaggttgccgccggcgagtgatgaattggtggtgcagcattcacagtctgatagtaaccgaatgtgggtccagatgctgcaggatttggcaccgcgatgggtggtgccggtggtggtgcaaactggagcggattgcgactgagtccgagcaaaggagttgtgggtgtattcagagaatcctgtgagttagctgacgtagaattagttgctgctcctgctcctgctactaaattaagattttgtccggataatcctggcgagctggtggctccagcggatgaggatgcggatgaagtggctgacggatgctgttggctgcctacaatcagttcattttgacgccgcattgtcagcaacatttttgtggtttagcgcgttgcacgtcgatcggtacgaaaataaaagaaaatgtgtggaaaacaaaaaattgaaacacaaacgtattaaccgagactccatttgtttggtaaacgatcactttttggttaatatatgaattaacacattttgttcactttgtactttgttcacttttattcgctgcggttagtttgattgattcattgaaaagatcaaatcagtcttgttccatttactttgattgtatcttgaattgaatgaagttgtcgcaaaagctggaagggaagagtaaacattattaatattttataaaaacatattaaaccgaaacttattatagacaaattataacaaatttattgccttgtttacctcttcctaaaatttcctatttcagcttgcaattactacatttatttatataaatataacaccaaaaaacatttataaaaatgtacactacagtagataaacacttagatttcgataatcacaataagacactcagaaaatgattagatatattcttaaaattgacgctcaaaaatacacattcaaatagatttcaaaaatgttgaccaaaaatatgcccggtatatcttcacattgccgtcggtaaattttatttattttattttctggcatttaatgtttgccaaaaaatccgtcgatcgtttttcacttggttgttttgtgcctttcgcttaatttttcataattatttttgatttcgaaaatgattttgattaatttgttttgagcagacgcgcgcgataaaggtttttcgccgtcccttgttttatttcgatttattttggcaaaagtggcgagacgagccgttgagccgtcgaaacgctactggcgcgagcggtgaaaattggaaatgaaaatgggaaactcgggccatcggtgaacaaaaaaaaaaaacatgaaaacaacggcaaatcggctgcgtcggcgtcggaagcatcggaaaatgcctgaaaatttgtgttcagc

SEQ ID NO: 17339 - DNA, 4829 bp, DROSOPHILA
atgttgctgacaatgcggcgtcaaaatgaactgattgtaggcagccaacagcatccgtcagccacttcatccgcatcctcatccgctggagccaccagctcgccaggattatccggacaaaatcttaatttagtagcaggagcaggagcagcaactaattctacgtcagctaactcacaggattctctgaatacacccacaactcctttgctcggactcagtcgcaatccgctccagtttgcaccaccaccggcaccacccatcgcggtgccaaatcctgcagcatctggacccacattcggttactatcagactgtgaatgctgcaccaccaattcatcactcgccggcggcaacctctgaagttagtacggcaccacaaccgccagtggaactggatgagtatgtagacatactgcaggttcagcaacttttattggactcatcggcggcagcagcagcggcagcgaataatcctccgacaaccgaacaatccgttcagcagccacaacaaaatactgtggtgcaaccacatccacatcagcaacagcagcagcaacagcagcagcaacaaccgcagcagcagcaacagcagccgcaacaaattcttgccaagccgcgaccgcgaattaatctgcaaaaggccaccgagtatgccgctcaattagctcaggccgagtcctcttcgcccggctcgcgtcgtgtcctgctcgattatccgagtccctacttgtatggcaatccttatcaccaccatacgccgccaggtgaggacctagtcgccctctggttcggcagcaatggcacaggcggcgtagcccctggaactccatcagcggccatgatcatggaagggcttgaaaccctggtggcgccaacgcatcacgcattcctgctcaccgagacggccgcggccgctcacttcaatgtgctgagcttcgacacctgtctgttcaagacgagcacggcggcccagagcagcggcagtccgtcgacggccacctacctgagtcccgcccaattcggaggcagtcatcacggcggcgccagcaccagcagcaactccctgaactcctcctcgaccgcatcctcgtcgtccacgtcgtcctcgctgctccactacaccacagcttcggcagctgccgctgctgcagccgccgctgctgcatccgccaacaattcagtgcttcgtgcccgcaatcagacggccacgcccacccagggcggtagtccgggacacgtggccgtacagcccagcgccaccgccagcagcggacgcagttcggcctcccatctcagcctgctgaacaccagtggccagcatagtcccacctcatcggccgtcgagcaggtggaggcccacaagcagctgatcgaggcgctgccgggcgacctcaacacaccggtgaccacgtccagcgatattccctcgttcttcggacccaccaccgtcgtggagccaccgcccattactggttccatcgaatccgaggatctgtctttggaaccccaggtgatatctgtggccagtcccgtgttgtcacattgcagtccgttgaaggaggagcgcagcactccgccagcattggccattgtcaaggaagaatcaagtaataatagttgtaatatgtacccacaacacaacaacaacaacaacaacaacaacaacacaacatcatcatcaacaacaacaacaagcaaacagacaacaagcgaaagcaacaccgagtgcgttggctcaccaggcaaccatacacaatcacaccaacagcaacaacaacagctgcaacacaacaacacgagcagcagcaacagcaattgccaccacagtcaccaacagcagcagcagcagcagcagcagcaacacatgagctccccgcaacaacaataccaacaacaccaaatattacaccaacaacaacaattgccaaatcaccaccatcatcaccatcaccaccaccaccatcacagtcagctacaacaactccaacaacaacagcaacaacaacaacaacagcagcaacaccaacaacagccgctacaccaacaacaacaactgcaacaccagcaacagcaacaacaccaccaacaacactatcaacaacatgccattcaacaccagcaatcacaacagcaggctagcaaaatctcatatcgtggcattttcaccaccacaggcaacgcgatgaacgcagcagctgccgcagcagccgccgcagcacagcagcaacaccaacagcagcagcagcaccagcaacaacttccctccccgcaactgggcgtcctggcaggaccgatgtctccgccctcaaatagcttgggcaacagctggggtctgcccagtccggacaagaccatgttccagccgcccctgttcagcctgcccgctcactatgccaccatgcagcagcagcagcaacagcagcagcagcagcagcagcagcagcaacaacagcaagcagcaggagctgctccctcgccctacgacgatggacgagctgcagcagcagcggcggcacagcatgccgagctcttgggcttgaccatggattgcacacctctcttgctgaaacaaccgccaccaagttacgccggagcctccgccggcttcccgggtctgggtgacctgcacagcagtcacgagcagcagttgcaacagcaacagtatgtgcgatcacagccgaaatatcaatggcttgactcaccagcggactatgcccagcagcaacagcaagtgcagcaggtgcagcagcagcagcagcaacagcagactctggtgctgccaggacccacttcatccgccagttccagcaatgccgctctgggcgttttaatacccaagcaggagaactatcccgatatgcagcccagctcgaatggcaccggctattccggcggatctggtggcagttcggcggcagctgctgccgccgctgctgcagcagcagcagcagtgcaactggccgagtacagtccatccaccagcaagggacacgagatcctgtcgcaggtctatcagcagagcactgtgcccttgaaactggtgcccgtgaagccgcgcaagtatcccaatcgccccagcaagacgcccgtgcatgagcgaccctacgcctgtccggtggagaactgcgaccgtaggttctcccgttccgacgagctcacccgccacatacgcatccatacgggccagaagcccttccagtgccgcatctgcatgcgcagctttagtcgcagtgatcacctcaccacccacattcgcacccataccggcgagaagccctttagctgcgacatttgcggcaggaagttcgcgcgatccgatgagaagaagcgccacgccaaggtgcatctgaagcagcgcatcaagaaggaaaaggtgcgcggcgaacagcagcagcaacagcaacagcagcagcagcaacaacaacagcagcagcagcagcagttgcagcaacaacaggagcagcatcatttgagcctgcagcaacatcagcagtatcagcagcatcacctgctgcactccgccgatttggccatagtcacctccagtgcgagcatgtagagactagagaactcggcatccagcgttgaccaggcccagactccaactccaacaccagctccggctgcaacacagaaagttagtctggccctggctctggatctcgacgagagcgcctttcccttcgagctgacatccgactatggcaccctgtcgccgctcaccagtcccaggcagttcaattacgtttgggttggccaggactccagtcagcccttcttctacaaggacaacgtcagcgtccaggagaagtagagctcatccggaaggcaagccgtcgagtggaatcaatcgctgatgctgaataatcacttagtgtatacttaaacggtagtcgtaggaacggggttgtgctaacagcaaaatctatgcaagacattaaatagtaaagaagatacaatatgctacagttagcctagataatatttcacacatccaagaatggtcaggataggaaatcgagatatcgagtaatcatgaaattaagagaatcaagaaatcgaacaaacaaaacagagttactaaccatacaaagcctaactaaagcaaattgattgattactaactatattcgatgtaattgaaatgggaaaatatttaacttatgtctctaatactgtgatctcatgtgtaataattattaattttaatttctttacataactgcaagtaaccagtaataattttaaaaattataatcctttcgcctttgcctagctaatgttcattttttaaaaatgctaacacaaacgaaacacacaaacactaatttattgcattttaaaataattatacatatacgtaatatgtatatctattataattattaacttattatcttagaggtttagatttaggttttaacatacagaatacacgaaaacgaacacacacaaatcttagcatatcagtttttcctctaagcattataaattgcataagttcaaaacaaaagttacatttaaaatcggtaaatggaattttcgtgtgctaaaaaacgagaaacttgtttaacggaaacggaaacgacgaaaaaacttaaaattgaaaaatgaacccagtgtacttccttaattgattcgaaatcaaaacggcaaatgaaaatgaaatgttattatacattataaatacatatatttatcttgaatacgtttatgttcaatctactgtagaaaagaaatttcttcttagttcgtaatggtttattttaagtttaagtaatttttatatttttagtttactttaccttgcaaaatatataacaattt

SEQ ID NO: 17340 - protein, 1186 aa, DROSOPHILA
MLLTMRRQNELIVGSQQHPSATSSASSSAGATSSPGLSGQNLNLVAGAGAATNSTSANSQDSLNTPTTPLLGLSRNPLQFAPPPAPPIAVPNPAASGPTFGYYQTVNAAPPIHHSPAATSEVSTAPQPPVELDEYVDILQVQQLLLDSSAAAAAAANNPPTTEQSVQQPQQNTVVQPHPHQQQQQQQQQQQPQQQQQQPQQILAKPRPRINLQKATEYAAQLAQAESSSPGSRRVLLDYPSPYLYGNPYHHHTPPGEDLVALWFGSNGTGGVAPGTPSAAMIMEGLETLVAPTHHAFLLTETAAAAHFNVLSFDTCLFKTSTAAQSSGSPSTATYLSPAQFGGSHHGGASTSSNSLNSSSTASSSSTSSSLLHYTTASAAAAAAAAAAASANNSVLRARNQTATPTQGGSPGHVAVQPSATASSGRSSASHLSLLNTSGQHSPTSSAVEQVEAHKQLIEALPGDLNTPVTTSSDIPSFFGPTTVVEPPPITGSIESEDLSLEPQVISVASPVLSHCSPLKEERSTPPALAIVKEESSNNSCNMYPQHNNNNNNNNNTTSSSTTTTSKQTTSESNTECVGSPGNHTQSHQQQQQQLQHNNTSSSNSNCHHSHQQQQQQQQQQHMSSPQQQYQQHQILHQQQQLPNHHHHHHHHHHHHSQLQQLQQQQQQQQQQQQHQQQPLHQQQQLQHQQQQQHHQQHYQQHAIQHQQSQQQASKISYRGIFTTTGNAMNAAAAAAAAAAQQQHQQQQQHQQQLPSPQLGVLAGPMSPPSNSLGNSWGLPSPDKTMFQPPLFSLPAHYATMQQQQQQQQQQQQQQQQQQAAGAAPSPYDDGRAAAAAAAQHAELLGLTMDCTPLLLKQPPPSYAGASAGFPGLGDLHSSHEQQLQQQQYVRSQPKYQWLDSPADYAQQQQQVQQVQQQQQQQQTLVLPGPTSSASSSNAALGVLIPKQENYPDMQPSSNGTGYSGGSGGSSAAAAAAAAAAAAAVQLAEYSPSTSKGHEILSQVYQQSTVPLKLVPVKPRKYPNRPSKTPVHERPYACPVENCDRRFSRSDELTRHIRIHTGQKPFQCRICMRSFSRSDHLTTHIRTHTGEKPFSCDICGRKFARSDEKKRHAKVHLKQRIKKEKVRGEQQQQQQQQQQQQQQQQQQQLQQQQEQHHLSLQQHQQYQQHHLLHSADLAIVTSSASM

SEQ ID NO: 17341 - DNA, 7691 bp, DROSOPHILA
ggttaaatttatatggagcggtgcgaagtttactttcttactttttactttactttagtcttaattttttgcgaattgtgcacaaagtcgctttagggacgcgaaaaaatgaacgtcaatgcagtggagatggaacaatatcgatatttttcggtactatcgattcgagtatattattctcactgtttcaacagcgttataacagcctattcacagcctaataaaacaaaatgtttttctttaaaaagagataaattcattcataaaaaaaattttttaaacgtggttgaaaaatccgtttttattacgaataaaaaaagaaaggactttatttaataacataaacgaatgcaaaacccaaaccaagcgaaatcattccctttaattccataaaacgcgattaaccttttgatttcgtgtttatttggtaattgtctttatgggtaaatgtctcacaacaactattttaattctagggtaatgtaatgtgatgttctccattcaagcctcccttctgtctaaagccacttaatttttcctgcacaaagtttagtcctttccgatatggatgtgcgaacctacaactatagtcggcctatataaccatctagtcgggcattgatcgtagttatcatattataaagttatatacgggtatttgtagttcatgtcttttaaactcagttctttttgcgcaacatttggtgctcagttgttggttgtttaggttgtttggtttcttcgtttgaatatcatcatcttacacatccttttgctgttgctcaacggaaggataacaagcgattgggtgcgggtgggcatggggattgattaagatacaaagatacggatgagaacgtacggatagtagtaatagtaactggtagaatcagcaatatcggtgaggcattcgaactctgaaactcaggaactcaactagtatttgatcgctactaaaacactattaacatatggggcaaccaacgaatccgaatcatttctaggcctcctcgcactcctcctcctcgcgctgaacaaacaaccgatggttgcgggcctccaggatggaccacacaatcagcggagtggtcccgagcaccatgcaggatcccatgcagtagaagcatatctcgtagtctccggaaaggtctcgcatcagtcctgccagcggaggcaccgatatggccccgatgctctggaacatcctcaccagcccgtagctcgagctgatcctgtccgtgccaaagacgtccgcaaggaggaccggcataagtacataccagctacccaggcaaagtccgtagacagcggccgatagacccaccaaaaccagagtcttggcgaagggaattgtgagcacggcacatccggcgcccaaaatgctgtcgatatagggaaatgtgattagtttggatcgaaaaataaaccttatctggtactcaccacaaggtgtaggtcttcttgcgatcgaatagctgcaggtcgcacagccagccaagtccaaggcgcccaattaaatctaggaccgcgctgatggccaccaggtatcccgcctcacttttattgtatcctaaagatgaaccaagtttataatatttaaaatcgtacgccgaaagaatatactttgaacattttaaatagtatacctattgaaataacgtgggcgggcagatagtacaacatgtagggacagccgacggacatcaaggtgacggataggcacatcaggataaagctcgggtcctgcagcagactgatgtccaggtacatctcgatgcgctcgcagcaagtgcgtggtccccgctcttcgtcgtcatcgtcatcctcatcggcggcaaggtggccgtcgccatcgataatggactccaccagctgggagtctagaatgccgagctccgcctgctccaccggctgctgcttgagatcactgaggttgctaaccggagtgggtatctccatgctcttgctgagtccgcgactgaccacactcggcggcgaaagaggcttctccaagtgggcttgtatcttggatatcacctcgtcgttggcaaagacattgcgccgacgacgacttccgcgattggagtccgtgccggagtgcttgcgatagacccaagtggagtccgtgctcagatcttcgacggagtgcagcaatccggaactgcgcaccttcttcatgggcttgatgaaagtggtctcgccaataatatcctttacctcgtcgtcactctcctgcgctgacttgtcctgggctaagtaaccaaatgggatttattatttggagttttcctcgatgaaataatactcccacctggctgcttgctggcatagtagttcaggtggttcttggactcctccaggaacagatgctcgataaacttgtcgctcagctcgtggcctgcacccacatcgcaggtgtctaggtaggtggatgtagtcagaatgcccgtggtgctcggattgatgtcttcgttgaggggctttgccgtctcctcctgtccctggcccgagtcctgatccgtgtaagcactgattgggcggtaaagtgtggccgaaacgcacacgtgaagcatgcaaccgcccaggatcagaatagtgccgtggaagccacagttctccgcgaggtgctttatcagaacgggtaggatgaagctgccggcggcagtgcccgaaacgcagattccattggccaatgcacggtgcttgtcaaagtattgggacactatcactatgcccggagtagtcgagaggccacctccaatacctgggcgtgaagaaatagttaaatataaacatcatgataactaaataaatataattactaatgtgatgaggataaatttaaattgattatacattatgcacctgtgagtacgccaaatgttaggaggaggtgcagcagactggtggcaaagtagctcagtatcatgcccatggcgcagaaaatgccgccgacgaagaccaccgttcggcaggagaatcgctggcaaagagcactggacagcggggccaggaccagacatagagccgacaggatcgctggaatccaggaggccacggtggccgtagagctgggaaatgtctccataatctccacatacagcacgccgtacgacttgaccagtccggccacccagaattgcacggagaaggccccaaagacgatgaaccaaccgtaaccgccgtccggtggctccacattcggaccaccgctctccgttgtggtcgttgaggagtcccgatccttgaccacttgcttgctacgcctggcgacggtcacgcgatcccgctcgcgctccttggcccggcggacgcacctgctgcgggccgtattcaaaccagatccggaacctgaacccgacttccgactgctgcgaagctcatgcgatttggcaatcaacggtcgcgccgtgatgctggacacggtcagcaggttctcattgtcgtcctcctccagctcggagatctgatgctccagcaggctggcgtgcagggtcctcgggcagcattgcgtgtccaggctgagggtggcgggtcgtcgcatgggcgaggcgttgggtgaacagcatccggagcggaaggcggcggactccatgtgtttgccatccatctcggtgggcacaacgatgtcgggcagtggagccggcggcgctgataccaccgagaacagggagccgcattcgaggccgactccgccaccggacccgtccacgcccgcccctccgccggagccctcagccgtcttcgtgtggagaaggcaccctcccgactcgtactggactccaccagttgggtccggttcactcgcgcagtaaaccgatccccgggaaccctgcgaaaaacataaatagtatttttgtatcgttaaacattaaatatgctggttatctagtgcaatatttaatataaatctatgaaagtgtgtttaagatatggagtatggagtatggagggatgttttttttaaataacaattaaataacataacaagttaacgaagtaagcaacccaagaaaatgggccaatttaattgcgaaagttcttatcaagtagtagacatcaaaagttaatgtcccaaattggcgtgcatccaaaaattccgcctccgccgtagcattcaaaaatgggttaaaccccgtcagaaatccggggctgttgacaaatcgactggaggcgggtcaaggaagcaacaacttagcccaatttgcattgctaaacgaaatgcgaggagcgcacgcgatctgccgccttatagacgacatcgctgcaacgacctaatgtatgcaatacgttttgtttaattgagttaacatccagttccttcccgattcccgctccgctgggctatgtaattacccgcggaccgagcggattttcttgttatatgtactttgttaaatcgatgccaggctgcaggtgcatgctgtgccttgcgggctggcatgacgtctgggaattttccatttgtctgcgggatccgctgccacttcctcccacgaaacctccattttccgacgactcagggtcaagagcgaggtgggtctggtctggcatgcggttgcctttcagcacttttttagtttctgtctttgttgccggaaattgatggggggttcgattggccccaaaggagcagtggtgggtgtttgctccaatccaaggacgatgcaatgctcgaaccgaaggctaatgccaggaaatatacccgtgctgataagacgccaatctttgccaagccctcgtagaaaggacacaattggaaagcagtcaaaaacgaaattcggtaagttgatgtaaggtattattgggtttacagccatgccaacagctcaactatacatactaactaatatatacatttaaaactttatgttatatgtgcacagttaatatttttacctcatattgaactattcctaattagatttcaacacctgcccccttaatatttatgtgctgtcgcaatcttattgttataaccaacagttcgtaataactcatttcctaatagcttcttatttcgcacttagttgtcccgctcccacctatttcttggtacttccaatgacgtacgtatacgaaatatgatacattgctggcatcaaatatcaagtatgcgacgtgtgtgcccattagaaagaaggattggtgcccaacgctggttaaacctatgcacaatatattaggtgaagcgctctatccttagtcaacctttttatttgcttttacttaagtatcctatctaagcatgtcagttcttaatgagcaaataatcaataattattataacgaataaatattgcatggtaaatgtaacaaatcataacatcacttatgcttaataaagccaagtaaatttatataattgaattctaactttgaaagtaaatttaataaatttgtcttttgtttacgtggcatgtcatttgtcgaacttcgtgccgcttatgaactgtcagccatattgatggtagaaatatgccaaatagatggcatgcaatattcttgaacgagtgcaaaatgcagtcacacatctgacacgactaatgagcgttggccaactcttggcatttggcaactccccctcaagagcatgagtcacagcatcctagagccagtgaccttgtcgaatgtcaaaggcccacgtcgccgtggcatgcgatggtatacgatatcctggacgccaagaacccccaagaccaccctctgctgtcagctggaatccggcttaagctgtcaggaagctttcgctggggcagctctgcaatcgctggttgttttcaatttcccaacatttcaaggcctttgccagcgcttaatgaaacggaagaaccttcccccgggccaagttagttggcgctcgtgtgtgggcctgaacgataagcggtcaaggtgaaaggggtggcctcaagtcggctggtcgagggtggtatctagtcggggagggaatctagtggggaggacttgacgcacaacttgttgagccacccgtaattgctagccctccgtaataatagatattaggttgcacaggcctaggccaattagttcacccaatcagcaggacattgatgcttaagtgtagggatgctgtactcccatatgcgagtgtaaacacctacttaaatttggctcaaaattcatgttttaagtgtttacaaaatcaacgattgtaagtgtaagtataattataagcataataaaaagttacttttcatttgtgtcaaaactagtagaaatgaacacttctattcgatttaataggtgtcattaaaggtcaacaccatgccacgactgaactttggcttgtggttttcggtctttccatcagcagtcggggcatgtattgtttactttcttgtccccgttcttctaaagcgactaagatggatgcaacttgtgacgttgacccattctcctgtcgcttgcaatgtttacgtactcgtaaaacactctctggtccagtgcgcatgctcaccagaggaacccaaactccagctacctcaatacgattgccattggcccactccccagaaaaggcagcgaggaggaatcaagggggatggttcctgaccttcccaaagtaaggataatgggatgctgggtagtactactcacctgtaaatgccagtcacgctgtagggacgacattgccgtcctttactgaacgtgaaacgcctttgatgtttctcttgttgctcgcgctgttgttgttgttgcttggggcgttgttgttgtgcacccaaatgcattgggttgcctctgctttgggtccttaaagtcctgaagagctgacgttcgcgggccttcaccggttggcccaaaataaatactctcttgctactgctgcttctgccggaacggctcctttggcactgaatcctttgcgggttcgtcttgatggtttgttctccgaatcgattgcgattttcgttcgctttttcttgagggcttccttgaggaacttgtatgggttttcctaggggcaatatccttgctgctctggcgtcatgatgcgttgatgtgacacacagtattccctgttactattgtttatgcagcagctgtttccgcttccgcttccttgtcgcccccttccgtatccgttttcggcacaagcgcactctctcactcactcgctggcgaatatgcagtttttggaacaaatcgatatggggcgagattccagctgaagtcctttgttcttagcttactcaatcacaatcgaacgaattggatccttccagtgagttaaattggttaaaaatacgcctgaagctattgaacactttctctgattgggaaaaccctttgcaaaagcctttttatttttcgtgagtactcttcgtttgttgccctttttggcggatgcgactgttctgctgctgctcaagctcacgactaaactgatgatactcatgtcctctggaggtccattgaaaacccaactcagttaaggtgaacttggtggtggtgagtttcggcatggaaaaaggaaaaacaagagtaagaggtcctctcttcctttccattggttttcatccgttttgttttgctaggttcttttggccgcctgttgccagaaccacctacttttatttctgaaaacagctgatgaatgaattacgaattgccttacgaattaaagtcacacaaatttaacaaatgtaactttacaatttctcatgcta

SEQ ID NO: 17342 - DNA, 2608 bp, DROSOPHILA
agaaacatcaaaggcgtttcacgttcagtaaaggacggcaatgtcgtccctacagcgtgactggcatttacagggttcccggggatcggtttactgcgcgagtgaaccggacccaactggtggagtccagtacgagtcgggagggtgccttctccacacgaagacggctgagggctccggcggaggggcgggcgtggacgggtccggtggcggagtcggcctcgaatgcggctccctgttctcggtggtatcagcgccgccggctccactgcccgacatcgttgtgcccaccgagatggatggcaaacacatggagtccgccgccttccgctccggatgctgttcacccaacgcctcgcccatgcgacgacccgccaccctcagcctggacacgcaatgctgcccgaggaccctgcacgccagcctgctggagcatcagatctccgagctggaggaggacgacaatgagaacctgctgaccgtgtccagcatcacggcgcgaccgttgattgccaaatcgcatgagcttcgcagcagtcggaagtcgggttcaggttccggatctggtttgaatacggcccgcagcaggtgcgtccgccgggccaaggagcgcgagcgggatcgcgtgaccgtcgccaggcgtagcaagcaagtggtcaaggatcgggactcctcaacgaccacaacggagagcggtggtccgaatgtggagccaccggacggcggttacggttggttcatcgtctttggggccttctccgtgcaattctgggtggccggactggtcaagtcgtacggcgtgctgtatgtggagattatggagacatttcccagctctacggccaccgtggcctcctggattccagcgatcctgtcggctctatgtctggtcctggccccgctgtccagtgctctttgccagcgattctcctgccgaacggtggtcttcgtcggcggcattttctgcgccatgggcatgatactgagctactttgccaccagtctgctgcacctcctcctaacatttggcgtactcacaggtattggaggtggcctctcgactactccgggcatagtgatagtgtcccaatactttgacaagcaccgtgcattggccaatggaatctgcgtttcgggcactgccgccggcagcttcatcctacccgttctgataaagcacctcgcggagaactgtggcttccacggcactattctgatcctgggcggttgcatgcttcacgtgtgcgtttcggccacactttaccgcccaatcagtgcttacacggatcaggactcgggccagggacaggaggagacggcaaagcccctcaacgaagacatcaatccgagcaccacgggcattctgactacatccacctacctagacacctgcgatgtgggtgcaggccacgagctgagcgacaagtttatcgagcatctgttcctggaggagtccaagaaccacctgaactactatgccagcaagcagccagcccaggacaagtcagcgcaggagagtgacgacgaggtaaaggatattattggcgagaccactttcatcaagcccatgaagaaggtgcgcagttccggattgctgcactccgtcgaagatctgagcacggactccacttgggtctatcgcaagcactccggcacggactccaatcgcggaagtcgtcgtcggcgcaatgtctttgccaacgacgaggtgatatccaagatacaagcccacttggagaagcctctttcgccgccgagtgtggtcagtcgcggactcagcaagagcatggagatacccactccggttagcaacctcagtgatctcaagcagcagccggtggagcaggcggagctcggcattctagactcccagctggtggagtccattatcgatggcgacggccaccttgccgccgatgaggatgacgatgacgacgaagagcggggaccacgcacttgctgcgagcgcatcgagatgtacctggacatcagtctgctgcaggacccgagctttatcctgatgtgcctatccgtcaccttgatgtccgtcggctgtccctacatgttgtactatctgcccgcccacgttatttcaataggatacaataaaagtgaggcgggatacctggtggccatcagcgcggtcctagatttaattgggcgccttggacttggctggctgtgcgacctgcagctattcgatcgcaagaagacctacaccttgtgcattttgggcgccggatgtgccgtgctcacaattcccttcgccaagactctggttttggtgggtctatcggccgctgtctacggactttgcctgggtagctggtatgtacttatgccggtcctccttgcggacgtctttggcacggacaggatcagctcgagctacgggctggtgaggatgttccagagcatcggggccatatcggtgcctccgctggcaggactgatgcgagacctttccggagactacgagatatgcttctactgcatgggatcctgcatggtgctcgggaccactccgctgattgtgtggtccatcctggaggcccgcaaccatcggttgtttgttcagcgcgaggaggaggagtgcgaggaggcctag

SEQ ID NO: 17343 - protein, 855 aa, DROSOPHILA
MSSLQRDWHLQGSRGSVYCASEPDPTGGVQYESGGCLLHTKTAEGSGGGAGVDGSGGGVGLECGSLFSVVSAPPAPLPDIVVPTEMDGKHMESAAFRSGCCSPNASPMRRPATLSLDTQCCPRTLHASLLEHQISELEEDDNENLLTVSSITARPLIAKSHELRSSRKSGSGSGSGLNTARSRCVRRAKERERDRVTVARRSKQVVKDRDSSTTTTESGGPNVEPPDGGYGWFIVFGAFSVQFWVAGLVKSYGVLYVEIMETFPSSTATVASWIPAILSALCLVLAPLSSALCQRFSCRTVVFVGGIFCAMGMILSYFATSLLHLLLTFGVLTGIGGGLSTTPGIVIVSQYFDKHRALANGICVSGTAAGSFILPVLIKHLAENCGFHGTILILGGCMLHVCVSATLYRPISAYTDQDSGQGQEETAKPLNEDINPSTTGILTTSTYLDTCDVGAGHELSDKFIEHLFLEESKNHLNYYASKQPAQDKSAQESDDEVKDIIGETTFIKPMKKVRSSGLLHSVEDLSTDSTWVYRKHSGTDSNRGSRRRRNVFANDEVISKIQAHLEKPLSPPSVVSRGLSKSMEIPTPVSNLSDLKQQPVEQAELGILDSQLVESIIDGDGHLAADEDDDDDEERGPRTCCERIEMYLDISLLQDPSFILMCLSVTLMSVGCPYMLYYLPAHVISIGYNKSEAGYLVAISAVLDLIGRLGLGWLCDLQLFDRKKTYTLCILGAGCAVLTIPFAKTLVLVGLSAAVYGLCLGSWYVLMPVLLADVFGTDRISSSYGLVRMFQSIGAISVPPLAGLMRDLSGDYEICFYCMGSCMVLGTTPLIVWSILEARNHRLFVQREEEECEEA

SEQ ID NO: 17344 - DNA, 4692 bp, DROSOPHILA
caaatgcttcctgaaattttgggctgctcgccgctgggaaccggttgttgtttttttgaattattttcgtatatttgtatattcgtattttcacgctcgtgtccagccccttatcgtcagttatttgggggagttatgtgtgtgcagcagccaccgtccccaaaaagcgatgtgtcacctgatggcgcagcgatttggatcctcggtgaagtaccagcggttaccagggtgaataaaccgaaaggaattcctgggaaagacagaccatctttcatgtccaattgtgtcctatgaacacatctcaatacatcatagcagacactcggggaatttccgttgttgaattgtggggggtggtggtggggtgcacctttatttatagagcaccatgcactccataccctatagacaaggccatcggacgagcacgatcatatctattcgccattagatttcgctttccctgcaacacttgaccaagatatcgggaagccagacgacgacctacaccaactggcaatctatgtatgtaagtatgtatgtgccagtctgccatcttctcacacaattagcaattggccaaagaatggaattattcaatgcatttgcatttaatgcatacttgattgcggctaatgagagagaaacgccacggcaaattgctagagaagattagacctttggcgcataatcagcgcgccgtaattgctcgtaaataattgtgttacatgagcatatcaattagtcagccaattaaccaacagccagccaaaattgggattctgcgattctgggatgagtggaccagggaaatcccggtgctctgagtgctctgcattgcgcaggaacgaggtgctttccatgctaacagccgcataaccagaatccacgagtcaagccaggtgagatcggcacctgcgtcggctctcgagcggcagtgcctttatgtaataagcgccactcggtttcggattcggattcggattctgagttgtggaagtcgtcgagcttttataaaagcggcaacaacatcgcctgttcactcagttcacacggaatcactgtcaagtgcaatctgcagcagtagcagcaccagcaccaggaacagtaccatctagtacatcggaaatctagagcgctagccaagacatttacagtataaaccgcagacgagagccaataaaatgctggccagcgagaactttcccacacatcacttcaaggaatctatatttaagccgtacagtacgacgagtggcgatgatttggcaagcgttagcccattgacagcgacggcagcgttggtggcgtccacgtcgtcaccggctgattccacctccacagttgcattcgagcaggccagcaaaatgttggccaacgccgccaacaataataataataataataacaacatcacgagcaccaaggatgatctatccagctttgtggccagccatccggcggcagagttcgagggcttcatccgcgcttgcgtcgacgagatcatcaagctggccgtcttccagggcaccaatcgctcctcgaaggtcgtcgagtggcacgagccagctgagctgcgacagctctttgacttccagctgcgggagcagggcgaatcgcaggacaagctgcgcgagctgctgcgggaaacgattcgattctccgtgaagacaggacatccgtacttcatcaatcagttgtactcgggtgtggatccatacgcgctggtaggtcaatggctcaccgatgccctcaatcccagcgtgtacacgtacgaggtggctccactctttacgctgatggaggagcaggtgttggccgagatgcgacgcattgtgggcttccccaatggcggccagggtgatggcatcttctgtcccggcggctcgatagccaacggttatgcaatcagctgcgcccgctacagacactcgcccgagtccaaggtgagtgccccattgcagccaagtggtttaccgccaatccacgcggaagtcggcatccactgattggcgagtgatcgttagtcatgcccgtgatatacatataaaagtgaaactaaaagttcttagcgatttaatcagataaataaactataaagatgtgtgtttcaagattaaaaggcacatatttaggttcataaaaaaggtttaatgatttcctgtgctaaaaattatactttttatgttcattttcgatttatatagaaatttaactgataaagagaacggtattttaaaacaatgcattttagaacttagtgcttttcaaggatttttctacatttttgtctgttgaaaaaattcaattcaaattccaatctaaataacgaattaaaactttaaaaaactcgaatatctacggaattgaaataggaattcttttctaaatagatcgattttataaaaatagttatactatatagaaaaagtattactaacttttataaatatacgaaattaacctcttcaatccgcagaaaaacggactctttaatgccaagccgctgattatcttcacctcggaggacgcgcactactccgtggagaagctggccatgttcatgggcttcggcagcgatcatgtgcgcaagatagccaccaacgaggtgggcaagatgcggctgagcgacctggagaaacaggtgaagctgtgcctggagaacggctggcagccgctgatggtatcggccacagcgggtaccactgtgctgggcgccttcgatgatctggctggaatctcggaggtgtgcaagaagtacaacatgtggatgcacgtggatgcggcttggggtggcggtgcgctcatgtccaagaagtatcgccatctgctcaatggcatcgaacggtgagtttcatcatatcctggttgctcatttcgaggggtaaactgaagatgtgtatattggcagggctgattcggtcacttggaatccacacaagctgctggctgcctcgcaacagtgttccaccttcctgacgcgtcaccagcaggtgctggcccagtgccattcgaccaatgcgacatacttgttccagaaggacaagttctatgacacatccttcgacaccggcgacaagcacatccagtgcggccgacgagcggatgtcttcaagttctggttcatgtggaaggcgaagggcacccagggtctggaggcgcatgtcgagaaggtcttccgcatggccgagttcttcacggccaaggtgagggagcgtcctggattcgagctcgtcctcgagagtcccgagtgcaccaacattagcttctggtatgtgccgcccggtctgcgggaaatggagcgcaatcgcgagttctacgaccgtctgcataaggtggcgccgaaggtcaaggagggcatgatcaagaagggctccatgatgatcacgtaccagccgttgcgccagctgcccaacttctttcgcctggtgctgcagaactcctgcctggaggagtcggacatggtctactttctggacgagatcgaatcgctcgcccaaaacttgtaaacggtgacgcggcgatggcatgttatgaggttaggtgttgacaacattctctttaggcttacgccgattgtatcttctagtgtatggttaactaatactactcacgtttgtatatttttctggatgttaagtattaccaaaaacaaagaacaaaaatacatatttataggtcatttcatttagattaaagtgtgtccttgccttgggaactgggaaacgtatcggcaacaggatgctttaaatgcaaggttatttaaaaacatagtgattaagtttgcaaacccttaactatttcaaatacacttgatttatgtatatttaacattttgggccttacaatttaagaggaactagtaacagcctccaagtctccttgacttcctgagtaacaacttagtacttatgatttaatctctagtatttggcagctaactcttctttatccaatcccactgactgacatcgttgcctccagccttctcgattgcctccgctacgctcaagctctgaccaggctgaataccatagccgatgcgcaggccatgcggattcgagggcgtcttgcagtccatggtgcactccttgcgcagcacagtgtctacctccacggacgagaagaaggccaccgacatgggcagatcctgcagtccgatgcgggacacacaaaaggagcgcgtcattaggtttgtgatgtgcatggccagcgccgctttgggcgatagctcttccttgaccaagtagcgcaattcatcatggaagctcaagcagaatctaacatgcgatcccatcagccatcgcatgctcaccagcatcagatgaaggaagtccactgcaccgctctgtaccacccaattgatgcgcgttggcaggaaacgttgctcctgctccggtccagtatccgcctccaatgctcgactaagacgtccgcccaggaacggcgttcgtggctgcgatcccgtggcaatctcttccaggcgattgaacatggcgctttccgtgcctccctgccagttgggacgatgaaatacctctgccagggtgcggttgcgttgaatggccagtcgggaagcctcgtagctgctgtagctgttagggatagtaatgtggttaaatgtgaagaaagatgtgggtttgtgactacttacgccctgtcctccagttcgtcatgaaactcctctcgcaa

SEQ ID NO: 17345 - DNA, 2095 bp, DROSOPHILA
tcgtcgagcttttataaaagcggcaacaacatcgcctgttcactcagttcacacggaatcactgtcaagtgcaatctgcagcagtagcagcaccagcaccaggaacagtaccatctagtacatcggaaatctagagcgctagccaagacatttacagtataaaccgcagacgagagccaataaaatgctggccagcgagaactttcccacacatcacttcaaggaatctatatttaagccgtacagtacgacgagtggcgatgatttggcaagcgttagcccattgacagcgacggcagcgttggtggcgtccacgtcgtcaccggctgattccacctccacagttgcattcgagcaggccagcaaaatgttggccaacgccgccaacaataataataataataataacaacatcacgagcaccaaggatgatctatccagctttgtggccagccatccggcggcagagttcgagggcttcatccgcgcttgcgtcgacgagatcatcaagctggccgtcttccagggcaccaatcgctcctcgaaggtcgtcgagtggcacgagccagctgagctgcgacagctctttgacttccagctgcgggagcagggcgaatcgcaggacaagctgcgcgagctgctgcgggaaacgattcgattctccgtgaagacaggacatccgtacttcatcaatcagttgtactcgggtgtggatccatacgcgctggtaggtcaatggctcaccgatgccctcaatcccagcgtgtacacgtacgaggtggctccactctttacgctgatggaggagcaggtgttggccgagatgcgacgcattgtgggcttccccaatggcggccagggtgatggcatcttctgtcccggcggctcgatagccaacggttatgcaatcagctgcgcccgctacagacactcgcccgagtccaagaaaaacggactctttaatgccaagccgctgattatcttcacctcggaggacgcgcactactccgtggagaagctggccatgttcatgggcttcggcagcgatcatgtgcgcaagatagccaccaacgaggtgggcaagatgcggctgagcgacctggagaaacaggtgaagctgtgcctggagaacggctggcagccgctgatggtatcggccacagcgggtaccactgtgctgggcgccttcgatgatctggctggaatctcggaggtgtgcaagaagtacaacatgtggatgcacgtggatgcggcttggggtggcggtgcgctcatgtccaagaagtatcgccatctgctcaatggcatcgaacgggctgattcggtcacttggaatccacacaagctgctggctgcctcgcaacagtgttccaccttcctgacgcgtcaccagcaggtgctggcccagtgccattcgaccaatgcgacatacttgttccagaaggacaagttctatgacacatccttcgacaccggcgacaagcacatccagtgcggccgacgagcggatgtcttcaagttctggttcatgtggaaggcgaagggcacccagggtctggaggcgcatgtcgagaaggtcttccgcatggccgagttcttcacggccaaggtgagggagcgtcctggattcgagctcgtcctcgagagtcccgagtgcaccaacattagcttctggtatgtgccgcccggtctgcgggaaatggagcgcaatcgcgagttctacgaccgtctgcataaggtggcgccgaaggtcaaggagggcatgatcaagaagggctccatgatgatcacgtaccagccgttgcgccagctgcccaacttctttcgcctggtgctgcagaactcctgcctggaggagtcggacatggtctactttctggacgagatcgaatcgctcgcccaaaacttgtaaacggtgacgcggcgatggcatgttatgaggttaggtgttgacaacattctctttaggcttacgccgattgtatcttctagtgtatggttaactaatactactcacgtttgtatatttttctggatgttaagtattaccaaaaacaaagaacaaaaatacatatttataggtcatttcatttag

SEQ ID NO: 17346 - protein, 575 aa, DROSOPHILA
MLASENFPTHHFKESIFKPYSTTSGDDLASVSPLTATAALVASTSSPADSTSTVAFEQASKMLANAANNNNNNNNNITSTKDDLSSFVASHPAAEFEGFIRACVDEIIKLAVFQGTNRSSKVVEWHEPAELRQLFDFQLREQGESQDKLRELLRETIRFSVKTGHPYFINQLYSGVDPYALVGQWLTDALNPSVYTYEVAPLFTLMEEQVLAEMRRIVGFPNGGQGDGIFCPGGSIANGYAISCARYRHSPESKKNGLFNAKPLIIFTSEDAHYSVEKLAMFMGFGSDHVRKIATNEVGKMRLSDLEKQVKLCLENGWQPLMVSATAGTTVLGAFDDLAGISEVCKKYNMWMHVDAAWGGGALMSKKYRHLLNGIERADSVTWNPHKLLAASQQCSTFLTRHQQVLAQCHSTNATYLFQKDKFYDTSFDTGDKHIQCGRRADVFKFWFMWKAKGTQGLEAHVEKVFRMAEFFTAKVRERPGFELVLESPECTNISFWYVPPGLREMERNREFYDRLHKVAPKVKEGMIKKGSMMITYQPLRQLPNFFRLVLQNSCLEESDMVYFLDEIESLAQNL

SEQ ID NO: 17347 - DNA, 10215 bp, DROSOPHILA
agcctagaactggaaaaggatttggccaagttgaacattgtgccgaaatattgaatgcaacttacgggattgaagaatatcgaaaactagatattcattcatgatgccctctgtggctacaaacacgccctcggcaactaaaatgaagaaccgcaggcaggaaactgagaggtaaggcaacagaaaatatctcaggccctgtaattagacagctttatattgtccaccaaccaaaatattacggatccctaccagaactgctcccagcagtagaaaaatgcagcagataacgtagataccgctcaccacaagggaaaaaagtcccagcaggctgtcacctaagaaagccagttatatcttagctattcctatgctcaggaccactcacgatcaacaaagaagcgatctagtccacgtattagcacctcaacgatggctatcaggatgcttccgcacttcagatccacgcagcaacagcaattgtccgagtagatcattttcgtttctttttggggggtttctaagccaatttcggatacgaactgcctggccaactgacttacaatagcaggtaattatgatgaagtctttaattcggagcacgtttcatgttccaatgcttgctgcataattaatcggcttgcgtagcttagaccaattaaggtcaatgccaccaaagtgcagtgcaatcggtggtctatatttcacattagaactagtgcgattttaatcgaacacgttatcaaactaaattaattgatttgtttaaatactgtaatattattatcttttacattcatttgaatatcaaaaacattagtggaaattctttaaaatactttaaagtctaagaaatatggtttaaagaggggaaaactacatcttaatgcgttataacactactagaatgaggcaacttattcagggagtaaaccactttgtagtgctggggtaacagcagtttgaaatccttgcccagaaaggtgcatcaaatatcgacaaaattacacatatatttattaaaaactctatagcaaagttaatgtacaagaaccaaagctctttgcatcttgtcaactgcagaaactcaggactcgcaagctggagaatgtagagtaatatgtatttgtggctcatcctagcctaagcgcttttaaatgcgaggagacttatttctagcccagtaaacgcaatgattttatagtcagcctacagcggactttcgtctgcgggtccgccgaactcctcgccctaggggaatcgtcctccgttgttgaagttgtttggaggcggacgacgaatgggacgacggttgcgggtccgttgcgcaaagcgattgttattggctgacatctggttttgctgaatgtttcccggcgacgtgtcccgttgccagacaatccgctgcggacggttctggctgttgggactgccacccctcatggcgcgatgtcctcgtcgggtgggcaccgcactacgcagcgtgcgaaatcgcgtgttctccgacggtgaagtggcctccgcctcccgaccctcctcctaaaaagaaatggagagcaatcaatttaggattcagttggtgcagattggtcttggtttggattacaacagaaacattacatccattcttcagtatttaatattccatgcactccataagtggggtgaactacaaatcatatcccatggggttaattacattcaaagcaacgtatttccatgcagggtctcatcgggaccaacctgcttttctccacagctatcttgccaccaatgcaagtactacttacctcaacacccaccgcctgcttttcaccctcggaggagacgccgtcggctccctcgctgtcctcggtggggtttccctcgccaagattggcttggttgtgggacacctccgattggctagtgcccacatttggatctggataaaattgagtgcttagttttccaatccatttacactatttattataacatactatcatttcctagcggctgagagtcttctccttggccagtagccattgtctcctcggcgaatgcctcatctgcttctctggcgttatctgttccgtcagcatgatcaccaccatcgtcagcagctttaagggcgtcgcttccgctgctctcccctgcctcgctctgtttttgcggagaactggccgaggcagctcccgtatcgctggggcctgcgctttcatgaggcgcgcctccggccacctcggcggtgccatcgacttcagcggactccaagcgggcaggttgctcacaaaaattcgagacttgaggtgaacttacaatctccacagagctgtgtttgatttaattcaattagtgaagctcatcgtagacaaatcgttaacctacctttcgttgcgtcgggcggcggctgtggacgttgaggcagctgcctgcttccagttggaggcctcagcctgaggtagagtcaccgggttcgatgactctccactgccactggtgatggcctgactctggttgttctcctgagtggaagcggatgcagttgcaattgcctggttgtccagcgattgactctcttcctgagcctgcatgtgctgctccggcacttcgatgtccacctcgttgttgtcctgggcatccacagctatatcattgtcatcgtcaccaccttcgttgtcatccatctcattgtcctgctcgtacgagtcttcgtagccctcctgttcggcctcgcctccgtcaatgggaccatcgtcggcatcggccagaacgtcctcctcgtcgtctgagtcaaccacttgaatgtcatcctcctgatcgcgctgggaggaggttggcatttgatcgacatccattccggaatcaccaatgtggccggcggataactctccgctgtgcatgggaccgcgaagtctcttagtaatttttgacattttttcggcgacaccctcctcagtgccggtggaggagtcaccctcaatgtcgcgaggacgcttaatgccttgtgaggagcatccagcctgggtggtcgtcacattgctgctggacggggtgtgtctgctgtggctactcaccactgtggaggagctgctgctgctgccagaagtgctgggctgctggctctgacttccgccatcctggatactgggagcagtggcagtcgggacagacgtggaactggatgatgaagatgacccttccacacgcggcgacactagcgccacaacttgctgttgggctccgcctacaaacaactgcgaatcgttttgctgcgggtgctggatactttccgcctcctgggaactttcggcagcagatgaggcgcccatcggcggaatagcagcgactgccacagatgcagagctagtggacggcatgtaatcggtatgtgaggaagtgggtgaggaggacgccatcgattccagggcggcacttccagtggtgtgaacctgttgctgtggtggcaccaaagcggtttgggctaccgccgagctgccgccgccagcggcggatgttgtggaagtggatgaggatgaggatgacgaggaggtggacgtactggatcctgcagggggctgttggctcgtaggtagaatcgcggccgtgcggctgttttgcaccgaaataggacgtatgctggccaaaggagtctcccctccacgccagggagttacggtggccgattgttgcaccgttgccgaaccagacattggtttcacgttagcagttcgcggagagctctccgagatattgcccttctcggcaaccgagctggtcgagggcttggttgactgctgagatcccagctgacgggtaagctggttaattctcatgtgcagcgattcgttctcacgggtgagtcgctggttgatgtccttattggcggctatattctcctgcagctccttctctaaacgggcaattgtctcgtcgtatgaggatttggtgccagcaaaagttgtctcttgattgaccaaatcagtacgagccactgtaaggtctactacaagtttgtccaacttggccttgtattcctgtcgtatggcactggtatccgtttctggctctgtgcgctttttgacctcatcacattctttggtaatcttttcgtgctcatctttaagcgcccgtagttgattattgacttcctccaactcgctgcgaaccttctccagttccgctgccgactcggttccaccaccttgagattgaaggcctatatagaagtccttgtaccgctttgccagtttgcgaagctgtagctccttggtttccttatctgcaatagtcttgtccttcgtctccaactcctcgttggccttcaacagctcttcctccttttgcagtagtcggttcttcaattccatgatatcctgcgtctggcgcgtgttgttttgcttgagattggtgaattcgtccacttgcttcttgcgcgcctcgtccagaatttgcatttgtttgttcagcattgggatctctgtattcatgcgctgctttagcacagtcagctcatccgattgtttcttgtttagctctttctcggcggtcagcaacttggccaggtgctcgcgctcagcctgcagacgcttgaactcctctgggttgcgattgctcttctccaccagcgcattggcacgctgccgccacttaattgcctcggtgcggagcgaggtgttctccacattaatctcctcgatcttcgatgtcagttccttgttgctgcactgcagcgggaacagttccttttccacgctgctgatacgatcagtgagttcggcgacgcgaagagttaaagcgttacgctcctctcgcaaaatgcggttgctatcggtgatggcattcagagtttcaatcttacgtagcacctcctcgtgtttgttggccgacaccacgtctgtctggctctttgcgcgctcttggttcagatagccattcagttcgtcaaccttcttttgttgaatggcgtgttctgaaatcagacgagcattttccgccttgagaatgtccagcttggcagcgaacagatccttctccttgcgcaaaaactttatgatctttagtagctgttcgttgttccttccttcttcggcagcggttagtccagaagcattcaggctctgatctccatccattgcagactcattcaaggaagagttcgggttttggctttgactggccagaacagccagcttcgaggccagagcttcgatttgatcatgcaagttggagttcaatgcatgcaaatcagccactctcttctctgactcctccctctccttgtccagcaacttctgggcttcggcattcgaacgcagaagttcatcgtatgcggcttgcaatgattcccgacctgactttaattggttgagttcgtcgttggctttgaagaattctgccttgtaacgggttaactcctgaatatctgcagaatgctgtatcattccgttagcatacttcacctccgcagcattaagagattcaaccaggcttgtgttttcgctacgcagtgtccgaatggtgcaattagcttccgtaagcttctccagcaagctctttagatcgtcttgggctgactttaattgacccgactggttgacagtcttgctctgctcggtgacattggacaacatggcctccgcttccaaatcgcttatacgggtcttcagttcagcctctgaactgcgaagcttcttgatttcctcctcctgcttggccaccaactcgccgtgaagctcgtgcagacgcttgatctcactttcggcactttgagacatcttgtagaactgctcgccatgctcacgagtctttgccaactctttagtgagtgactcaatctccaccgtggcctggtccagcttaagttcgaactctcgtgctcgtttattagctgcagtgatggggttgtcatttagagtgggcgtcagaacttcctgaagttttttgcttaattcattgaccttgttgaccttctcagcaagttcttcgcgaacgctggtaagctccgcttgccacttgtctgccagctgcttttcttcatctttcaacttgatggccgtctccgcctgtcgcttaaactcgttaattgattcacggaacttctcctcctcctcctggaagtgacgacgctgagcagccagttcccgtacagtgtcatctaaacgctgctctaaacgctggcgaccctccatctcagatcgctcaaggttggtctttatgaattccaaactgtttagaagcagtgattggctctgctgctcgcggtgataagtctccttttcgatctgcagtctagaagatgtgtcccttagaatgcggttctcttggcgaaggctttgagcctctgcatcggctgctgcgtgcttgcggtgtgccgccatcatttcgtccttgagcaaatgtacggtttgctcgtgtttaataatggtcttttcatagttcttggtacgctcttccaatgtagtcacctgctgcttgtaggtgcctatatttttgtgaagtagttcgatttgctctttctggaattcggtggtgttcataagcttgcagttactgctggttagctcccgcacctccttacgcatagaatcgaactgttcttgggccagtgcatcgtttttacgcttttcgctagtgtaatagtcgtagttctctttcagtgaggcatacttcttgacctccccttccaactgttgctccagctgtcgcaccctcttttccagtttcctgctctcctcaaaattggctgccggctgctctgaagtatccagtgcagagtcgttaggctccagattggagtcgtccagatccacagtattttgaccgagcttcttctgagccgcgaaatataacttcttgtagcggtcgcacttggatagtagtgtagtaaccgtattgttcttttgcgttaataaatcctccaattcggcaaaacgcgcatccagttttcttatgtgattcttagactgctccagcaacatcttatcttggttcttttcgctagcctccaaaagttctgtgagctcgcgggacatattcaggaggtatgtatttctatccaccaactcttcaatagaactaaaggttaccaagttatcgctgatcaaactttcgctggtgggtagctgacgagttggttggatacgtacatgtttcactccagcccttatgcagttcaattcgtccagcaacatgcacacctgtcggctgagatcggtgtgtgtctgttttagtttcttattctcattttggttgtgattaagggtagataaggccctttccaattcccgctcaaggcatagcttattttgtaataattcatcatgctcccgcaggagctcactgttagtttccttcattttttggtaatcggagttctgtttttccaaaatcggtgcactctctgaaatctcagcaatgatcgacttgagctgcaacttcaactgctcaatttcgcagtttcgcatctccagttcttcgctgcttttggcgtacatggagtaaagttcggtaagcgatagatcggagcggataaggcgactagccacagccgcactgggagccaactggcatatggcgctttccaaattactttcccgggcctgttttagcaaatcgttggcacttgctagctcctgttccatagcctgaatcttcttattttgctcgtccaactcagcgctgtgcttttgcttcatggtttccatttgctccgtcaactgggcgcactgctcttcggcctcctctaacaaacgtttaatttcggagatgccctgtaggagttcctcccgttggatcagatgatcggattcggtgctcttaaagatttcaaaaagcttctctttggcatcaagttcctttttcagcttccccacatactcttccgtggcctggttctgcttgaaggcggtgtcgttttgcatttcaatcttgctggttagttccccgatggtcttgacggcctgttcgtactgttcctgcatcagctttagcgattcggtcttttctttaaggcaagactgtagctgcatggtgtttattgtgtgctcccgtcggatgttctgtaactcggcgttgcttttgttcagatctccgctgattaacaaaatctccttgtgcagcatatcgcgttcgctttccatgcggttctctttgagctccagagccacttccttactttgaatttcgtccacgcgagcaatggcttcgcacttggcagcaatcgcgctgctcagctgctgctggtaggtgtgcagatcctgcttcaatcgttccagctccgcttgttggcgctcgattaccttcatcatcgaatcgcgttcttcaactaccgacgccttttccttgcgcaactgtgatatagtttgctcgcctttggcgatcgtgtccattaggttaactcgttccgaagacatctgatctagatgagtgcgcagctcgtttacatttaactcaaagctggtaaattttactagatagtcctccattttgttctccagctcttcctttttttgctcggcttcggctgtgaaaagggcaaaaataaataatcttcttaactggatttaagtaaccacaaagtatttggattaaaatgaatacacagaaattccctgaagatttcaaactcggactaatcaactgttttggtgggaaaatgtccggccagtgttaccacaccggtgaggtgaaaattaataaggaaaataatgttgctgcaagcagccattgtttttaattgcaacaacccggaattttatatttaaatttctatacaaaaaatatgtaaatggcgcaagagtgtttaccacgctagaaaccatacagtcgcggattgcttattacaagaagcggtatctgagccggtaaacgccgcaaagttggaggtaaaagcatacgcatgcaaataaagggttatttgcaaaatatggcgcattttagtatatatacaaatataaaaacttacccaaccgattggcggccgcacggttcttgcagtactcatctgagaaattgttgatgtactccgacaatttcttctggacgtcttccggcacgagtttcaactcgtcgggctgaagtatgttgttcagagtttgtggaccactgagatccatgttcgcagttgatccttgtcaagcagcggttaaatttatatggagcggtgcgaagtttactttcttactttttactttactttagtcttaattttttgcgaattgtgcacaaagtcgctttagggacgcgaaaaaatgaacgtcaatgcagtggagatggaacaatatcgatatttttcggtactatcgattcgagtatattattctcactgtttcaacagcgttataacagcctattcacagcctaataaaacaaaatgtttttctttaaaaagagataaattcattcataaaaaaaattttttaaacgtggttgaaaaatccgtttttattacgaataaaaaaagaaaggactttatttaataacataaacgaatgcaaaacccaaaccaagcgaaatcattccctttaattccataaaacgcgattaaccttttgatttcgtgtttatttggtaattgtctttatgggtaaatgtctcacaacaactattttaattctagggtaatgtaatgtgatgttctccattcaagcctcccttctgtctaaagccacttaatttttcctgcacaaagtttagtcctttccgatatggatgtgcgaacctacaactatagtcggcctatataaccatctagtcgggcattgatcgtagttatcatattataaagttatatacgggtatttgtagttcatgtcttttaaactcagttctttttgcgcaacatttggtgctcagttgttggttgtttaggttgtttggtttcttcgtttgaatatcatcatcttacacatccttttgctgttgctcaacggaaggataacaagcgattgggtgcgggtgggcatggggattgattaagatacaaagatacggatgagaacgtacggatagtagtaatagtaactggtagaatcagcaatatcggtgaggcattcgaactctgaaactcaggaactcaactagtatttgatcgctactaaaacactattaacatatggggcaaccaacgaatccgaatcatttctaggcctcctcgcactcctcctcctcgcgctgaacaaacaaccgatggttgcgggcctccaggatggaccacacaatcagcggagtggt

SEQ ID NO: 17348 - DNA, 7409 bp, DROSOPHILA
cgactttgtgcacaattcgcaaaaaattaagactaaagtaaagtaaaaagtaagaaagtaaacttcgcaccgctccatataaatttaaccgctgcttgacaaggatcaactgcgaacatggatctcagtggtccacaaactctgaacaacatacttcagcccgacgagttgaaactcgtgccggaagacgtccagaagaaattgtcggagtacatcaacaatttctcagatgagtactgcaagaaccgtgcggccgccaatcggttggccgaagccgagcaaaaaaaggaagagctggagaacaaaatggaggactatctagtaaaatttaccagctttgagttaaatgtaaacgagctgcgcactcatctagatcagatgtcttcggaacgagttaacctaatggacacgatcgccaaaggcgagcaaactatatcacagttgcgcaaggaaaaggcgtcggtagttgaagaacgcgattcgatgatgaaggtaatcgagcgccaacaagcggagctggaacgattgaagcaggatctgcacacctaccagcagcagctgagcagcgcgattgctgccaagtgcgaagccattgctcgcgtggacgaaattcaaagtaaggaagtggctctggagctcaaagagaaccgcatggaaagcgaacgcgatatgctgcacaaggagattttgttaatcagcggagatctgaacaaaagcaacgccgagttacagaacatccgacgggagcacacaataaacaccatgcagctacagtcttgccttaaagaaaagaccgaatcgctaaagctgatgcaggaacagtacgaacaggccgtcaagaccatcggggaactaaccagcaagattgaaatgcaaaacgacaccgccttcaagcagaaccaggccacggaagagtatgtggggaagctgaaaaaggaacttgatgccaaagagaagctttttgaaatctttaagagcaccgaatccgatcatctgatccaacgggaggaactcctacagggcatctccgaaattaaacgtttgttagaggaggccgaagagcagtgcgcccagttgacggagcaaatggaaaccatgaagcaaaagcacagcgctgagttggacgagcaaaataagaagattcaggctatggaacaggagctagcaagtgccaacgatttgctaaaacaggcccgggaaagtaatttggaaagcgccatatgccagttggctcccagtgcggctgtggctagtcgccttatccgctccgatctatcgcttaccgaactttactccatgtacgccaaaagcagcgaagaactggagatgcgaaactgcgaaattgagcagttgaagttgcagctcaagtcgatcattgctgagatttcagagagtgcaccgattttggaaaaacagaactccgattaccaaaaaatgaaggaaactaacagtgagctcctgcgggagcatgatgaattattacaaaataagctatgccttgagcgggaattggaaagggccttatctacccttaatcacaaccaaaatgagaataagaaactaaaacagacacacaccgatctcagccgacaggtgtgcatgttgctggacgaattgaactgcataagggctggagtgaaacatgtacgtatccaaccaactcgtcagctacccaccagcgaaagtttgatcagcgataacttggtaacctttagttctattgaagagttggtggatagaaatacatacctcctgaatatgtcccgcgagctcacagaacttttggaggctagcgaaaagaaccaagataagatgttgctggagcagtctaagaatcacataagaaaactggatgcgcgttttgccgaattggaggatttattaacgcaaaagaacaatacggttactacactactatccaagtgcgaccgctacaagaagttatatttcgcggctcagaagaagctcggtcaaaatactgtggatctggacgactccaatctggagcctaacgactctgcactggatacttcagagcagccggcagccaattttgaggagagcaggaaactggaaaagagggtgcgacagctggagcaacagttggaaggggaggtcaagaagtatgcctcactgaaagagaactacgactattacactagcgaaaagcgtaaaaacgatgcactggcccaagaacagttcgattctatgcgtaaggaggtgcgggagctaaccagcagtaactgcaagcttatgaacaccaccgaattccagaaagagcaaatcgaactacttcacaaaaatataggcacctacaagcagcaggtgactacattggaagagcgtaccaagaactatgaaaagaccattattaaacacgagcaaaccgtacatttgctcaaggacgaaatgatggcggcacaccgcaagcacgcagcagccgatgcagaggctcaaagccttcgccaagagaaccgcattctaagggacacatcttctagactgcagatcgaaaaggagacttatcaccgcgagcagcagagccaatcactgcttctaaacagtttggaattcataaagaccaaccttgagcgatctgagatggagggtcgccagcgtttagagcagcgtttagatgacactgtacgggaactggctgctcagcgtcgtcacttccaggaggaggaggagaagttccgtgaatcaattaacgagtttaagcgacaggcggagacggccatcaagttgaaagatgaagaaaagcagctggcagacaagtggcaagcggagcttaccagcgttcgcgaagaacttgctgagaaggtcaacaaggtcaatgaattaagcaaaaaacttcaggaagttctgacgcccactctaaatgacaaccccatcactgcagctaataaacgagcacgagagttcgaacttaagctggaccaggccacggtggagattgagtcactcactaaagagttggcaaagactcgtgagcatggcgagcagttctacaagatgtctcaaagtgccgaaagtgagatcaagcgtctgcacgagcttcacggcgagttggtggccaagcaggaggaggaaatcaagaagcttcgcagttcagaggctgaactgaagacccgtataagcgatttggaagcggaggccatgttgtccaatgtcaccgagcagagcaagactgtcaaccagtcgggtcaattaaagtcagcccaagacgatctaaagagcttgctggagaagcttacggaagctaattgcaccattcggacactgcgtagcgaaaacacaagcctggttgaatctcttaatgctgcggaggtgaagtatgctaacggaatgatacagcattctgcagatattcaggagttaacccgttacaaggcagaattcttcaaagccaacgacgaactcaaccaattaaagtcaggtcgggaatcattgcaagccgcatacgatgaacttctgcgttcgaatgccgaagcccagaagttgctggacaaggagagggaggagtcagagaagagagtggctgatttgcatgcattgaactccaacttgcatgatcaaatcgaagctctggcctcgaagctggctgttctggccagtcaaagccaaaacccgaactcttccttgaatgagtctgcaatggatggagatcagagcctgaatgcttctggactaaccgctgccgaagaaggaaggaacaacgaacagctactaaagatcataaagtttttgcgcaaggagaaggatctgttcgctgccaagctggacattctcaaggcggaaaatgctcgtctgatttcagaacacgccattcaacaaaagaaggttgacgaactgaatggctatctgaaccaagagcgcgcaaagagccagacagacgtggtgtcggccaacaaacacgaggaggtgctacgtaagattgaaactctgaatgccatcaccgatagcaaccgcattttgcgagaggagcgtaacgctttaactcttcgcgtcgccgaactcactgatcgtatcagcagcgtggaaaaggaactgttcccgctgcagtgcagcaacaaggaactgacatcgaagatcgaggagattaatgtggagaacacctcgctccgcaccgaggcaattaagtggcggcagcgtgccaatgcgctggtggagaagagcaatcgcaacccagaggagttcaagcgtctgcaggctgagcgcgagcacctggccaagttgctgaccgccgagaaagagctaaacaagaaacaatcggatgagctgactgtgctaaagcagcgcatgaatacagagatcccaatgctgaacaaacaaatgcaaattctggacgaggcgcgcaagaagcaagtggacgaattcaccaatctcaagcaaaacaacacgcgccagacgcaggatatcatggaattgaagaaccgactactgcaaaaggaggaagagctgttgaaggccaacgaggagttggagacgaaggacaagactattgcagataaggaaaccaaggagctacagcttcgcaaactggcaaagcggtacaaggacttctatataggccttcaatctcaaggtggtggaaccgagtcggcagcggaactggagaaggttcgcagcgagttggaggaagtcaataatcaactacgggcgcttaaagatgagcacgaaaagattaccaaagaatgtgatgaggtcaaaaagcgcacagagccagaaacggataccagtgccatacgacaggaatacaaggccaagttggacaaacttgtagtagaccttacagtggctcgtactgatttggtcaatcaagagacaacttttgctggcaccaaatcctcatacgacgagacaattgcccgtttagagaaggagctgcaggagaatatagccgccaataaggacatcaaccagcgactcacccgtgagaacgaatcgctgcacatgagaattaaccagcttacccgtcagctgggatctcagcagtcaaccaagccctcgaccagctcggttgccgagaagggcaatatctcggagagctctccgcgaactgctaacgtgaaaccaatgtctggttcggcaacggtgcaacaatcggccaccgtaactccctggcgtggaggggagactcctttggccagcatacgtcctatttcggtgcaaaacagccgcacggccgcgattctacctacgagccaacagccccctgcaggatccagtacgtccacctcctcgtcatcctcatcctcatccacttccacaacatccgccgctggcggcggcagctcggcggtagcccaaaccgctttggtgccaccacagcaacaggttcacaccactggaagtgccgccctggaatcgatggcgtcctcctcacccacttcctcacataccgattacatgccgtccactagctctgcatctgtggcagtcgctgctattccgccgatgggcgcctcatctgctgccgaaagttcccaggaggcggaaagtatccagcacccgcagcaaaacgattcgcagttgtttgtaggcggagcccaacagcaagttgtggcgctagtgtcgccgcgtgtggaagggtcatcttcatcatccagttccacgtctgtcccgactgccactgctcccagtatccaggatggcggaagtcagagccagcagcccagcacttctggcagcagcagcagctcctccacagtggtgagtagccacagcagacacaccccgtccagcagcaatgtgacgaccacccaggctggatgctcctcacaaggcattaagcgtcctcgcgacattgagggtgactcctccaccggcactgaggagggtgtcgccgaaaaaatgtcaaaaattactaagagacttcgcggtcccatgcacagcggagagttatccgccggccacattggtgattccggaatggatgtcgatcaaatgccaacctcctcccagcgcgatcaggaggatgacattcaagtggttgactcagacgacgaggaggacgttctggccgatgccgacgatggtcccattgacggaggcgaggccgaacaggagggctacgaagactcgtacgagcaggacaatgagatggatgacaacgaaggtggtgacgatgacaatgatatagctgtggatgcccaggacaacaacgaggtggacatcgaagtgccggagcagcacatgcaggctcaggaagagagtcaatcgctggacaaccaggcaattgcaactgcatccgcttccactcaggagaacaaccagagtcaggccatcaccagtggcagtggagagtcatcgaacccggtgactctacctcaggctgaggcctccaactggaagcaggcagctgcctcaacgtccacagccgccgcccgacgcaacgaaagctctgtggagattgtaagttcacctcaagtctcgaatttttgtgagcaacctgcccgcttggagtccgctgaagtcgatggcaccgccgaggtggccggaggcgcgcctcatgaaagcgcaggccccagcgatacgggagctgcctcggccagttctccgcaaaaacagagcgaggcaggggagagcagcggaagcgacgcccttaaagctgctgacgatggtggtgatcatgctgacggaacagataacgccagagaagcagatgaggcattcgccgaggagacaatggctactggccaaggagaagactctcagccgctaggaaatgataatccaaatgtgggcactagccaatcggaggtgtcccacaaccaagccaatcttggcgagggaaaccccaccgaggacagcgagggagccgacggcgtctcctccgagggtgaaaagcaggcggtgggtgttgaggaggagggtcgggaggcggaggccacttcaccgtcggagaacacgcgatttcgcacgctgcgtagtgcggtgcccacccgacgaggacatcgcgccatgaggggtggcagtcccaacagccagaaccgtccgcagcggattgtctggcaacgggacacgtcgccgggaaacattcagcaaaaccagatgtcagccaataacaatcgctttgcgcaacggacccgcaaccgtcgtcccattcgtcgtccgcctccaaacaacttcaacaacggaggacgattcccctagggcgaggagttcggcggacccgcagacgaaagtccgctgtaggctgactataaaatcattgcgtttactgggctagaaataagtctcctcgcatttaaaagcgcttaggctaggatgagccacaaatacatattactctacattctccagcttgcgagtcctgagtttctgcagttgacaagatgcaaagagctttggttcttgtacattaactttgctatagagtttttaataaatatatgtgtaatttt

SEQ ID NO: 17349 - protein, 2346 aa, DROSOPHILA
MDLSGPQTLNNILQPDELKLVPEDVQKKLSEYINNFSDEYCKNRAAANRLAEAEQKKEELENKMEDYLVKFTSFELNVNELRTHLDQMSSERVNLMDTIAKGEQTISQLRKEKASVVEERDSMMKVIERQQAELERLKQDLHTYQQQLSSAIAAKCEAIARVDEIQSKEVALELKENRMESERDMLHKEILLISGDLNKSNAELQNIRREHTINTMQLQSCLKEKTESLKLMQEQYEQAVKTIGELTSKIEMQNDTAFKQNQATEEYVGKLKKELDAKEKLFEIFKSTESDHLIQREELLQGISEIKRLLEEAEEQCAQLTEQMETMKQKHSAELDEQNKKIQAMEQELASANDLLKQARESNLESAICQLAPSAAVASRLIRSDLSLTELYSMYAKSSEELEMRNCEIEQLKLQLKSIIAEISESAPILEKQNSDYQKMKETNSELLREHDELLQNKLCLERELERALSTLNHNQNENKKLKQTHTDLSRQVCMLLDELNCIRAGVKHVRIQPTRQLPTSESLISDNLVTFSSIEELVDRNTYLLNMSRELTELLEASEKNQDKMLLEQSKNHIRKLDARFAELEDLLTQKNNTVTTLLSKCDRYKKLYFAAQKKLGQNTVDLDDSNLEPNDSALDTSEQPAANFEESRKLEKRVRQLEQQLEGEVKKYASLKENYDYYTSEKRKNDALAQEQFDSMRKEVRELTSSNCKLMNTTEFQKEQIELLHKNIGTYKQQVTTLEERTKNYEKTIIKHEQTVHLLKDEMMAAHRKHAAADAEAQSLRQENRILRDTSSRLQIEKETYHREQQSQSLLLNSLEFIKTNLERSEMEGRQRLEQRLDDTVRELAAQRRHFQEEEEKFRESINEFKRQAETAIKLKDEEKQLADKWQAELTSVREELAEKVNKVNELSKKLQEVLTPTLNDNPITAANKRAREFELKLDQATVEIESLTKELAKTREHGEQFYKMSQSAESEIKRLHELHGELVAKQEEEIKKLRSSEAELKTRISDLEAEAMLSNVTEQSKTVNQSGQLKSAQDDLKSLLEKLTEANCTIRTLRSENTSLVESLNAAEVKYANGMIQHSADIQELTRYKAEFFKANDELNQLKSGRESLQAAYDELLRSNAEAQKLLDKEREESEKRVADLHALNSNLHDQIEALASKLAVLASQSQNPNSSLNESAMDGDQSLNASGLTAAEEGRNNEQLLKIIKFLRKEKDLFAAKLDILKAENARLISEHAIQQKKVDELNGYLNQERAKSQTDVVSANKHEEVLRKIETLNAITDSNRILREERNALTLRVAELTDRISSVEKELFPLQCSNKELTSKIEEINVENTSLRTEAIKWRQRANALVEKSNRNPEEFKRLQAEREHLAKLLTAEKELNKKQSDELTVLKQRMNTEIPMLNKQMQILDEARKKQVDEFTNLKQNNTRQTQDIMELKNRLLQKEEELLKANEELETKDKTIADKETKELQLRKLAKRYKDFYIGLQSQGGGTESAAELEKVRSELEEVNNQLRALKDEHEKITKECDEVKKRTEPETDTSAIRQEYKAKLDKLVVDLTVARTDLVNQETTFAGTKSSYDETIARLEKELQENIAANKDINQRLTRENESLHMRINQLTRQLGSQQSTKPSTSSVAEKGNISESSPRTANVKPMSGSATVQQSATVTPWRGGETPLASIRPISVQNSRTAAILPTSQQPPAGSSTSTSSSSSSSSTSTTSAAGGGSSAVAQTALVPPQQQVHTTGSAALESMASSSPTSSHTDYMPSTSSASVAVAAIPPMGASSAAESSQEAESIQHPQQNDSQLFVGGAQQQVVALVSPRVEGSSSSSSSTSVPTATAPSIQDGGSQSQQPSTSGSSSSSSTVVSSHSRHTPSSSNVTTTQAGCSSQGIKRPRDIEGDSSTGTEEGVAEKMSKITKRLRGPMHSGELSAGHIGDSGMDVDQMPTSSQRDQEDDIQVVDSDDEEDVLADADDGPIDGGEAEQEGYEDSYEQDNEMDDNEGGDDDNDIAVDAQDNNEVDIEVPEQHMQAQEESQSLDNQAIATASASTQENNQSQAITSGSGESSNPVTLPQAEASNWKQAAASTSTAAARRNESSVEIVSSPQVSNFCEQPARLESAEVDGTAEVAGGAPHESAGPSDTGAASASSPQKQSEAGESSGSDALKAADDGGDHADGTDNAREADEAFAEETMATGQGEDSQPLGNDNPNVGTSQSEVSHNQANLGEGNPTEDSEGADGVSSEGEKQAVGVEEEGREAEATSPSENTRFRTLRSAVPTRRGHRAMRGGSPNSQNRPQRIVWQRDTSPGNIQQNQMSANNNRFAQRTRNRRPIRRPPPNNFNNGGRFP

SEQ ID NO: 17350 - DNA, 3095 bp, DROSOPHILA
acctatgtacttaaaggcggatctgaaatcgctagatgtcaagacgctgggcgccaagtttgatgttattttgattgagccgccgctagaggaatatgccagggcagcaccttctgtagccactgtaggtggggcaccgcgggttttctggaactgggatgatatacttagtaagttcccagtcaagcatccattaatgtaacctaataactttgaattctgctagatttggatgtgggcgagatagctgctcatcgttcgtttgtattcctttggtgcggatcctcggagggcttggacatgggccgcaactgcctgaagaagtggggattccggaggtgcgaagacatatgttggatacggaccaacattaacaagcccgggcactccaagcaacttgaaccgaaagcggtctttcaacgcaccaaggaacactgcctgatgggaatcaaaggaactgttcgccgctccactgatggcgattttatccatgccaacgtggacattgatttaatcatctcagaggaagaggagtttggcagcttcgagaagcccatcgagatctttcacatcatcgaacatttctgcttgggtcgacggcgtttgcatctgttcggcagagattcgagtattcgaccaggttggctaactgttggtccggaactgacgaactcgaacttcaactccgagctataccagacctactttgctgaggctccagccaccggttgcactagtaggattgaactactgaggcccaagagtccgccgccgaatagcaaagttttaagaggaagaggacgcggctttccacgtggtcgtggaaggcccagataacagcatttttactcaacaactgcgtgtattctagtgtctaagatcaaaagtttttaaggctaagaataagattaacattaaagtctattgctgcagaatgctgagtatcctatcgatttccagggttttctttggatgccgagcgaccagcagctttcatttattatccgtgactattctggagactgtgatgattgcttagatgcctcatgtagatatccaagtcatcttcgctagatatagcattctcatccgcagcatgctcctccaattcctcctcgtcctcgctatcctcaaagtaggcatcttcttcatcctgctcaatttgcttcagatcatccagcaaagtgttatcatctacggccttataatcaaaatccttgtcttcgccactaagaaagcgttccttcatcatactcaagaactcattgcgtagtagttctcgctctccaggattatagaactccggtgtggagatcatagttgtattcattggagctcggacttccgcatttcgactcgttgaacaggccactggttcatcatcttcaaatccaccccactgctttcggcaagcgacaggaacgtcacagtctgcctgaggattggattcacttgtgacctgcacgctctgctttccttcctgctgcgtttcctctagtaattcatctctttgctttttctccaacgtatgcattagtattcctgagaagctagtattccgaacatcgtaactatcccgagccttcttttccgcctccgttaggtactgacccactagctcctggtagagatccggcgccctttgcatcatctcgtgttcgctaaagtattctcccttgtcaaggagctgctgcatggcatggtatcttcggtttttaatggataccgcacgagtgttgagtttcctcctaaaatcctctagcagcaggcacatctcctccagattttcatctgctttaatgggttccttgacagccagttcctggaaggaacccagttgtcttacattcaggaagcctccaaatcggatgagaaagttctcacggttcttatcgaaggcatctcgtgctatttgttgcttctcttcgaccggaatttccggatcatcaatttgctgcgacttaaagacgatttgattgttttcggccaaggatttgaagatgtctattatctccggaggatgttctggatttgggacgatgtcattgttgccctggtggtcaccatccccgtcagcatcgcttccagttgtcataattgtttacacaaattgcacaaagtgtgaaatagaaacgtaaacaaatgcttcttctttcttagccaatgtcatttacatagagttgccagagtaattaaatttttcgataaaaaattagcgattgtgaaaataaaccaagttctctgtctgaaaaaaaaattacgatctttgaaaatatgtattatgcataatacaatgaaaatatttccattcaaaaaaaaagacgaaaaggaaaccgttcaacgattttgatagttggcaaccctgcggctccacatagcggctgtattttcattacgaactttatctgaggtccaattgttgtgtttatcgctttgtttaacgccactcggtggttcagtggtgcaaatatgcaggcagcgatgactaactgagcaagtttagcggaagaccaaagaatccatcaaagatttcgatcgagatgtcatctgtggtggactggggcgactttgcctggaactggacgcagttctgtccgacgggattgaaaccgttcgccaacgagaccaacgatctgctgccttgctttcaggagatcctgctccagctgcccgtatacacgctcttcgccgccatatccgcctacaatttcggcaatcagtcacgacatgtcgtacgtaatggattgcaattgcgtatgctttcgattcgtaccttcctggccatggtactggccctgctaccggtggccaaggtgttcgccttccatcagcagggcgttgaactgtttgcggcggatctgctggttgtcagtgccgaatgcattatgtgggtggttcacagcggtgagtgtgcggttttcctttctccgggggtttacatctcgattcaatatcttaggtgcatatgcgggtttcccttttaggggctgcgattgtatatccgactttctttttatcaaatacaaatatgtaattagtccttatcagtttaatgcttaacacattttaacttggcacatttatttgctttttga

SEQ ID NO: 17351 - DNA, 1095 bp, DROSOPHILA
atgacaactggaagcgatgctgacggggatggtgaccaccagggcaacaatgacatcgtcccaaatccagaacatcctccggagataatagacatcttcaaatccttggccgaaaacaatcaaatcgtctttaagtcgcagcaaattgatgatccggaaattccggtcgaagagaagcaacaaatagcacgagatgccttcgataagaaccgtgagaactttctcatccgatttggaggcttcctgaatgtaagacaactgggttccttccaggaactggctgtcaaggaacccattaaagcagatgaaaatctggaggagatgtgcctgctgctagaggattttaggaggaaactcaacactcgtgcggtatccattaaaaaccgaagataccatgccatgcagcagctccttgacaagggagaatactttagcgaacacgagatgatgcaaagggcgccggatctctaccaggagctagtgggtcagtacctaacggaggcggaaaagaaggctcgggatagttacgatgttcggaatactagcttctcaggaatactaatgcatacgttggagaaaaagcaaagagatgaattactagaggaaacgcagcaggaaggaaagcagagcgtgcaggtcacaagtgaatccaatcctcaggcagactgtgacgttcctgtcgcttgccgaaagcagtggggtggatttgaagatgatgaaccagtggcctgttcaacgagtcgaaatgcggaagtccgagctccaatgaatacaactatgatctccacaccggagttctataatcctggagagcgagaactactacgcaatgagttcttgagtatgatgaaggaacgctttcttagtggcgaagacaaggattttgattataaggccgtagatgataacactttgctggatgatctgaagcaaattgagcaggatgaagaagatgcctactttgaggatagcgaggacgaggaggaattggaggagcatgctgcggatgagaatgctatatctagcgaagatgacttggatatctacatgaggcatctaagcaatcatcacagtctccagaatagtcacggataa

SEQ ID NO: 17352 - protein, 364 aa, DROSOPHILA
MTTGSDADGDGDHQGNNDIVPNPEHPPEIIDIFKSLAENNQIVFKSQQIDDPEIPVEEKQQIARDAFDKNRENFLIRFGGFLNVRQLGSFQELAVKEPIKADENLEEMCLLLEDFRRKLNTRAVSIKNRRYHAMQQLLDKGEYFSEHEMMQRAPDLYQELVGQYLTEAEKKARDSYDVRNTSFSGILMHTLEKKQRDELLEETQQEGKQSVQVTSESNPQADCDVPVACRKQWGGFEDDEPVACSTSRNAEVRAPMNTTMISTPEFYNPGERELLRNEFLSMMKERFLSGEDKDFDYKAVDDNTLLDDLKQIEQDEEDAYFEDSEDEEELEEHAADENAISSEDDLDIYMRHLSNHHSLQNSHG

SEQ ID NO: 17353 - DNA, 8037 bp, DROSOPHILA
caactagccgccgccgtccaagtgcatcaccagcagcagcagcaacaacaggcggccgttgccgtccaacagcaacaggcagcagcggcggcggcggttaagatgcaactaaccgccgccacgcccacgtttaccttcagcgccctgcccacagttacggctgcaacgacagtgcccgcggcggttccagtgcctgtggccactgcatcatcgggatctgcgaactcagtggcggtcaacacatcaacagcctcctccgtgagtatcaacaacaccagcctgggcggaggagggggtaatggagccactaatgcgtctgctaccgctgcggacagcttcgaagagcgaatgaactacttcaaaatccgcgaggctgaactgcgctgcaaggagcagcagctggccacagaagccaagcgcattgaactcaacaaggcgcaggatgaactcaagtacatgaaggaggtgcatcgacttcgagtcgaggagctgacaatgaagatacgcatcctgcaaaaagaggaggaacaactgcggaagtgctccacttcatgaggtctggaggacataagcgacgccgacggtgacgatgatgaggaggatgcggatgcctatttggatcgcttcaaccatgggggcttttaattcgttagttttaggtatacaactaccatcaacctatccctatcccaattccactttccacacacatttttttgtttaggttttttttctagttgtcgcggggcgggggacagcggtgcgactttagtccatcgctggccaggattaccgactaagccatcataaattgtaaatcgcaatcaatcaattatacagacacgcaattatactgtgggcgtggccagctaatccacgatgaaaacttaggcaagttaaaacgtgacttttttttatgaatttcaaccgaatcgaatcgaacactgattgacgaatatttccaactgattcgaatgcattcacaacttctgctgtttggttaagatttccactcacccttaaactttcgtctgccgctcttgtttttggagcctccagatgttgacgaggtgcccattccagtgttggattcatgaactggccacacgggaacttcgccaagtggttcgtcatcctcgccggtgatttccaggggattcacgcgcaatatgtttccctcgctcgtctgcagggtgtgggaaaagttgattagaactgcgtatcccatgagaacactactccaagcttacctctcccaaaatgttctttgcaaagcactgaaccacgccagcgtgacgcttttgaactcgcttcagctgcaggctccggttatccaccacagcctccggatctttggtggcatcctcaccgtttatgagccaataaatatcgggttggggattccccgaggcggagcaatccagcagcaaaggattgctctcattcgtcagagtggcggccggtcctcttaagatcgtgggccgctgcaaaacactcaacttgatggtgtgatcgatcggtggtgcaataccattgtccagcatgcagatataggaaccctgatcctcgggcttcacatcggtgatttgcaggccgtaggacaggatggtgcttctattattatagatctcaaccacattgggactactccaaatgactcggggtcgtggggatcccacgccaggacactcgagcaccactgtttctccgggacgagctgagtattcgatgggtggacgttgtagaaagtacggaggtgtcctatctgtgtagtccactcttagttcaatagtttgggggagcctaagttcatcgcctgttatggagttcgtggccacgcacgagtagttacccgcatctttggcggtgaccgtatccaaaaccaatgcccccgcagcgccaggcagcagctccgattgaggtagcttctttccgtttctgtagaagctccaaatagccggcggattcgatattacgctgccgcaacgaatgagcaggcagtttttgggcgccacgctccagcggatggagctcctggcccccatggatccctggccgacgtccaaagcaatcgagaccaaggccaagcgggctggcgtggaagccagtgcacccgggccataccaagccacacactggtagtccccagccgtttgggcactcacatagatgcgcagtctccaggcaagaccatcgcttccgctggtcacgttatagccagccgagggccttaggtatagatagggctccgaggaatcaccacgtctaaaccgccactccaggcgatcaggtttcagattcagctcgcactcgaagaccacctcatctcctttcggggccaccgctgattcgggagccctctcgaacaaaacgcccaaggtggttgccacggaggaattactgtcactggcttgaagtgtatagatacaggtggtcataaggaccagtagaaccacaactagcctgatttcagccattgcgaagcagatcctattctgaaatagacagacaagaagggttttgataggttagtcccgatacacatacatatgaattttcgatgaagtatccaactcagttagataaatcaattgctccattcccaatcccattctcatatccaatctagagatatctctaaccatttgacaggcgaggaatgcgacggagtgggtcttggaccctactgtaccattcaacctgctccttcctctgctgcttggtgctgcttgtgctggtgctgatgcttctgctactgccccaactgccacacaagggggcgtggcaacggaagcagtcgggccaggcaatgtgccatttaaactggagctccagctccgcgcacccaaggactcgtcgtcccggacccagattgttaatggcgtgtcattattatgagctgcaatgccctgccctgccctgccctgtccagtttctctgaacgggcagcaaagcacgaggaggacggatggggatccagaacgggttggtcgagcgtctggcctgcgacagtttgggggccctcgatttgaaatttaaacgatgccacaacacaaaagcgcgcgcggaattccaggaaaacggtcgccctgtcgttaggcatccacctcggtcctgcccccggctactcccccagctgccccctgcatccacgattctttacagataaaaaaaaaaaaaaactcaattgaatgtagcagtacttgattcggcattttacaggcatagagacggtagtctaaatcttctattcctaatctattttctttgatttggtggtatagcttgttggcctgacaaccaagacttggctgtgattcagctaaaggtgccgtcatcatcatgtcgtagggaaatccaagtcaaattccaagtcaaccacacaacatggaatttgttccctgtgtagcagtccctgcagggaaactcctgatgcgcataaatcgcaaagcggctcccatttgatagtcattattggtccgaaggcgcgtgcagctgccgatgttgctgttgcagatgttgctgctggtggtggccacttgttaacccaaggagcaaaccggactgcctacacacgagcaatccaacagcaacacggagtcgaaaaccagctcgccgccgctgatttaaaacatctgacaacaaaagtaaagcgcgaaattgacgcaggtttctgtgcctgccccttcagcaatccgcaaccacttgttgccgttgccgttgccgttcctgttgctcttgctgttgctgttgctgctcgctggttgcgtgtgttggaaattaatgcgcattcctgggccaagagcaacaaagcttaaaaaaccccacaacgactgaaaactgaagcaaaggaaatgaatggggagcgctgcaagaatccataaaaaagttgaaaaagagtcaacaaaccagcagaacgaagaattctgggacagatgcgctctgcactggcccgcacagaaagaaaaatgcatttcgtatggtgcccaatggtttccgtgcaacatatcaaaacgaaagtagaaaatatattatttgcccagtcggcatctatgtacatacatatctgtataatagccacctctgttaactgtcaaccattgtggccaaaattgcgatggcaatatgttgctagttcccaacatgacgtccattgttgctcgtctggcaacatgccgcttctgtgtattaccaactattacgaactgcaatcaaacattgattgcctccattgacaacatgcaatttgtgttggccacatagcggcaactagctgcaactagcaataaacaccttttagttggctcttaatgggcaacatgttgctgctgtgaaaattgcaagtcaaaacacatgtggctaacaattaagcgattgttccttctggtcacaaagaacactgtgttcggttcgagctgtgggattatgaaacggcatcaacatgttgctggttgctacttgcagcaggcaacagttgctagacgattgttgccgcaagcaaatgttgctgccgtgcattattattcaccatccagccaaatatggccaatgatcttggatcgctgctgtttatggttgttgctgcttttgctgttgttgcagctgttggcagcacaattaattggttgtttgttttcgggccagaagttaatttgattagccgcggacaacgacagcctccttttgttgactcatccggcgatctattcacggacatcataaggcgcgactaagaagggttataaatcaaggcgggatgccaaattaaaaggcattaattaatggcaaataaatatgttgatcgacgtctttttcgtcttcatcatgagagcaaccaacggcggtacactgtgcaaaagcaactatgcgatcccttgccaatatgatctatcactcgtaggttatcactcgtagaaaggccacgtttttccccttcactaatggcccaaagcattttgctatacctaaattaaatgacaagcactttagacagtgcatgtgtttatattaatctaaagatgatcttcttctgaattagcaatgttgattaagtcgttcgcctccttgcctagttttgtgatatatatgggaagattatgaaattccatcgggcctatttttcaatgtgtactatcttagtgactgtctgtttgtttgcctgccagaaattagcataaaactgttagaaaacccattcagcgatggcctgggcgtggcgcccggggtttgagacaattgaattgagtagcggaagagtggagggtcttcacatctggggagggtctcatgtctcatgtctcaggtcttggttctcagatctcagatctcaggcctaagaccgtgtttaagttcattaaataagtgcgaggcgtaacgaaggaacatccacgatggtggtttaatttatccatatgagtgctgttgtcataagagagatacccctttctcgagtcccattcccctgataccctgctgcacttggccattagccgcggcagttaacagcttgtaaaacactaacacctgctacaagttgtcgttgttttgtagttgctgctacaccgggttcaataaaacctgagagccagttcatcatcatcattgcgatcatcagaaacagttgctggcagaaaaggagcaatagaaaaatcacgaactacaaaacccccaatcacagtggcagatgattaaggcaaacacatcatgggttattaaattccgcaagagaaaattatggtctacttattggaacagtagtttttgcagtgtcactcttaaaagtcatcttcacgacggtgagcttaacaaataattaacgttgaattatcttgggtgaattttaaactccactttgctgaagaaaagccgatcatattattattaaggcttattaaaatcaaatgtcatgacattaattcaatttgaagcctggccattatgtgactgtaattttctccagaactctgttcactgtggccggtctccactgtacgctcgcacacacacacacacacacaggcggaagatatcggcgaaaattctttagcaatggaacctgttttgccagccggagaagaagcagcagctgaaatctttttttttaagcgcgaccggaaccggagcccaaaaacaagatgccaagccacacactcacacacaccagtatccatcaatacccatacacacgcatgcggagagcccaaagaggggcttctaagccaagctcatatgtgaagatgtggcgcccaacgtggggccttaaagtcgcgaccaaatgggcggaccgaggattgtaacgttttaaattggattttctttcagtgcacagcctttttccagggcacgttaagcgccagggcggtggcgtagaaggtgaagaaactcgcatgtaaacgagttcgaaatctgcattccaccgacagccaacaggattttctactgcggctaaaacgaggatgatcaccatcatgatcgtcttcgaggtcataatgatcccgatgaagaagctggatgggtttgccccacctgttgctgttgcaattctgtcttgaaacgaaaaggaatggtgtggtatagaatggaatgagttgagatgggatgggatgagatgggatggaatggcatgagatcgtataggatgccataggatgggagacacatccccacaaccccttttcatctgatgggtccaatatatttttcagaaggtgcgtgggcaccaaaaacgaattgtatgggctatgagccagagccgaaagtcagtctgaagttcagtactggagtgagggttttgggttatatgggtgcggaatcgaagctgcacgcccaccaactaaagtttcgaggatcgagagaaaatggggatgcgatcatattttgtattcttctctctaattgcgtgggcgccgcgttcaggattaagattagcagttagttaccttttgtaccctttgtcacttgcttatccctccgtctctttttcctgctgtcttgctgtctctttccaggcgtatctgctgctttagaactgcattctgcaaaaaaaaaagaaagagaaaaaggtagaatcaaaacacacataaatattgaaaatagacgacacttttaatgaatttcaaaataattgaggcctaaagtggcacaaaaatgcttagcgacagccaaataaatgcgaagcctataaataaccaaaaaactgggagagtgaatgggtaaaaaaaaaaatagctgacacgtgcgtgtgaagaacactagaagttgttggggttgctcagcaactttggaatacatatacttttaaaatcatatgaactcaaaaatgcaactgaagtaaagttaggaaaaccgacaataaagattgcagataccaatatttaaaactaacacatacatactaattttatagatttatagaaacaagaaatgacttgaatgtcttaaaaaactttgaaatcgcaatccattagacttattcccgctgctgaatacccatcgtacctgggggctaagaagaaaactccccttcgttatttgcctgtccatttaaaaagacataaaactaagactacgactgagaaacgaaaattcccaaacgaacaaatgtcataaatattccgggaatacaaatttccaagcgagtggctaaaaattatgccaaaaagaacataaataataacgaaagcggcgcaagaggaggtgaagtctttcgattttcatccaatactcttaataaatttatgcgattctctcacttttctctggaacttcgcccacccacccacacacacagttgttgggccataatttttctagaatttttgaaaagtcgccaagtcgaacagggccccaagaacaacaaaaaatacaaaaaagttaacaacgtacaaaaaatgtgaaagagaacaataaaaataaaacgagcgccaccccaaaagcgttgctgttgcatgtattgctgtattgctatatcggtgtgtgacagttgtcatttttcataaatattttccaatttccccaaagccaagtgagaaattaacg

SEQ ID NO: 17354 - DNA, 1530 bp, DROSOPHILA
cagaatgcagttctaaagcagcagatacgcctggaaagagacagcaagacagcaggaaaaagagacggagggataagcaagtgacaaagggtacaaaagaataggatctgcttcgcaatggctgaaatcaggctagttgtggttctactggtccttatgaccacctgtatctatacacttcaagccagtgacagtaattcctccgtggcaaccaccttgggcgttttgttcgagagggctcccgaatcagcggtggccccgaaaggagatgaggtggtcttcgagtgcgagctgaatctgaaacctgatcgcctggagtggcggtttagacgtggtgattcctcggagccctatctatacctaaggccctcggctggctataacgtgaccagcggaagcgatggtcttgcctggagactgcgcatctatgtgagtgcccaaacggctggggactaccagtgtgtggcttggtatggcccgggtgcactggcttccacgccagcccgcttggccttggtctcgattgctttggacgtcggccagggatccatgggggccaggagctccatccgctggagcgtggcgcccaaaaactgcctgctcattcgttgcggcagcgtaatatcgaatccgccggctatttggagcttctacagaaacggaaagaagctacctcaatcggagctgctgcctggcgctgcgggggcattggttttggatacggtcaccgccaaagatgcgggtaactactcgtgcgtggccacgaactccataacaggcgatgaacttaggctcccccaaactattgaactaagagtggactacacagataggacacctccgtactttctacaacgtccacccatcgaatactcagctcgtcccggagaaacagtggtgctcgagtgtcctggcgtgggatccccacgaccccgagtcatttggagtagtcccaatgtggttgagatctataataatagaagcaccatcctgtcctacggcctgcaaatcaccgatgtgaagcccgaggatcagggttcctatatctgcatgctggacaatggtattgcaccaccgatcgatcacaccatcaagttgagtgttttgcagcggcccacgatcttaagaggaccggccgccactctgacgaatgagagcaatcctttgctgctggattgctccgcctcggggaatccccaacccgatatttattggctcataaacggtgaggatgccaccaaagatccggaggctgtggtggataaccggagcctgcagctgaagcgagttcaaaagcgtcacgctggcgtggttcagtgctttgcaaagaacattttgggagagacgagcgagggaaacatattgcgcgtgaatcccctggaaatcaccggcgaggatgacgaaccacttggcgaagttcccgtgtggccagttcatgaatccaacactggaatgggcacctcgtcaacatctggaggctccaaaaacaagagcggcagacgaaagtttaagggtgagtggaaatcttaa

SEQ ID NO: 17355 - protein, 470 aa, DROSOPHILA
MAEIRLVVVLLVLMTTCIYTLQASDSNSSVATTLGVLFERAPESAVAPKGDEVVFECELNLKPDRLEWRFRRGDSSEPYLYLRPSAGYNVTSGSDGLAWRLRIYVSAQTAGDYQCVAWYGPGALASTPARLALVSIALDVGQGSMGARSSIRWSVAPKNCLLIRCGSVISNPPAIWSFYRNGKKLPQSELLPGAAGALVLDTVTAKDAGNYSCVATNSITGDELRLPQTIELRVDYTDRTPPYFLQRPPIEYSARPGETVVLECPGVGSPRPRVIWSSPNVVEIYNNRSTILSYGLQITDVKPEDQGSYICMLDNGIAPPIDHTIKLSVLQRPTILRGPAATLTNESNPLLLDCSASGNPQPDIYWLINGEDATKDPEAVVDNRSLQLKRVQKRHAGVVQCFAKNILGETSEGNILRVNPLEITGEDDEPLGEVPVWPVHESNTGMGTSSTSGGSKNKSGRRKFKGEWKS

SEQ ID NO: 17356 - DNA, 2698 bp, DROSOPHILA
aatgttatatggtttatatatctataatcgatctacatagctcgctgttttctgttatttgaaagcgtattgaaattctgttttgtaacattaagcttttcccattgttgctatttaaactattttatttttgcatcttaaattacaataccgttttattgttaaagaatcccgaaaatcaacaaaagccaaaaattaatatgcaggcatataaagagtgatttgatcaaaatcttaaagtaaagctaatttactctaaatataaccgctcttattccaataatatgtataatatatatcatatcatatttattcaaaacaaaccatcataaatgggttttttttatatttgtagttctgcatctggcattttagattacattcaagcttttcataatttccccgacttccctgaactgccactaaaattgttttatagttttgtcctttaaatcctgcagcatcttgcaatgctttcagttctccgaacactgtatgtatccctgttccttgtgcacaaactcactcccatattttaatttgttaattacttagttgccttgttggtagaggaagaggctgtacattcatatacggattaactgccatcctggctaagtaatcagcatatagttatatatgaagcgatacagccaggttagtaactaattaaaccctgaacttagttttgcgtactgttattttactggtcgaaaagtctgcagatggctaaaactcatgttaaaccgacgagtggatattaaacatttataaaaattaactgattaattttaataaaaaaaatataaaatgtatacatacatgcaatacatttttaagagtctttaagtaccgaaagatttcaaacatattttcctcgtgaaacagatcatcgcaactttttccttgacattttttctgcacaaagtaggttcggatatataagtatgtgtttcgtctcaaaaactttcaatattacacaaaccgctggcaggataggttcaatacaaattaataaaacaaaaatattaagttttgtcgatcatgcaacctcaagaggaagtgaaggccattttcaagctgattctaatcggagacgggggaactgggaaaaccacattggtcaagcgacatctgaccggcgagttcaagatgcaatacaatgcgaccttgggtgtggaggtcgagcaattactgtttaacaccaacagaggagttttccgcatcgatgtttgggacactgccggtcaggagaggtacggtggcctgcgcgatgggtacttcgtccaatcacaatgtgccataataatgttcgatgtggcctcgtcaaatacatataataatgtgaaaagatggcaccgcgacttggtgagagtatgcggcaacataccgattgtcatttgtggcaacaaggtggatatcatgcataaaaagacttggaaaaagggtgttgactttgatcgcaagacaaacatttacctcattgaaatgtccgcaaagtcgaactataacgtggagaagccattcgtctatctattgcgaaaattggtgggtgatcccagcctgcagttagtccagagccccgctatacagcccccaaaagttgtttttaccgacgagatgagccgtcaagtggaaagcttattcaatgaggccaaatccaaacctctgcccactatttacgatattgatctgtaaagatcaatatcatgatcatgattagtgttctttcaaaattttcatattctgcaagtgcaacgatgatctttgcttactttgtgcccatggatgaagacattcagctgaagtacttaataatttttaaatttctaaatttctaaattccgattgttttcgaagattctaattttttttttgtaatggacgtaaatttcaaaaattcaatggtgtaaaattgcaggctcggatttatatttctaaaagactaatgtatcccactatatctgttatttaaatatatagatagatgtaatagatactacatttaaatttaaataaacttttataatttaaacggcttcataagtttttgacccatatgttaaaaaatgcagaaaaatcgattcgatttcattaagttctgcgcattgttctgctgcaaattgaaggatcctggccaatttcgggggctccaaataaaccgctccttcagtggggattcattttaagcccggggagtccacgctcgcttcgtagccatctacattacccataccagtgcacataagcgcttaatgagtataaatgagcttgattgcatattccaaggcgctggcggacccatccttgtgcttctgtgtgtgcgagctgttttttaatagcctgcatatggcgttgtaaaagttttcattacacaaacagcagcagtggcagcaactacaatttaccggcaacaagagcagcaacaacagcaggcgcagcagcagtggcagcagcaacaacaacaacttattggcctgacttttaagcgcatttaacacacggcgtatgcgtaatgtgctgccagagcgagaaagcgggaggctggcagtcaaattgaatacagttgctcgtaaaatgcttaagcacctgcacacagcaacggcagcaacaattacagcaacagcacctgaaaagggggacagcacaaggacttcagcaaggacctcactgaaagtaaatatatttcgaaatattg

SEQ ID NO: 17357 - DNA, 698 bp, DROSOPHILA
ttcaatacaaattaataaaacaaaaatattaagttttgtcgatcatgcaacctcaagaggaagtgaaggccattttcaagctgattctaatcggagacgggggaactgggaaaaccacattggtcaagcgacatctgaccggcgagttcaagatgcaatacaatgcgaccttgggtgtggaggtcgagcaattactgtttaacaccaacagaggagttttccgcatcgatgtttgggacactgccggtcaggagaggtacggtggcctgcgcgatgggtacttcgtccaatcacaatgtgccataataatgttcgatgtggcctcgtcaaatacatataataatgtgaaaagatggcaccgcgacttggtgagagtatgcggcaacataccgattgtcatttgtggcaacaaggtggatatcatgcataaaaagacttggaaaaagggtgttgactttgatcgcaagacaaacatttacctcattgaaatgtccgcaaagtcgaactataacgtggagaagccattcgtctatctattgcgaaaattggtgggtgatcccagcctgcagttagtccagagccccgctatacagcccccaaaagttgtttttaccgacgagatgagccgtcaagtggaaagcttattcaatgaggccaaatccaaacctctgcccactatttacgatattgatctgtaa

SEQ ID NO: 17358 - protein, 217 aa, DROSOPHILA
MQPQEEVKAIFKLILIGDGGTGKTTLVKRHLTGEFKMQYNATLGVEVEQLLFNTNRGVFRIDVWDTAGQERYGGLRDGYFVQSQCAIIMFDVASSNTYNNVKRWHRDLVRVCGNIPIVICGNKVDIMHKKTWKKGVDFDRKTNIYLIEMSAKSNYNVEKPFVYLLRKLVGDPSLQLVQSPAIQPPKVVFTDEMSRQVESLFNEAKSKPLPTIYDIDL

SEQ ID NO: 17359 - DNA, 3410 bp, DROSOPHILA
cggcaacgaatttcgcaatagaatcggcggcgaagccgacgcgatggatatccatggtgtcagctccctttggcttgcccttggccgggaaatgcatgaacaccggggcggtgttcaggcgcagaagttggaaaacctcggagccgtcatcgaaatccaccatagcaaagaagagtttgttggagtaagtcgaggagaagcggtaggagttggccacgatggcgaactcgtcgtgggcgtgcctacagatctggcattgtctcgatggagccaatgcggtgagcattacgatcatcgagtaattccgtggtgcactcttcacatactcccgaaacttgggtccattgaagcggagcagcggctttttggcgttcatgtccaccaggttttgtactttttccgacagcgagagtcccgtctgaaaggcataagatacccattaataacatgctgcatattcctctagccggctttctgggatgtggagctagaatgtccaccgaaaagtgacgtggccacaaacaaaccttcgattttgattgcgcggctgcgtaaatagcgaataacgccactaccagcagaccgctgagcagcgtcttgtgcagcagtctcattctgcaggcgatttaattaacaatctcactactttaacgcaaaatcacagaaaaaacgtttaatcaaaaatattttttccggcgcatgcagctgattgtgaatggcaagcgaaaactatgcacgtttactgtgaatggcaacattggttggttttacctcaaggaagaaataaatatttatatcgatataaaaaagtaaacgaagttagatttttaaaatttgactttttataagtcagtaaaacaatatgcaaatcgttttagttgaattctttaaaatgtattttcatataaataagttatccccttaattagtttaataagtattatattgttgcgtgggtctagtgttatcgataccgcaataatcagaatgccgccactagacggcaaattttgttgtctttaatttttagttttcttaaaattgcgatttaaaatatagtacagtacgtttttactgcatatattagtatgagcgatgtgctaaagagctcccaggagcgatcccgcaagcgtcgtttgcttttagcgcaaactgtaagtattcacactgtggaaaaagcagtcggcgtcgagtttaactcataatttatgtatttcctaactcagttgggcttgtcgagcgtcgacgatctgaaaaaggctttgggtaatgccgaagacattaacagtagtcgccagctgaattccggtgggcaacgcgaggaggaggatggtggcgcctcttcctccaagaaaacccccaatgaaatcatctatagggactcctcgaccttcctgaagggaacccagtcttccaatccgcacaatgactactgccagcactttgtggacaccggtcagcgtccccagaacttcatccgtgatgtcggcctagctgaccgcttcgaggagtatcccaagttgagggaactgatcaaactgaaggacaaactcatccaagacaccgcatccgcacctatgtacttaaaggcggatctgaaatcgctagatgtcaagacgctgggcgccaagtttgatgttattttgattgagccgccgctagaggaatatgccagggcagcaccttctgtagccactgtaggtggggcaccgcgggttttctggaactgggatgatatacttagtaagttcccagtcaagcatccattaatgtaacctaataactttgaattctgctagatttggatgtgggcgagatagctgctcatcgttcgtttgtattcctttggtgcggatcctcggagggcttggacatgggccgcaactgcctgaagaagtggggattccggaggtgcgaagacatatgttggatacggaccaacattaacaagcccgggcactccaagcaacttgaaccgaaagcggtctttcaacgcaccaaggaacactgcctgatgggaatcaaaggaactgttcgccgctccactgatggcgattttatccatgccaacgtggacattgatttaatcatctcagaggaagaggagtttggcagcttcgagaagcccatcgagatctttcacatcatcgaacatttctgcttgggtcgacggcgtttgcatctgttcggcagagattcgagtattcgaccaggttggctaactgttggtccggaactgacgaactcgaacttcaactccgagctataccagacctactttgctgaggctccagccaccggttgcactagtaggattgaactactgaggcccaagagtccgccgccgaatagcaaagttttaagaggaagaggacgcggctttccacgtggtcgtggaaggcccagataacagcatttttactcaacaactgcgtgtattctagtgtctaagatcaaaagtttttaaggctaagaataagattaacattaaagtctattgctgcagaatgctgagtatcctatcgatttccagggttttctttggatgccgagcgaccagcagctttcatttattatccgtgactattctggagactgtgatgattgcttagatgcctcatgtagatatccaagtcatcttcgctagatatagcattctcatccgcagcatgctcctccaattcctcctcgtcctcgctatcctcaaagtaggcatcttcttcatcctgctcaatttgcttcagatcatccagcaaagtgttatcatctacggccttataatcaaaatccttgtcttcgccactaagaaagcgttccttcatcatactcaagaactcattgcgtagtagttctcgctctccaggattatagaactccggtgtggagatcatagttgtattcattggagctcggacttccgcatttcgactcgttgaacaggccactggttcatcatcttcaaatccaccccactgctttcggcaagcgacaggaacgtcacagtctgcctgaggattggattcacttgtgacctgcacgctctgctttccttcctgctgcgtttcctctagtaattcatctctttgctttttctccaacgtatgcattagtattcctgagaagctagtattccgaacatcgtaactatcccgagccttcttttccgcctccgttaggtactgacccactagctcctggtagagatccggcgccctttgcatcatctcgtgttcgctaaagtattctcccttgtcaaggagctgctgcatggcatggtatcttcggtttttaatggataccgcacgagtgttgagtttcctcctaaaatcctctagcagcaggcacatctcctccagattttcatctgctttaatgggttccttgacagccagttcctggaaggaacccag

SEQ ID NO: 17360 - DNA, 1282 bp, DROSOPHILA
acggcaaattttgttgtctttaatttttagttttcttaaaattgcgatttaaaatatagtacagtacgtttttactgcatatattagtatgagcgatgtgctaaagagctcccaggagcgatcccgcaagcgtcgtttgcttttagcgcaaactttgggcttgtcgagcgtcgacgatctgaaaaaggctttgggtaatgccgaagacattaacagtagtcgccagctgaattccggtgggcaacgcgaggaggaggatggtggcgcctcttcctccaagaaaacccccaatgaaatcatctatagggactcctcgaccttcctgaagggaacccagtcttccaatccgcacaatgactactgccagcactttgtggacaccggtcagcgtccccagaacttcatccgtgatgtcggcctagctgaccgcttcgaggagtatcccaagttgagggaactgatcaaactgaaggacaaactcatccaagacaccgcatccgcacctatgtacttaaaggcggatctgaaatcgctagatgtcaagacgctgggcgccaagtttgatgttattttgattgagccgccgctagaggaatatgccagggcagcaccttctgtagccactgtaggtggggcaccgcgggttttctggaactgggatgatatacttaatttggatgtgggcgagatagctgctcatcgttcgtttgtattcctttggtgcggatcctcggagggcttggacatgggccgcaactgcctgaagaagtggggattccggaggtgcgaagacatatgttggatacggaccaacattaacaagcccgggcactccaagcaacttgaaccgaaagcggtctttcaacgcaccaaggaacactgcctgatgggaatcaaaggaactgttcgccgctccactgatggcgattttatccatgccaacgtggacattgatttaatcatctcagaggaagaggagtttggcagcttcgagaagcccatcgagatctttcacatcatcgaacatttctgcttgggtcgacggcgtttgcatctgttcggcagagattcgagtattcgaccaggttggctaactgttggtccggaactgacgaactcgaacttcaactccgagctataccagacctactttgctgaggctccagccaccggttgcactagtaggattgaactactgaggcccaagagtccgccgccgaatagcaaagttttaagaggaagaggacgcggctttccacgtggtcgtggaaggcccagataa

SEQ ID NO: 17361 - protein, 397 aa, DROSOPHILA
MSDVLKSSQERSRKRRLLLAQTLGLSSVDDLKKALGNAEDINSSRQLNSGGQREEEDGGASSSKKTPNEIIYRDSSTFLKGTQSSNPHNDYCQHFVDTGQRPQNFIRDVGLADRFEEYPKLRELIKLKDKLIQDTASAPMYLKADLKSLDVKTLGAKFDVILIEPPLEEYARAAPSVATVGGAPRVFWNWDDILNLDVGEIAAHRSFVFLWCGSSEGLDMGRNCLKKWGFRRCEDICWIRTNINKPGHSKQLEPKAVFQRTKEHCLMGIKGTVRRSTDGDFIHANVDIDLIISEEEEFGSFEKPIEIFHIIEHFCLGRRRLHLFGRDSSIRPGWLTVGPELTNSNFNSELYQTYFAEAPATGCTSRIELLRPKSPPPNSKVLRGRGRGFPRGRGRPR

SEQ ID NO: 17362 - DNA, 3941 bp, DROSOPHILA
cgcactgcttgccctctatttacttatggtgcgctatgcgcccaaatggacagccaggtgagatcgagtccaagcatttgcacatccattacaaaccaccagcgctggccactcggtatttcagatgcaagccgctgcagttgagagtgcccttgttttgtcacagcttggcaatgatatttctcaatggttatatttgcctggagttcctgacggcttcactaagtcttggctacaacttcgcatgtcaggagtgtcgggtgagccatgatccacatgaaatccgggtgagttggcgaagcaactgggaattgagaagttaagaattcgaaatctgatgcagatagcggcagctatgtggtggttttacatctcaaagatactggaattcgtagacacggcattcttcatcttgcgccacaaatggaaccagctgagcttcctacatgtgtaccaccatagcaccatgttcttgttttgctggacttatgtcaaatggctgccgacgggttcaagtgagtttatataccttaaaaatattatatttctagtagtaatatctcgtattccatgcagccttttttccaagcatgataaactcttttgtgcacgtgattatgtacagctattatgcattgagtgtgctgggtcctcgagtccagaggttcctctggtggaagcgctacttaactggcctccagctggtccagtttaccattatcttcttttgggcatcacaattagttttccggggctgtgagtacggaaaatggttaacgccaatcggagctgcctatatggtgccatttctctttatgttcggtaggttctatgctcaaaaatactgtgtttcggcagttgtaaagaaagccaagtaaatatagcaatcgaatttgttagtagtattatagaaggggtttcaattggttgactaatttaattagttatttggggacacagaataaaaagaacgtacaatttctatgaaaatacaatttgtttatagcttcaatgtgacactttctgtggttatagcattgtatataaaagtattatcgattggcttgtattgcttcgtaatgatcttgatcacctcctgggcagcgcagccacctgaaaggaattagcagaatatagtatcggtcaacgcataaaccaaatggaatatttaccaataaaagcagacactgcatgcaactcagctccgccatatcgacaaatctcgtgcagaacatcatcgctgatggtggcgtgcattcccaaatcgctaagcatcttggcggcaatgctcttcagacgtccaatgtcctgctcaacgatgcactcgccgggaatgttgccacactcgctgaggaagcgctcgtaggcgcgcagcgcaaagttgtatgccgtgaggttgccctgcagctcgttgtcctcaactggaaggcaaggaaaggtaagtcatttaaggttgttccaaaatagatagatagatctttacccagtggtagcaggcgactgctcttctcgtactcctctgcaatgcgtgtaccccttatgaccgccagtccggctgcttctttgcaaatgagacgcacacttctctcatcaatgctgtcggcaggcaaagccaactgcttaaggtactcctggcacttgtgatacacctggtcggcgtcttgcagcgcctgttggcggtagatgtgctgcagggcgatataggagtccgtattggcagtcatgtccggcagaacgccaggcagagggagatggccctcattctcatgtatcacaaagtgctttagggccttggccatgatccaaaagacgttgctctgtaaaaaaaaaagaaaaacaaatgaaagtaaagtatacgtataaattcagattatatgggcaaccttcttgtttaactgttcgcaggcatcatcttcgaatatggctttcaggcttttgggaacctgtcccgctccaaaggctgtattgaccgccttgatggcctcttcatagttttcctcatccgccttcatctcctctctaatggtctccttcaactgattcttctctttgtaatttcgaggcgtttgagtcccatccgcttgttgtttttgccacacattaaggtatttgtgaagaaccagcaaccagggcaccttactggtcacctcggtgccgtcgagatgctcccgcaaagcatcgaatggatgctccagacgcagatcaaactgtcgattatccggatgcgcctccacgatgcagtgttcccgtatttgcaagcgtattgtgcccagcatgccaagcgatcggcagtagattaatggaacgttaagctcccataaccgttcggccaggagaagcaaagtctgctcattgagattggaggcaatcactaaatcgaagctgtcgaagaagttcggtctgttggctaataaaaagtcggcactctcgtcgacataatcgccatttacgtcgggattgagttcctggagaagttgcatgcaagccaatgctttagatttgcccagatagctggaatcgaggaagaaactacggaaaaagtgactttataatggtggtcagggaatgtgtgatggtctaccgacttgttgcccagatcctcctccttgacggtgctgccatcggccacagtgaagcctccgataccgggtagcaccagtcccttggcagtttcacagccgacggccgtaacattcaccaaacatactgtggctgcctccaatagcgtctgtccatgctctccccacagcctaaataggtgtcatcagtgctatgcttccgaatttatcaattaaaacgctcctcacctgatttgtctgtcgtatttcttgcttttatccgaaagctctggcgatttgggggctggcgaggacatttcactagatttttgtgcaataataagccggttgcaaataatccagtactgtaaagcgccggcagccaatacttctgacacaatttgtttattgggtggagtgttggaaaaaacacgttggtaattttaactgttgcttatttaaaacatttattgactattacgtattacatttcatttaattttattgcattaaactacatctacgtacaagcaatcagtctttacaaataaaatgtataaacagttgagaaattaaaaagtgaaagtctgagcaaaccaaataaagtgtctggttgacagtttttgaatagcattccatggctatggttttgggtgagttttaatattgattttcaacatgcaattaatttaattaaataataccgctaactgtttgttggctgggcagtgtaggcagcgcattttgcaacactgggagggctaatgaacagctgttttatcgtgtaatttcacaacaaaacaacgcatacatcgctgtgttttcttctgcatttccgtccgattgcgatccaatttgaactaaataaatatcagtattatcacggagataatgccggccaaaaagagaactgccgcgtcgaccagcaaaaatagcgattcgccattaagtccgcacacagacgatccagcgtacaaagaaaaaagaaagaaaaacaatgaggtaagtttaagagttttggatgtaaacagagagcaaagattgggaaacatgttgctgtggcgccgtggcccccagaagtccccaaaaatagatgcccactattgatttattactattctcggaacaggctgttcagcgcacacgcgaaaagaccaagaaatcggccgaggaacgtaagaaacgcatcgatgatttgaggaagcaaaacgatgctcttaaggttcagatcgagacgagtgaaaaacatatatctacgcttagagatctgatcattcagggtgagaaaacggaggacggccatcgaatcatccaggagattctcgctgaaccagatcccgatcccaaggacaatgactaacgaggagcttctcctgatttacc

SEQ ID NO: 17363 - DNA, 1641 bp, DROSOPHILA
gctgccggcgctttacagtactggattatttgcaaccggcttattattgcacaaaaatctagtgaaatgtcctcgccagcccccaaatcgccagagctttcggataaaagcaagaaatacgacagacaaatcaggctgtggggagagcatggacagacgctattggaggcagccacagtatgtttggtgaatgttacggccgtcggctgtgaaactgccaagggactggtgctacccggtatcggaggcttcactgtggccgatggcagcaccgtcaaggaggaggatctgggcaacaatttcttcctcgattccagctatctgggcaaatctaaagcattggcttgcatgcaacttctccaggaactcaatcccgacgtaaatggcgattatgtcgacgagagtgccgactttttattagccaacagaccgaacttcttcgacagcttcgatttagtgattgcctccaatctcaatgagcagactttgcttctcctggccgaacggttatgggagcttaacgttccattaatctactgccgatcgcttggcatgctgggcacaatacgcttgcaaatacgggaacactgcatcgtggaggcgcatccggataatcgacagtttgatctgcgtctggagcatccattcgatgctttgcgggagcatctcgacggcaccgaggtgaccagtaaggtgccctggttgctggttcttcacaaataccttaatgtgtggcaaaaacaacaagcggatgggactcaaacgcctcgaaattacaaagagaagaatcagttgaaggagaccattagagaggagatgaaggcggatgaggaaaactatgaagaggccatcaaggcggtcaatacagcctttggagcgggacaggttcccaaaagcctgaaagccatattcgaagatgatgcctgcgaacagttaaacaagaagagcaacgtcttttggatcatggccaaggccctaaagcactttgtgatacatgagaatgagggccatctccctctgcctggcgttctgccggacatgactgccaatacggactcctatatcgccctgcagcacatctaccgccaacaggcgctgcaagacgccgaccaggtgtatcacaagtgccaggagtaccttaagcagttggctttgcctgccgacagcattgatgagagaagtgtgcgtctcatttgcaaagaagcagccggactggcggtcataaggggtacacgcattgcagaggagtacgagaagagcagtcgcctgctaccactggttgaggacaacgagctgcagggcaacctcacggcatacaactttgcgctgcgcgcctacgagcgcttcctcagcgagtgtggcaacattcccggcgagtgcatcgttgagcaggacattggacgtctgaagagcattgccgccaagatgcttagcgatttgggaatgcacgccaccatcagcgatgatgttctgcacgagatttgtcgatatggcggagctgagttgcatgcagtgtctgcttttattggtggctgcgctgcccaggaggtgatcaagatcattacgaagcaatacaagccaatcgataatacttttatatacaatgctataaccacagaaagtgtcacattgaagctataa

SEQ ID NO: 17364 - protein, 524 aa, DROSOPHILA
MSSPAPKSPELSDKSKKYDRQIRLWGEHGQTLLEAATVCLVNVTAVGCETAKGLVLPGIGGFTVADGSTVKEEDLGNNFFLDSSYLGKSKALACMQLLQELNPDVNGDYVDESADFLLANRPNFFDSFDLVIASNLNEQTLLLLAERLWELNVPLIYCRSLGMLGTIRLQIREHCIVEAHPDNRQFDLRLEHPFDALREHLDGTEVTSKVPWLLVLHKYLNVWQKQQADGTQTPRNYKEKNQLKETIREEMKADEENYEEAIKAVNTAFGAGQVPKSLKAIFEDDACEQLNKKSNVFWIMAKALKHFVIHENEGHLPLPGVLPDMTANTDSYIALQHIYRQQALQDADQVYHKCQEYLKQLALPADSIDERSVRLICKEAAGLAVIRGTRIAEEYEKSSRLLPLVEDNELQGNLTAYNFALRAYERFLSECGNIPGECIVEQDIGRLKSIAAKMLSDLGMHATISDDVLHEICRYGGAELHAVSAFIGGCAAQEVIKIITKQYKPIDNTFIYNAITTESVTLKL

SEQ ID NO: 17365 - DNA, 3479 bp, DROSOPHILA
cgaaaatgggatccttgaggtcctcgaaaatctacttgaccggtacaaaatcaacctgctgcaaatgatgttcggcaccttcatcgccacgatcgtgttctttggcggactgatgactttcgtggagaagtacctgcccaatagcatacgccagtcctttcggtatggcaagcacagtttcaagggtgaaacggatcctttggtggcctggctggaggttccgaagtcctggttcaagcacttctacacatttgccctgttctggagctggctggcattttatgtgctcgtttcaaccgttcgggagcaaaaggaggcgcccgaatatgtactccaattcctggacatcatgggcggcggacgtagtcaccggaaggtggagatcgactcaacgactgcctgtgtgggcgcatttatgctcacgttgcagtgcacccggcgtttttacgagaccaattttgtgcaaatcttctccaagaagagcaaaatcaatctgtcgcactatgccgtgggctatgtgcactactttggagccgttatagctttactatccaatacctccggctttgtgcgcggctccaagcccatggagttcagcctcgacaagctgacaagccagcaaatactctacctcggcgtcttctttctcgcctggcagcagcagtatgccagtaacatgatattagttaacctgcggaaggatccgcggacgggaagtgtcaaaacggaaaagcaccttctgcccaagggtgggcttttcaatctgctttcgtcgccgcacatgttcctcgaggtggtcatgtacttctgcatcgccgatctctacatgccagttaggatttggcgattgatcttcctctgggtggccagcaatcaaacgatcaatgctctgctaacccacaagtggtaccaggaaacattcagggaatatccaaagaaccgacgtgctatcattccgttcctgctctgagtccgaagactggaaacatttcgcatttttgtacaaataatttagtagtggaatttattaaagtcgttttacacgcacgaaaaatgtgtgctcgctggtgattttaactacaaaaacgatatagggtgaacttgaactggaacaggactgcagtcgattctatttgaacaagaaactgtggggaaaagagaagccaacttaaatatgtgataaattgcttgcaggatagtaatgactgacctatagggataaccctgcgccttcgaacgaaaaacggacaacaggaaggagaagaacacggtgaggagcaccaaaccagtcatcgccattatcctgttcttgttgtgagcctttggtgttcccgattcaatcagcagaatcatgcccagcacaatcatggcatctgtaatcaaagttattagttaaatagtccaaaaatggtcaacagaactagagtgaagactaaagactcaggacttactcaggaacatgacgatataggtctccaccaccagctggccctgcgaggagccatggatgtaggccacgccaccattttgcgacttgtggaccagcggtggtccacggatatgattccacatttgacccgagatcatggcgaagcagaagaatactgcgatggcaccccacagattcttgttgtacaagaactccaagttatttcgccgaatgtaaagaaaacttcccaccagggccaccaatgtgatcatggccacggtgccagaatagtttggtggacggaaaatgcgaatggtgatgtccgttcgctcggcaacgaatttcgcaatagaatcggcggcgaagccgacgcgatggatatccatggtgtcagctccctttggcttgcccttggccgggaaatgcatgaacaccggggcggtgttcaggcgcagaagttggaaaacctcggagccgtcatcgaaatccaccatagcaaagaagagtttgttggagtaagtcgaggagaagcggtaggagttggccacgatggcgaactcgtcgtgggcgtgcctacagatctggcattgtctcgatggagccaatgcggtgagcattacgatcatcgagtaattccgtggtgcactcttcacatactcccgaaacttgggtccattgaagcggagcagcggctttttggcgttcatgtccaccaggttttgtactttttccgacagcgagagtcccgtctgaaaggcataagatacccattaataacatgctgcatattcctctagccggctttctgggatgtggagctagaatgtccaccgaaaagtgacgtggccacaaacaaaccttcgattttgattgcgcggctgcgtaaatagcgaataacgccactaccagcagaccgctgagcagcgtcttgtgcagcagtctcattctgcaggcgatttaattaacaatctcactactttaacgcaaaatcacagaaaaaacgtttaatcaaaaatattttttccggcgcatgcagctgattgtgaatggcaagcgaaaactatgcacgtttactgtgaatggcaacattggttggttttacctcaaggaagaaataaatatttatatcgatataaaaaagtaaacgaagttagatttttaaaatttgactttttataagtcagtaaaacaatatgcaaatcgttttagttgaattctttaaaatgtattttcatataaataagttatccccttaattagtttaataagtattatattgttgcgtgggtctagtgttatcgataccgcaataatcagaatgccgccactagacggcaaattttgttgtctttaatttttagttttcttaaaattgcgatttaaaatatagtacagtacgtttttactgcatatattagtatgagcgatgtgctaaagagctcccaggagcgatcccgcaagcgtcgtttgcttttagcgcaaactgtaagtattcacactgtggaaaaagcagtcggcgtcgagtttaactcataatttatgtatttcctaactcagttgggcttgtcgagcgtcgacgatctgaaaaaggctttgggtaatgccgaagacattaacagtagtcgccagctgaattccggtgggcaacgcgaggaggaggatggtggcgcctcttcctccaagaaaacccccaatgaaatcatctatagggactcctcgaccttcctgaagggaacccagtcttccaatccgcacaatgactactgccagcactttgtggacaccggtcagcgtccccagaacttcatccgtgatgtcggcctagctgaccgcttcgaggagtatcccaagttgagggaactgatcaaactgaaggacaaactcatccaagacaccgcatccgcacctatgtacttaaaggcggatctgaaatcgctagatgtcaagacgctgggcgccaagtttgatgttattttgattgagccgccgctagaggaatatgccagggcagcaccttctgtagccactgtaggtggggcaccgcgggttt

SEQ ID NO: 17366 - DNA, 1226 bp, DROSOPHILA
ccattcacaatcagctgcatgcgccggaaaaaatatttttgattaaacgttttttctgtgattttgcgttaaagtagtgagattgttaattaaatcgcctgcagaatgagactgctgcacaagacgctgctcagcggtctgctggtagtggcgttattcgctatttacgcagccgcgcaatcaaaatcgaagacgggactctcgctgtcggaaaaagtacaaaacctggtggacatgaacgccaaaaagccgctgctccgcttcaatggacccaagtttcgggagtatgtgaagagtgcaccacggaattactcgatgatcgtaatgctcaccgcattggctccatcgagacaatgccagatctgtaggcacgcccacgacgagttcgccatcgtggccaactcctaccgcttctcctcgacttactccaacaaactcttctttgctatggtggatttcgatgacggctccgaggttttccaacttctgcgcctgaacaccgccccggtgttcatgcatttcccggccaagggcaagccaaagggagctgacaccatggatatccatcgcgtcggcttcgccgccgattctattgcgaaattcgttgccgagcgaacggacatcaccattcgcattttccgtccaccaaactattctggcaccgtggccatgatcacattggtggccctggtgggaagttttctttacattcggcgaaataacttggagttcttgtacaacaagaatctgtggggtgccatcgcagtattcttctgcttcgccatgatctcgggtcaaatgtggaatcatatccgtggaccaccgctggtccacaagtcgcaaaatggtggcgtggcctacatccatggctcctcgcagggccagctggtggtggagacctatatcgtcatgttcctgaatgccatgattgtgctgggcatgattctgctgattgaatcgggaacaccaaaggctcacaacaagaacaggataatggcgatgactggtttggtgctcctcaccgtgttcttctccttcctgttgtccgtttttcgttcgaaggcgcagggttatccctatatttcttgttcaaatagaatcgactgcagtcctgttccagttcaagttcaccctatatcgtttttgtagttaaaatcaccagcgagcacacatttttcgtgcgtgtaaaacgactttaataaattccactactaaattatttgtac

SEQ ID NO: 17367 - protein, 347 aa, DROSOPHILA
MRLLHKTLLSGLLVVALFAIYAAAQSKSKTGLSLSEKVQNLVDMNAKKPLLRFNGPKFREYVKSAPRNYSMIVMLTALAPSRQCQICRHAHDEFAIVANSYRFSSTYSNKLFFAMVDFDDGSEVFQLLRLNTAPVFMHFPAKGKPKGADTMDIHRVGFAADSIAKFVAERTDITIRIFRPPNYSGTVAMITLVALVGSFLYIRRNNLEFLYNKNLWGAIAVFFCFAMISGQMWNHIRGPPLVHKSQNGGVAYIHGSSQGQLVVETYIVMFLNAMIVLGMILLIESGTPKAHNKNRIMAMTGLVLLTVFFSFLLSVFRSKAQGYPYISCSNRIDCSPVPVQVHPISFL

SEQ ID NO: 17368 - DNA, 3996 bp, DROSOPHILA
cacgcacatacataatatatgtatcttatttcaagcattaaacaatcgtatctcatagattgcagcatttctagtggttgatcaaccaatatatacatatctatatccttttccgaggcaagaaaaactttctttctttttgttccacactttttataatttctaatgtgcagcacccattttcatccttaccattttaatatgtatgtatggcttgcaattatttcgtttttcctctgataaattaagacgttctttgctttgagttgccctttgaaatactgccgattcacttgcacagaccacttaattgtttatcagattaatatcatttttccaggtttcttataaaatagtctcgaatttaagactggcgagtataattgtatttatccttaaaagttccattaattgagcgcatgctcagtgcaacattattttgtgtcaaaagctttcccgagctttaaacgcagagcagtgtcacaaggcaaacttcgtctttgcgcatttactgattctaaaagacaccactctaaatctgctttaaaaatgtaaaagttggttaaaaacttaaatctatcaaattgttactgatgctaaaatgtcgaagtaggaagtactcatagccgcgttagaaattatgaaacaagtggaaataataatgaaaatattttacaggtttgacgtacgtattttcgaatactcggatgtcgaaacaacttcgtagttattttatacgaaataagtgctcattcattaaaactagtctgattttttaactatcaattattttattgggttactaataaatcattgataacatttgcaatgaatattgtgaatggcgcatttatggttcattgttgtttaaattaatatctttatatcatgtactgaaaaaaactaaaaattttaattcgatattcttatcgataaatattacttttaaaatactttcccaaagcgcagatatcggcttttattgatgaagttgataccgaacggccatccctaattcgagataatgcagtattgtcaatttacgtgtaataataatgcatcgttgaagaacagccgataatgtttctgtttctgtttctgtaagaatagttacccttttcccgccagatatactgactcttgttgtccgcagtctctggttgttgttatcgcttgtgttggtggcagtactctctttccttttcctgaggcaatggttgcttggccggaagaataagttgcacacatcgtcggaaaatggcatcaacgtgggcatttttcacccgtattgcaacgcgggtggcggcggagaacgcgtcttgtggtgcgccgtgagagcactacaggtaatattggaaaaactgcaaaacctacattcacatgcattcatacgtgtcttgttgatcgatcaccagctgaaagaatagttatcattagaatgagttaattaccttcggctaaaaactagaagaaatgacatataataatgcatgggagtagttcctcaacagggtgctaacttttcattctgtttgcctttgggtatccatgtatgtaaattacatgtgaatactatagctagagagccaattattttgatctacttgttttgtattttctggccactttactaatcctttatatttgatattgtaattaaaaggaaaagtaccagaacgccaggatggtaatctacacaggcgacatagacgcttctcccaattccatactgcaaaaggccaagaatgtcttcaacattgccgtcgatagtgacaatgtgaagttcgtcttcctgaagcaacgccactggatcgaggccaagaactatcctcatttcactctgctgggccagagcattggatcgatggtcgtgggtctggaggcactctgcaggtttccgcccgacatctacatcgacaccatgggatacgcctttacgtatcctctgttccgctacttggcccagtccaaggtgggctgctatgttcactatccggttattagcaccgatatgctgaagagggttcagcagcgacagatgtcgcacaacaacaagaagtacgtggcgaggaacccctttctcacctggactaagcttgcctactaccgcctcttctcaagagtgagtgttcaaattcgaattagtcaatgcacagctgtataccaatttacccttttttcagatgtacaagtgggttggctgttgtgctgagactatcatggtgaactcctcgtggaccgagaatcatattctgcaactgtgggatgtgcccttcaaaacacaccgggtttaccctccgtgcgaggttagtcacctaaagagccttcagcacacggaaaaaggcgacgaattcatcatactgtctgtcggacagttccgcccggagaaagaccatcccctccagctgcaagccatatacgagctccgaactctcttggcccaagacgaggccctttggaaccaaattaagttggttattgtgggctcctgccgaaatgaagatgactacgagcggttgaaaaacatgcaggacctgacaaagcatctgtcgctagaaaacaatgtgcaatttagtgtgaatgtcccttacgaagaccttcttaagttgtatcaaactgcccacattggcattcacactatgtggaacgaacattttggcatcggcatcgtcgagtccatggctgctggccttataatggtggcccacaagtcagggggtcctttgcttgacattgtcgaaacttccgcgggaagtcagaacggattcctggctactgacgccgttgaatacgcagaaaacatattaaatattattgttaacaactcagaaatgaacggcattcgaaacgcagccaggtaactagataaacatttacagtttgcacactttaatatattttggttcgcttttagggcctccgtggaacggttttctgagcaagagtttgaaaaaaactttcttcgagctgtttcaacgctatttaccaacaattaaaaaataatagtacgcccgcacctaaataaatatgcaaagcccaaaaatctccaactgaatacatttattatactctacaacatatttagagcgattttatcgtacatatcgcatcgctttccttaagatttacctaatgcatttttaaagcataaggtgatttcggtttgatcgacttaacagaatcgggaataatctctgagattttgtaccaaattcgccatcgtgttgtaaaattttatttatttcctttggagttttaaatcatttttctgccaataaagttaagaaattgcctaataagatccttagtttctatgcatcataaaacaaaatcgtgtaactaatggctttaaactaactcactatgctagctttaagagaaaatcgcatagagcaacaggaatatctcatgacggctgtctttcttctgtcattcgccagccaggctagccaaaagctcctcatctatcccatccgccgatggtgtacccgccgtgctgctaagattgagcagtccttcattgccagactgcgaaggaggcaccggcggcttcgcttccggctccgtcagtccagtagagctggcaataggtcctaatatcgaagatgatgttcccgctaaagccggttctgaactgccacttggcgtgctgcgtccactggttgtattgcctccgcttcctctctgcgataactttgggatctggaatttgttgtggagccccttgatgaagccttccatgcttgcggccattgtcggagaagcgtattggaggatggtcatcatatccgtgtggtgatcgaatcgcggcggtggctgcgacattgagccgctaagggccggcgataccgaccccgaagatccgctgcctcctcccgaagcggagcctaactttcgctgcccgctgcctcctccactgctgccgctagccaaggctcccatgctgggacgccgcctgggggcattgtgctcttggaaggagttagtgctgttgct

SEQ ID NO: 17369 - DNA, 1508 bp, DROSOPHILA
aacggccatccctaattcgagataatgcagtattgtcaatttacgtgtaataataatgcatcgttgaagaacagccgataatgtttctgtttctgtttcttctctggttgttgttatcgcttgtgttggtggcagtactctctttccttttcctgaggcaatggttgcttggccggaagaataagttgcacacatcgtcggaaaatggcatcaacgtgggcatttttcacccgtattgcaacgcgggtggcggcggagaacgcgtcttgtggtgcgccgtgagagcactacaggaaaagtaccagaacgccaggatggtaatctacacaggcgacatagacgcttctcccaattccatactgcaaaaggccaagaatgtcttcaacattgccgtcgatagtgacaatgtgaagttcgtcttcctgaagcaacgccactggatcgaggccaagaactatcctcatttcactctgctgggccagagcattggatcgatggtcgtgggtctggaggcactctgcaggtttccgcccgacatctacatcgacaccatgggatacgcctttacgtatcctctgttccgctacttggcccagtccaaggtgggctgctatgttcactatccggttattagcaccgatatgctgaagagggttcagcagcgacagatgtcgcacaacaacaagaagtacgtggcgaggaacccctttctcacctggactaagcttgcctactaccgcctcttctcaagaatgtacaagtgggttggctgttgtgctgagactatcatggtgaactcctcgtggaccgagaatcatattctgcaactgtgggatgtgcccttcaaaacacaccgggtttaccctccgtgcgaggttagtcacctaaagagccttcagcacacggaaaaaggcgacgaattcatcatactgtctgtcggacagttccgcccggagaaagaccatcccctccagctgcaagccatatacgagctccgaactctcttggcccaagacgaggccctttggaaccaaattaagttggttattgtgggctcctgccgaaatgaagatgactacgagcggttgaaaaacatgcaggacctgacaaagcatctgtcgctagaaaacaatgtgcaatttagtgtgaatgtcccttacgaagaccttcttaagttgtatcaaactgcccacattggcattcacactatgtggaacgaacattttggcatcggcatcgtcgagtccatggctgctggccttataatggtggcccacaagtcagggggtcctttgcttgacattgtcgaaacttccgcgggaagtcagaacggattcctggctactgacgccgttgaatacgcagaaaacatattaaatattattgttaacaactcagaaatgaacggcattcgaaacgcagccagggcctccgtggaacggttttctgagcaagagtttgaaaaaaactttcttcgagctgtttcaacgctatttaccaacaattaa

SEQ ID NO: 17370 - protein, 475 aa, DROSOPHILA
MFLFLFLLWLLLSLVLVAVLSFLFLRQWLLGRKNKLHTSSENGINVGIFHPYCNAGGGGERVLWCAVRALQEKYQNARMVIYTGDIDASPNSILQKAKNVFNIAVDSDNVKFVFLKQRHWIEAKNYPHFTLLGQSIGSMVVGLEALCRFPPDIYIDTMGYAFTYPLFRYLAQSKVGCYVHYPVISTDMLKRVQQRQMSHNNKKYVARNPFLTWTKLAYYRLFSRMYKWVGCCAETIMVNSSWTENHILQLWDVPFKTHRVYPPCEVSHLKSLQHTEKGDEFIILSVGQFRPEKDHPLQLQAIYELRTLLAQDEALWNQIKLVIVGSCRNEDDYERLKNMQDLTKHLSLENNVQFSVNVPYEDLLKLYQTAHIGIHTMWNEHFGIGIVESMAAGLIMVAHKSGGPLLDIVETSAGSQNGFLATDAVEYAENILNIIVNNSEMNGIRNAARASVERFSEQEFEKNFLRAVSTLFTNN

SEQ ID NO: 17371 - DNA, 18413 bp, DROSOPHILA
cattcctcctgaaacgcaggtagctccgtgtactggatgccactcctgatgagcatggctgctcctccgcgcgctctgccagatggatggttggcagggatgacatcgtagccgctaatgctaaaatgggatctgggacaaaagtgggtttctgataccagtagtacatcgatggcatctgtttttaggaggtgttccacctcggctctgctcctctgcaggccgttagcattccaaataactatttttaggctttgcatacttttgcgttgaggatggaagcaacaagctgcgtcatttgcgagaacatcttctccatcatcctttcgaccattccttcgaagcgagcaaacatttgttccatgttactgggttgcggagattcaggtggggtttgacgggtttggttgggattggtttgctgaggcacttgggtagacatgagcgcatctctgtagtgacaaataaaatgttttgacaacgaagaatttaaagaggtttataacgagcattgctatattcataaaaattataatgaataaatggaattcatcaatataaactaacaaaaggtttgagcccgagataaaagaaaattagtatatatacagcatgtcaaaagcaattatacaaagtcaaatgtcagcatgtttcgaaaataattaacctttaacgtgtaataaataaaaaataaataaataaaaattgtattatgatcataggtcaaagtatgtaatagcttattttaacttcatttgtcaacaattgtggctattatatatactttaatttcaaattcaaccgcaaagtcttcagtgttggtgaatttggtgagcgtagagtaaagtttcagcttgttagccttttttaactgtagtagcctctggtcacactaatcgcgtctttatcaaattcggttatcaaatttgttttgcgcccgttcattcgtcttgcgctcattcattcggtcattcattcgccttttgaataccgcttcgaacggttgtgtctacatctttgcacaacgagttcgaaaaataactaagctccgcgcgaaaacagtaggaaattaaaactagaatatttctggtaaaaacatttatcattggatacaataattttaacacgaatcgtgagaagaggaagcaaacaattaatactaaaataaaatataaaaacgagatctacaacccgcgcgtttttcgattaatgaattaaaaataagtgtgcgtgctacaagtggaaataaaactcgatttctgggcccccgacttttggttgcaacacactttataacgggaagtggctcaacaagtggctcggggattatctaataaagccctcctaccgaaaatcatacttaaataatatagattattatacgggcagaaagcaacaaataaaatatacatatatcaattttaaaacaaccaaaggcccccatgtgtatgtgtgtagtgtgagcgcgtgcatatgtgtgtgaatcgagaaacgcagagcagcagcaacaataatagcaacaacactacaacggcaacgtcaacagcacgcaacaacaacagccacaacggacgctgtgagtgcgacggagacggcgacagcgtgagtcatatacaaagtgaaatgaaaatgcggataaagcgagaagcgccgtgtcttctgttatttatgccaatccaaaataccaacaacaacaatcgcattggtggtaagtacaaaaagaagcgaaaaaaagaatcaaatcaacagaaataagcaataagaaaaatcgtacaatttaagattacactcaaaccaatcaaaagagcgggacagggagaacgtattaatccctctctcttgctctcttgatttttaccgctcggcatgctgtttacttttgctggggcgcgaaagagagggggagcacacgtaagcgtctccatttcatttctacaaaagcaaaaacaagcaaaaagaaacgaactcgagagagatcagactcagagtcagttactttttttcgctccatacgtgactcacaattcgcgtgtctttcaaaaataaaagcaaaagaagcgtttcgattcgtttctgttggctggataaatgaaaaaaaaaatcagtcagtccaacaaaatacgagtacaaataaaaaaaataaaacaacagaaaaaatgtaaagcaaagcaggtttctcaagcggcctggcaacgctgaaaaacccgctttgaaacgacctttcgagtacgaattcatcggcacaacaacaacagaagaagggagaagcgtgcgaaggaggaggccaaaaggggagcagaaggagaaaaagcaacagccgcggcaacaactcaaaactgaagttgggagtcggtaagaaagagcggaagagcaggaagggttagttgcaagggccaggggcgaaactaaaaaggggtgccctcgttgagtcaaagttccaaaacatttacagaatagttgaaatttattaaatataatataagttgaagcattacaatcgctttataaatcacttaaaattaatatcatcttaaagtgaaagatttactaccttgttgccaagttttttttagacaataaacagcgaattactaataacagtaaacataatggcgaatcgcaacccaaaagttggacaaaatagtgaacagaaagctgatgcatagctcatttccaaaagtaaacaagccactgtatactaattagcactttcctattttctactctacttcacaccactccccccgtttcccacaccataggcccccttcgaaacccacacactccagacccagacgcccctggaggtttgcaatgcactattggcatgcgattttacttgttttactagccgcaaacaacaacaacagcgacaaaaaaaaaacataaccaacgtttcctgccgcggtgaaaagttggttgtactttttttgaggctgttgcttttttctgtgttgttttttggcttttgaggtcgcttggctgataacagcaattttgtaccccagtagtttgctcgaagttgttttgcttttcagcataaaagagactatactttctggcaaggctgataaagtcgatttgatcaagtcagcacagtccgaactcctaagaccactttgaaaacataatacaaactgtagcattggttatcttatcaagttttttcttttgacggacggctgaaatgatacccttcaatcaaggaacatggcttaaaattaaagtttagtgtagggggaaaatcgtacttgaagtttttaaaaacaaatatttactacaagattaattttaataatattcgaagaaatcagaatgatgctaagaacataaatataccagcattaaaaacccaagattgccgtactaaaaaagttttcaactatttgttattgacagcttttgttcagacttacctataaatgaataatctggattgtgttttactataatatactatcaaattggtatcgggctagcttacaaagcgttctctaattatgcctgctcactgtgataagcgacttgtgagctgcgagcgaatgtggaaaactttggctttgcattcgctcgtaatcaggcgaaaaagaagaaaaaaaaactctagagccgaaataaatgtcttacgtcagttttggcaggcggcaatcgaaacgaaatatttttgcggtttttttgaacggggaacctggcgcgacaagtttttcgcactgcggtccatacacggtccgtgctgacatcatgggttataaaattaagcaaatcgctaaccgccaattaaaatcagtttttaaatcaccgcattaatgcgtattttctggtcttcgtctccttccctcggcagccaatcagaaggactatcccaacaagcggtccagggagaatctggcatgtgacgaagtgacatcgacgacgtcatcatcaacggcaatgaacggcggcggacggacgccggcgctaacccgcagctgctccagtccggcggtctacggtaagtgaaagtcggctaaatggggaacccagcgcaaaggtatgcgacccgaagacgggtttcaaacaatactctctgtgagtcggttagaaatttttggcaattatgtgaaaagtcgtgaatcgtcatgtattttggtatgcaagaagttaaaaacctaatatttccacatgcaaacgtagagcattgcatcttgaaaactgttagagatatgataaaataatcaaataatcaaacactaatcactcatagtagattgcatagattgcaatctaaagctgatcacaataactgtgctagttaggaagttacaaagcattgcgatcaagaacggaactcaaggggcaccatatcgccagccgatcgggaaatcgctcgattgttctactgttgcatatttgcatgtacatatgtatgaatagtgctgcttgtgcttaccattgcatttcatttcctacttggtccaagttcagcaccccctctacaaactgaccgttctgatagtacaacatggcgataaattgtctcagattgtcatacaatctttccgtcatttcgccccatctctttctcgcacttgtgagctctgctttaacattaaaaacaaacagttttgtttttgctttggcacgtgctgtgagataaatcgctcgctctgtagcgctctcttgctcgcacatttaactcgtatttttgcacgttacgaaatgtggtgtacgtatatgtacatacatgtgtatgaaaagtatgcgaaagcagcaaaacatatgcaaaacaataataacaaaggtagcaacaacaacgattgtcatacagagaaattttcaatgtcaaacttttgcatattactcagttactcacgttgggcatcgtactaaatctcggctttgagtggggtaaccctcaacttatacatacttacatatgtatgtatgcatgtacatatgtacatgtataccgcttttccacctgacaaaggtgtgatcacatcgtgatgggcttcagtatcttccatatagtaatgaattattatagatgaaaaactaaaaataatttttagttcaatcataatctcaggcctatactaatgctaaaaatcatttgatttgaatatacattatcggtcaatatatttccaatgcaacatttggagacaagtgtttctaatgaaacagttatttaaaattatttcacatatctgtaaaaaaaaaaagtgaataagatataggggtggcaatgactcacaataggtcacagttataatcaatcgttattcaccaccaatacaaaggaaacttccaaaatgtaataatatatttttttacgatattggcaattccctgcgcttacaaattaccgatcgatttctgtttggggatctatagaccaccgtcattacaatgtttgttagtaaaacactagcgattcctgtttatcgaatcgacagctgagtcactgtggaattatttatgaaatcttttaattgcattcttaatacattactgtgtactttgtgtatatttttgtatatgtagtgctatcagaaggggcttgctggcgtaaatgccgcaatgacaatcatctttacgtgtaaagtaaagttccaacgtgctgccgatgactaatgcaagtgatttccgtgtgacccacaaagtgcagccagcccaaataaataaatataaatgaaaaacacgaagttgcgttgccatggctctcagtgctatcaattaacacgcaagccaaatgacaaataatcgatggaagggagtcgatgaggtgggaagggggaggggtgtctatggccaaaaccgcagggcatgctggtccctgggacagcacttttatctaaacattacattggcaaaaaaaagttcgaaccaaatgtgtgtaatttcaattccaaagtaacatttagagaagaagttcgattcttgcacaggggagttgtacgaaaacgccatcgaaagaagttccagggtagtttttctcttaatggtagttttataaggtgaaatttggtttttcggagtgtagttagacggtgcacaattatagatacacatagagagggaaggaaaaacaattgcgcggctcattgagagtgctacgaactcggggacggccatgaggcaatgtgaagccacccctcggcccgctgaccaccctgtcgcttcccccttgcccacccccacctttggcttcgcccactgccaataaaactgaacccaactgaactgagactatgcctctgtgtgtggcatgactcatgcaacagcaacagaggccccagcagacgaatccaatcgaaacgaaacgaaaacgctccgcggtggtggagtaggtgaaagagaaggagggtaggggtagaggggtgaacaaaaaataaacaatttgttgtagcaaaatttagacgttgtgtacaacaatagatacagaaaacagggcatgcccatccccatccccatccccatccccatccccatcgcaatgatcatatgcccagactcttttgttgcatgacatcgcgaattggcaaacttccatcgctttatagtgcgagtgagagagagagagagagagagagatccccgacaatggtcactttttgtacggcgtttgagggcagcaagaacttttccattatttactcataaaaattaatgatccaatccaatccgatccgcatgtatctttgcagatatagaaacacaccccgcctcgcccgttttcccgcatctattgctgggcaatggacgcgacgccgacgatcccagcagcgtgggcgccaactgtgtgctgaacgttacctgccaaagtcccaatgagagccatctgcagggcctcaagtacatgcaaatacctgccagcgatacgccacatcagaacatcaagcagtacttccaggaggcctacgactttatcggtaagtttcccgggaaaatctgagccacgatcatggtttaaccataaccacatcagactatcaccataaaaacaatttgtatatttataatatgtattccaaagatacaagtaatatgaacgctgaaagctacgttttttttttacttagccaacaagaagtattactttagaaacagtattttccatagaaaagttctaggaagatgcaaatgcttttagctcatttaaaaaaaaaacgcgcatggtcgtgaaagattccaaatatttgacagagattagcctcctataatgtcagcctaatcttggaaaaataatattaaattctgaggaagctagagctccccgaattcagtcggagaatccgtgttacgcttagtcatcatcttggcgatttgcgattgccaattgctaaacgtgacttgttattggatgcctggcggctttttccgcggtcagcgggctcatttgtggattttgcataacggttttcgtctggcttccagtcgcctttcttctttggatctgcttggaaaattcgttattgactttttggtttgccccttttttttggcttgttgtgttgtgtgtgtgctcttggcatttcgtgctgccctcagcgctttttccacacaaccaagcgcactatacaaattgttaattttaaatgaaaataataatatgtagccgcctgcttcactgagacgcaaaaaagggggcacgaggtgggaacgaggagagaactttagccgtggaatataatgctgacgtcaatcgcatttttccatttccattttctatgtccaaagctgttcatcaagtatttttgttttgctttttttatacacatatgtatgtatatatattttttttcatccaagctaatgtcttggcacgtgtgcacgagctttgtcgttcttattgctgcttttgtttctaggtattattaatgttttttgtagcgtctgtggtttaagtagtgcaaatatttcatttaaaacaagcgcgagaaaaaaagtgtgggcgggtatgagcgaccgacgacctccaaactagacgtctctaaaaagtgatattattgttctacacagccacggattgtatcgtactcggttttcaaagcatatgcttaattttaaatgcctttgaccctattttaagtaaatatgagtatttgttggattatatttcagtaccttgaatgaacaggccaaattcgtaaaagaaactatgtgtatgaaatggatcctagaccttattcatattataaattgaattacaggttaaataaagttattttattttaaaatcagcaataatccttcttcataaaataaagttaaaaggctcaatgtgccattttaatctttgttataatcttaagttaatagctaatttggagtaaaccgtaaaaaatttcaaagcaaagctcaagtcaaagtaatttccaacgtggaatacatgtacatatctatccaactccctcgctcccatggaggcaattggggtgcgttgataaggagcaatgctccttccacctcaaaaagtttttgttgtgacttctcctacgcttatccattcgcctctcttcatcgcctccttcgctccttccgtcctctgtcccttcttcttcttggtcgtcgcattgttgttgctgttgcgtgttggcgttggcagacagcatggcggcagcggcgtcgtcgtcgcattgttgttgctgccgtaactgtgttgcgactttggccacactgaaaaacataactgatagaaataaggatttgaaaaaaaattactcttttagttcacacctactcatttagttccacctgagatttggtgcttcaatattttttaaaacgtaagatggtataatattctgtctaatcttaacgaaacgcctgagttacttgaaagctatagccttgcgaaggtcgatctttgtagataaaagtttatcatagagtaaactcggtagaatatgataataggagccacaactatagccgtttttgtcggtgcagacaagtttgcacgggcaatggaaactttatgcagattgcagcaccaacaacaaggctagctaacccaaccagccaaccgcaaacgtcctttctgataagggttgtgtcgtcgacgcgcctcctgcgctgcccgagtgttaatgtatttttggccaccactgtgccctggctcgatgatgactcatcgccattacgtttcgttgttcgttcacaatgcaatgtggaacacagagagcgagatggcgagagagtgggtgggcgataggtggtggtgggtgggtggatggatggatggttgggtgaacggtacagccgcatcgatttttctgttggcttcttattgttgctatttattgcgccgccaacggcacttctcacccctctcttttcctccggcgctgtttcgttttggcatatgttctatttttgtaaacatttcggttcctgttcatgagtcatcgatttggttttttcttcttttagtgggttatccttgtgcgtgcggcctcggctgttggtgttttatggtcgttgttgttgttgtggatttcaggtgcggggcgcagcaacagctggttaatatcgcttcctctctcgcttgcctgcgctctttattttatttgcatctgtcggatcagaatccttggttcagacttcttttgaccgctacacagaaagaaatctaagtaacaaatttttaaaatgggattaaagctttaaaaaaattttaaagtgtgcttctattaattgttgctccttaacttcgccgcttttatacatgcttaagtattatttttataaatgctctacctctctcgctcactcacacccgcgcagcaacacattagtactcaggcacgaagtaacggtgggtggggagacggacaagagaaagaagaagcaaaaggaggtggcggcggcggcgggaaagaagaagcagggaaaagtatacgtacaattttgtactgagtgcatgagtcatgatttcgcttctctgtttgtgtttgtgagtttgtgtgtatttgccccggccttttgcgcattcgtttttggtttgccgtcgtcaccttatgcctattattattgttttatttcgcctgaatatatgctgatccccttcttagtgagcttcctcttctaccgtacaacttatgatttctcattgttccgctgcttttcgttttccattcattataacagcactttgtgtgcgcgggggtggcggggtgttgggggatgtggggaaagaggaagcaccgctattttgaagcagagcttaaaatgaactcaacgccggcagaggcagcggcagtggcagcggcaccggcagaggctcattaggcgacggtagagttcgaggccccaattgttgttgtagttgtagttgtcggataatgctaatgtcattatgctgtgtcattaacatgaacgataaaccaaaccgagccacttggcctagaaagcaatcaaagcctcaattgtcaggaaattgagcggtatttcaatcggtagtattcgctctattttacttgtaatggagatttaagcgttacaaggatttttcagatatcccaaaaagttaagaactaaaaaattaaagaccaatttactaataacaaatgaaatttgcatctatttctgtacatatgtatgcaatgttttgtttcataaaccaagaaaaagaggtaaaatcttacttccttcaaggtatctgacatttttaaacacaaggccataattataaacaaacgttccgcttaaattggccaagaataccagatgctgaggtaaataaacataatagcaaggtttaaattcgaaatagagatctctcacagcaatgctcgatctattatctattatctattatctaggggctttctagccgattccacatcctttcctacgattgccatccaatttgtcaacttatcgccgcgatgtctgtactgactgtacccatattatttgcgcgccaagctatcaagttatcaagccgtcaacttttatctgccaacgacggagaggcctctttggcgaactaacttaatctacaacggagcatacaaacacacatatgtacatatatagatttgtatatatacggttacaggttacgtttacggggcattcgaagtacaattacgggttgtggacacacggtcgtagaagcagctaagcaaactgaaagctgaggcccctcgagaacatttggcgatagtcacattctatatacatacatatatacaattggacagctgattagataaaactatgaatgcatatgttcaaatatataccgagagtttagaaaatagattgttctaatataaaaagtcaatatcgttgtcccaagtaactcagccaaaaagtactcagtataaaatgagagaacccaaaaaaaatcaaaatccttcggctaatgagtaatcgagaatccgttggcagacaacaaacaaaaaagaattaaccgaaacaacaaccaaaaacccgaggtgacatttttgttggcccccgtgcgcataatttcaatattcgtcagccggctatttttaaaatgcaaaaatcgaccaagcgaaaaaaaatgaaaatattcgcacaggaatttcaaatttgaaatttgcgttgcggcttcgttctttttattgttgtatcgaatgtataaggctcttaatcattttaaaagggaacccgaggcccacacttcctcgtttttctctacagagaaaaaaatatgattaatatacacatgaattatttagaatatcacttttaagatcgtaagatgggatcgttattacttcaacgaaaaagtctcgtcaatgggagggtatacaaaaacaactcattgtgtacttattcatcaataccttccttttgagacttttgcgcccgcgcactctgtattttccaagtgtttgatttgcgcgcaatttgtttatgaaacattccgtttgttgttattgccgctgcgcatgctcttcgtgaatcacccgaggagagccctgatccatctacctgcctccctcactcactcactcactacccactattcaccccgacccgacccgcttaagttgaaggcgacttcaaagtgcaggctgtcttgttaggggggctttgttgtttccgtatgactcgacacgtcaaagtcgagattcgccaagttgaaggtcaagttgagatcccactctctttgttttcgatgattcagcggggtcttatcgccatttaagtgtcctggcactggcacctgccgcactcagactcacactgcggctgtctctttcggtcggcatacggccgtctctttctggctgaatcagaaatccgtatgagtaagcggagtattcttaatgataaacggtcgccgaaagtaattaaatatttcgaacataaacaaaactacttgttgcttgacaacgtgctttggttaaagcagccagcagtataaaaataacatcaagctaaagaagttcataacaaactgagtgttgaaaaatggttactttattaggtaattagaagtgttaaatgccattcaagtaaaatttactatatttttaaaaatattcttagtttaattgttttcttatgatccttaaggacatttccttgtgttattaccaactatgcatccttggctcttgtgctatttccctgaacattgctgtaaaacataaaacagctcattcatatatcatgttcctcctgctcaaaggttgtttctgttttcgattctgattccgattctgttgccgtttctgtttctggccatgactcagagggagttgcgagagtttcgcgccctcgaacacatttggttgacccttgggtccgagatccgggacttaatcatcacgagaaaaagtgaaatgatgcattgggcaagcggacattgagaacaagaaccgaaaacgacgcgacaagtcgtcatcgtcgttggctggcgagacggcgataccatccaccatataaccccatttgatcccataccatcgccctggcatcccagctgtcagacagtcgtctgccacttggcccacttctgagccgaaatcatcagatgacgcacccgggggccggacagtaaaatgaagaaaaaaaagagacatcgctactgttgcacttaatcatacattcattggtgtaagaattcggtgactacgactacccaaagttggcattacgcatcgcccccgaaatggagtcacgactctcagccctttggaatggtggcaacgtgtactgccccattataggcacgacacgacgggatccatcagtcattcacagtcatcggcggaatatgtgctccggtgaactaagttgtttagtcatacgcatgcaaggctctattggcgattagtaattccccacagcatatatggccgcatatttgtcacgaacaataaacaattaccaaagcccggcttcccaataatcgatcaaagcgtccgctttgagttccgttctctgggatcgaaacttaaacagaaaaatgcaaaaattacggaaaaagataaacaaacagattatttgttggctttctttacgcacatatacccatgatgactagtttaaagaaaacagttatatgatgctataaatgatacagcattttacaaaattgtaaactagtttttcctaaaaatgaactttatttgatttctcaacacttctagttctcagttcttaaattgaaccccagtccaattagcccgaacaacttcatagtgactcaaactagacttttgcgaaattcattcatcattaactagtgctagttgtggctagtttttgcgaaactccttagaattagtccccctgtcattatgcattataatatcttggaccgttctagcccacatatgatatgagtcatgtggcaggcgcgtttacggcgcgttttatgcgcgattttaactgtctgagcgacggggtcattaactaagaggatttatgagcgccgtgtgaatggaactcagctgaaaggcacggaacagaacggaacggaacggggacggtgaccaattgtctgccattgtacgcttaatggccatctctctttatctattcgtctgtcgttttggcctcctccatccctttattcgatccgatcggtaggtctatttttggccagcctacagattgttcatcctctttatttgccaattttgattctgccactggtaaactcacagaatgatggtcaatgattccaatatcatcatatctacgtttaacaaactatctagcttaagaaaatcttttatggatttcagtatgatagttttgtaaaccccatttctaagtcgaaaccatgacaaattactcattttggttgcttcatctagcttgtcttgtgaggcaagaatccattttggagactctgacgtccgttctttgggtacttgagcacccagaacctctgttttctacggttatctttgaatggtagttaattatttatttatgatggattttccccggacgcgcttatcgttgctatatcatcacaatcgtaccgataacacggttaactcgatttaatgtcacttgactggttactgtgtaaactgcaattcatagttgtagtcgaaatttgtgaaatcgaagtagggaaggtctccttatcggagtccactttgtgcccccactgttcattgataaatcaaaagcgcactgctatctaaccactttagctaaaatagtggaaaaaggggtgggtcacgggcggttattatatatattgtatagtgatgactgacgagcagccaatatggttgcaatttgtagtgagttacacgcgccttccagatttatcgctgatatcacctcctggctacatgataagaagaggagtttattttataatgggggtgtgcagagtgcactgcgcgaaaacggggttcggttgggatgatgggaggggggggagggggtggcaagggtaggcgcctgcctggtgactaacaaggcttctgcccgactggctggttatcagctgtttggaaatcagacaagtgtgttgccttgtttgtattatgagtaagcatcgcatcgattaggaaaggctgcaccattccccctataaaaacccctctcggaagccacccatttttttttttttgctcaccaccaaacccaaaatcacaccacaaccaattcctgtgcgataagatataaagcttatttttcgatggtggcttaatatggttacagtcatacttctataatcaaaaaccaatgttcccatccaggctgataaatttctatataaaaaaaagtataaagtttctatgtataaaatacaacaatattattatatatatttataaaaaaaagaagcgatctccagttatattcttttgtattacaacacatccactttggtgagtcgatactgtacattaagtatggtgagccttggaaaaaagtgcgccgtatgctgcggattcttctggactctctttctcttccttctgccgcttatctttggccaaaaataacaacgtaaattatgagttaatgtgcccacgtgtgtgtgtgtgtgcttgcgtctgtgcaagtgtgcgagtgtgcactcgtgagggtataaaaatgttctgtcaataagcctcaccactttgttgttgttgctattgctgttgcctctggcgttgatgatgactcatatcagcaaaattcacacagttgagttgccgagcgagagagtgggagagcgaactcgaagagcgagaggcggcgaaaagcccacagcgcaggcacaaatacactgaaagtatcgacagggcgatatcaacacagcggcaacatcatcgaagcttccacgttcgacactcgaaattcgaaaagtttctccgtcgctagagatgcaaaacaaggcctaaaaatagctaaaataagaagctaaaaaaaagacaattctaaactaaagaactgatcttaacgatcaagtcagctcaatcgtgatcaagggaatatataatacttgtattttattattaaatttcttacatcacaatagctagaaaaaaaatcatcaagcaagggtgttctatgataagatagtagctcataatcattaagagcccccaattgtattgtagcatatttttcgagcaataaactttttaccatctttatcagccgactaaaacgcaccttttccccttgatattttgcagaagatgcacggaaaacgggttcccgagtgctgctgcactgccacgcggggatttcgcggagcgccaccattgccatcgcctacgtcatgcggtacaagtcgctctccctgctggaggcctacaagctggtgaaagtggcccggccgatcatctcgcccaatctgaacttcatgggccagctgctggagctggagcagaatttgcgcaagagcggagtcctggcgcccgcaaccccgcacctgaatagtcctagcaatccttcgtcatcttctgtgggattaagcacccaatctagtcaactggtggagcagccagaggaggaggagaagcgggaacagcgggaacggggtaaatccaagtcggatagcgaggctatggacgaggatgggtttgattacgatgatgtggacagcggctccggcagcctggcgggtagtaactgctcatccagattgacctcgccgccaattaccccggatgacgaggcgcccagcacttcggcggcagcgtcgtcggtttcagaactagattcacccagctccacaagcagcagcagtggcatctgctcactgctgcagtccaccagctcatccgtatcaccccgcgcaatcagcaagccaaatctgctgtcacccacgcggcagttggctctgttcaagcggaattcgcccgccaaactgcgattggatctggagtccagctatgcgcctgcgtcacccatcccaaacaccatgccctggctttcggtgccatcgacgcccgtctgcgaggaggcaccggatagcaggattaaccatgtggctagcaatttgacgagggactgagataaggtgcctgcggaaagccgccgtcaagtagcagcagtgaaaagaaagaaaatgtgcacccaattgccgcattctttatgatcaaaactaaaattgataaagctgtacgtttttcgaagactagtagaaaatgatcaagttttgatgtattttataactacttgtttactgaaactaaggaattttttacctggctgaaaaaatttagattttattaagtcagaaacggcgagagggctgatacttcctattaaacaaggtgatgctaaatggtttctgaagccacctctgcaacgtgtaaataaaaacgttcaatatctgtacatacaaacgtacctaaaacaaaacacaagggaaagaaataccaattgcagcttaaactatgtacttgcaataccttttaagagcttttgtaatgtatttccttttcgcccctgaaccaaccaaccacaaagcgaaaaccactaaaataatccaaaacaagcaactggagaaattgtttaagagaaagaaaacctcgtacatgttaatttagtttaaatttagttgtaagcgattcttaacttacctacctacatatatatacacacgtaaactatattaaacttcacatagaacaatgaaatccaaaatgcactgcaactatttctgctgacttgccacacaaatcgaacccaacccaattcccccaacaatattataaaccccgccatatgcacagcaaagatcttatcaaaactgttctaagttttatcaatccgctatagccactctaatagtttagttacttcttgaaagtgaaaaaagtttgtgttttctagttttaattatttatatgaagcgagtgtgtgagaggattatgattcatttcgtattagatcgtaagtctattaagctaagctacacctgagcagtgtaacgcgaatgctaagtaaaaggaaattataatagtaaccaaaccaactgctgttttcctttgcatttttttaacaggaccgccaaaatgttgaaaactgttatatattttgaatatatggaacataaaagcactgctttgtagccctggagcgcagccagccctgccggtgaaacttggaaacatcgataacaaagtaactgggtatatcgaattgtgaatatagtaattttttttttgtatatatttgtcatttgaattttataattcattaacatttactgctaaaggctgcattggatatagtaaaattaaattacatttatgataagctgatcttgatgaaaagcagatatggtaggcacaggtttaaatttaagtttgtttttatgatttccaggacgattaaccacatgctcaaatttaatcgataatcttccctggttgcgatacaactctcttctaagagcgtagacagaagcgttagtttatagcacacacacaaacgcacgcggtgtcagcgaattgcaaaatcagcgttttcac

SEQ ID NO: 17372 - DNA, 2369 bp, DROSOPHILA
cggttgtgtctacatctttgcacaacgagttcgaaaaataactaagctccgcgcgaaaacagtaggaaattaaaactagaatatttctggtaaaaacatttatcattggatacaataattttaacacgaatcgtgagaagaggaagcaaacaattaatactaaaataaaatataaaaacgagatctacaacccgcgcgtttttcgattaatgaattaaaaataagtgtgcgtgctacaagtggaaataaaactcgatttctgggcccccgacttttggttgcaacacactttataacgggaagtggctcaacaagtggctcggggattatctaataaagccctcctaccgaaaatcatacttaaataatatagattattatacgggcagaaagcaacaaataaaatatacatatatcaattttaaaacaaccaaaggcccccatgtgtatgtgtgtagtgtgagcgcgtgcatatgtgtgtgaatcgagaaacgcagagcagcagcaacaataatagcaacaacactacaacggcaacgtcaacagcacgcaacaacaacagccacaacggacgctgtgagtgcgacggagacggcgacagcgtgagtcatatacaaagtgaaatgaaaatgcggataaagcgagaagcgccgtgtcttctgttatttatgccaatccaaaataccaacaacaacaatcgcattggtgccaatcagaaggactatcccaacaagcggtccagggagaatctggcatgtgacgaagtgacatcgacgacgtcatcatcaacggcaatgaacggcggcggacggacgccggcgctaacccgcagctgctccagtccggcggtctacgatatagaaacacaccccgcctcgcccgttttcccgcatctattgctgggcaatggacgcgacgccgacgatcccagcagcgtgggcgccaactgtgtgctgaacgttacctgccaaagtcccaatgagagccatctgcagggcctcaagtacatgcaaatacctgccagcgatacgccacatcagaacatcaagcagtacttccaggaggcctacgactttatcgaagatgcacggaaaacgggttcccgagtgctgctgcactgccacgcggggatttcgcggagcgccaccattgccatcgcctacgtcatgcggtacaagtcgctctccctgctggaggcctacaagctggtgaaagtggcccggccgatcatctcgcccaatctgaacttcatgggccagctgctggagctggagcagaatttgcgcaagagcggagtcctggcgcccgcaaccccgcacctgaatagtcctagcaatccttcgtcatcttctgtgggattaagcacccaatctagtcaactggtggagcagccagaggaggaggagaagcgggaacagcgggaacggggtaaatccaagtcggatagcgaggctatggacgaggatgggtttgattacgatgatgtggacagcggctccggcagcctggcgggtagtaactgctcatccagattgacctcgccgccaattaccccggatgacgaggcgcccagcacttcggcggcagcgtcgtcggtttcagaactagattcacccagctccacaagcagcagcagtggcatctgctcactgctgcagtccaccagctcatccgtatcaccccgcgcaatcagcaagccaaatctgctgtcacccacgcggcagttggctctgttcaagcggaattcgcccgccaaactgcgattggatctggagtccagctatgcgcctgcgtcacccatcccaaacaccatgccctggctttcggtgccatcgacgcccgtctgcgaggaggcaccggatagcaggattaaccatgtggctagcaatttgacgagggactgagataaggtgcctgcggaaagccgccgtcaagtagcagcagtgaaaagaaagaaaatgtgcacccaattgccgcattctttatgatcaaaactaaaattgataaagctgtacgtttttcgaagactagtagaaaatgatcaagttttgatgtattttataactacttgtttactgaaactaaggaattttttacctggctgaaaaaatttagattttattaagtcagaaacggcgagagggctgatacttcctattaaacaaggtgatgctaaatggtttctgaagccacctctgcaacgtgtaaataaaaacgttcaatatctgtacatacaaacgtacctaaaacaaaacacaagggaaagaaataccaattgcagcttaaactatgtacttgcaataccttttaagagcttttgtaatgtatttccttttcgcccctgaaccaaccaaccacaaagcgaaaac

SEQ ID NO: 17373 - protein, 476 aa, DROSOPHILA
MCVNRETQSSSNNNSNNTTTATSTARNNNSHNGRCECDGDGDSVSHIQSEMKMRIKREAPCLLLFMPIQNTNNNNRIGANQKDYPNKRSRENLACDEVTSTTSSSTAMNGGGRTPALTRSCSSPAVYDIETHPASPVFPHLLLGNGRDADDPSSVGANCVLNVTCQSPNESHLQGLKYMQIPASDTPHQNIKQYFQEAYDFIEDARKTGSRVLLHCHAGISRSATIAIAYVMRYKSLSLLEAYKLVKVARPIISPNLNFMGQLLELEQNLRKSGVLAPATPHLNSPSNPSSSSVGLSTQSSQLVEQPEEEEKREQRERGKSKSDSEAMDEDGFDYDDVDSGSGSLAGSNCSSRLTSPPITPDDEAPSTSAAASSVSELDSPSSTSSSSGICSLLQSTSSSVSPRAISKPNLLSPTRQLALFKRNSPAKLRLDLESSYAPASPIPNTMPWLSVPSTPVCEEAPDSRINHVASNLTRD

SEQ ID NO: 17374 - DNA, 3879 bp, DROSOPHILA
gcccagagaaaaacacatggaagtttgaggtgctgagtaaactatttattgcaggcaattcccgatacactcttactatttatagccgcttatttttatcatttgtagaaggctgtagctagtttgcctttaactggctacaagtcgattgatagtctaatattctagtgtttggctagacatcccttttgtggtcaagaagggttgattggtagcaaggtggactcacctggggcataaagcactttccacattaattcaacaactaccagagcagaaaaatcactaaatatcactaaaaacactagttcacattaaattcaaatagaacatcatcctttttggtacttttttggagggattcctttttgagacaccaacaacaacaaagatgacaatcggtgcacacacacagacgcacatacatacgcgcagggccacacgcacttactcgctgcattttcgcaggataattcacatattgtaaacttcggacattaatatgcatgctgcagttagccacatttaagccacaacaccttttgttaactatagacttgcaatttgtttgacaaaaaacaaaaactcagcgaacacaacacggcgaaaaaataacaactacaacaaaaatggcgtgccaacagcagcacaagcagtgctgttagcgaagctatcggttatcggctgttaactgtgtttgaatcgtaacgtattttatttttacatatctatattttactgatattcttgctatattttttttattttcagaattcgcattgtcttatatctgaaaaattccataaatgtaagctcatagctcaacaatcgatggtgtatcaaggcaagaagaagcactattactatgagaacatgtattctaatattacagaagcgatcccttacacattttttcctgctaatcccttcgactgataaataaatataaatgattttgcaaaataacatatttagccaaatagaaaagcactaatcgataatgttaggtgccaaacatcgataacatagtgagtgccagctctaaagtacagtgctcttcttctttaaaccgtgtttttcgtgcattaaatattttattttatatatttgtacattactccctgcttgtaaaccaataaaatacacaagaaccagcaaaagaccttccacagttgttttattttaattttttcgcccgaaaggcccaatcttacccagatgttctaacctgttgcgtttgattctccaattgacagccgccacatccgcatctgcaactaagattccaccacgtaaacgcggcagaccgaaaacaaaggttgaggatcagacgcccaagccgaagctcctggaaaaactacaggcggctaccctgaacgaggaggccagcgagcctgcggtgtacgcctccaccacgaagggtgagtccgaatcctggctagaagccaaaatcctgatccatgataaccaagctaattcacgctccattcgcaggcggtgtcaagctaatcttcaatggtcacctgttcaagttctcgttccgcaaggcggactattccgtgtttcagtgctgctaccgtgagcacggcgaggagtgcaaggtgcgggtggtatgcgaccagaaaagagtctttccttacgagggcgagcacgtgcacttcatgcaggccagcgacaaaagctgcctaccctctcaattcatgcctggcgaatcgggagtcatatcctcgctgtcgcccagcaaggagctgctgatgaagaataccaccaagctcgaggaagccgacgacaaggaggatgaagatttcgaggagtttgagattcaggagatcgacgagattgaattggacgaaccggagaagacgcccgccaaggaggaagaagtggaccccaatgatttccgtgaaaaaatcaagcgacgactgcaaaaagcactgcagaacaagaagaagtgacacggaatatgccttagatcttcaaactacaccttttactatataaacttaactaagatcgagaaggctcaagaaggcccaacagtacaagatctgagctgcctaagggcttcacattatactttctatatccatttgggtcttaaatagccctaataattctaaataattaagtttttcgtaataaaacgatgtcaataaatcggaccttaaaccatttcactagctagtaagatctaacttaatacgtagctgtactcaaaaccccatttaaatgataaataacataagccctttcatgtctttcagtgacccaacacgtccgcaactgtggtcctcagatgttcctgatcagccgcaagggcggcactctgttgaccatcaacaactttgtgtaccgctccaatcttaagttcttcggcaagagcaataatatcctgtactgggagtgcgtccaaaaccgatcggttaagtgccgcagtcgcttaaagaccatcggcgatgatctctatgtaaccaatggttcgtaaagcgaagtaagcaaatgcaaaggccatttaatggcttctttccatcttcagatgtgcacaatcacatgggcgacaacaagcgtattgaggcggccaaggcggctgggatgctgatccacaagaagttgagttccctcacagccgccgacaaaatccagggttcctggaaaatggacaccgagggcaacccagaccatctgcccaagatgtagccgcttcctatacattcccaacccaaacgttcgtgttctgttagggctaagctaatgtattctactattgttcttgagcgtatatcattgatttagactgagtgtcccgagcctagttaggatgggtaagtagcctgttcatctgggatctcaaagtaccatttttgtaattcttaaagtcccgggtcatattatttattctgttctcattgcttagacgcttttggccacggcactgacttaaacaatggcttgtgttacgtacaaaatatgaactcttaataaaatcagatgaacatctaaacgaattggaattatatgtatgatctcatcataatatagaagagattctttcatgcgttctaaatagtgtttattttgtgcactaaacgtatttgcgttaagagatcttatcccgttttttgaaagttttatgaattaatcaattctcgtgggtccatataaatttaagtttagagtttagctatgcatgagtattttgatatttcacgttgcgttattatgtttcagaaactatctgactttttcaagatatccatataaactatatgctaattttggtgtacttctaaataatcaataatattcttgttctctatatatctcgttcgctggtaaatatctacgaacaattagaagaagctgtgtctattacctatgcagtgcaggggttggaatgtacttgacgatgagaacaggaccctttttggccctagtcggtaaagacccaaggcatctttaggctttgttgctgactcctgacatttttgtggttgtgcgatgagcacgtgctgcggtatttcacctcggagtccaccatgaacgtagtggctcgggccttgcagcccttgtgatgatacatgcaacgccaggatccgataaggttgtccttgcccaaaatacggtggacgataaagtgcttgttggcaatgattagcctcggacgtctatgagcagcaagactgaactccgcaggcccgtcgaagttcagaaacttttttgagtagcgtttgcgatctgaaagaaacaaaaagcatcaagtcagtaaattgtcttggtaatgtccacaaaactattgtgtaactagcgtatttgacttaaacaggatggcagagtagatgtttccattatctttatttcggtttgtaaattgcttaagct

SEQ ID NO: 17375 - DNA, 788 bp, DROSOPHILA
atgttagccgccacatccgcatctgcaactaagattccaccacgtaaacgcggcagaccgaaaacaaaggttgaggatcagacgcccaagccgaagctcctggaaaaactacaggcggctaccctgaacgaggaggccagcgagcctgcggtgtacgcctccaccacgaagggtgacccaacacgtccgcaactgtggtcctcagatgttcctgatcagccgcaagggcggcactctgttgaccatcaacaactttgtgtaccgctccaatcttaagttcttcggcaagagcaataatatcctgtactgggagtgcgtccaaaaccgatcggttaagtgccgcagtcgcttaaagaccatcggcgatgatctctatgtaaccaatggttcgtaaagcgaagtaagcaaatgcaaaggccatttaatggcttctttccatcttcagatgtgcacaatcacatgggcgacaacaagcgtattgaggcggccaaggcggctgggatgctgatccacaagaagttgagttccctcacagccgccgacaaaatccagggttcctggaaaatggacaccgagggcaacccagaccatctgcccaagatgtagccgcttcctatacattcccaacccaaacgttcgtgttctgttagggctaagctaatgtattctactattgttcttgagcgtatatcattgatttagactgagtgtcccgagcctagttaggatgggtaagtagcctgttcatctgggatctcaaagtaccatttttgtaattcttaaagtcc

SEQ ID NO: 17376 - protein, 91 aa, DROSOPHILA
MLAATSASATKIPPRKRGRPKTKVEDQTPKPKLLEKLQAATLNEEASEPAVYASTTKGDPTRPQLWSSDVPDQPQGRHSVDHQQLCVPLQS

SEQ ID NO: 17377 - DNA, 3132 bp, DROSOPHILA
gcatgttctgggtgatctttgcgggcagcctgctggccctcatctgccagtggttcctgtcggtgaaggtcacctttgtgggctcgcaggtggccctcatctccttcactctgctggccatgatcctctgcagcgttacggactccaggtggtcgctctggctgctccttgtgctctttggcctgtcgtactcgcagcagcagattctcctgctggaggtcacccatctgcgcttcaccgaatgcatcatatgcatctcgtatgtgctcaagttgatctgcaccagcatcgtgtacttctactttgtggcggatgcgaagaactcctacttctatgccaccgactcgagcactctgatggcccagggattcgtctttctcatcatcacctcgctgctggcactcgtggtgggcatgaaggtgccccggacgcatcgcgcccagctgctggagatccagtacgaggtgtacggcatcatctttatgaagcaccagatcgagcagctcaacgtccgttggctgaacgacggcaccattcccaccatcaaccagtgagcccgaatttgagcttaggtccccgagctgtacacacacactttcttatcttatcacaaatactcagtatttaatgaatcgaaaataaaaagacttctcagtctttatccacatacaattggtgacaacagaaataggagcctgagttgaagaagctataaatttcgtctatatatcaaggcatataaacgacttaagaatattaaatatagaactataactgcttaagtcaaattctttggaaattagatacaaaacttctgatatacacattttcatatgatccgcctaaaaggttttgcagttgtatctttatcatcattaaagagctgtaaattcttttccaattttccaaacaatcccaatagagatacaatcaaggccttaagtgggttccagatagtgggtgtttgtttacgtggtgtaggtttattttaggactaaaactagcgtcttatggagataatctggacggcggcggtgtgatcgcgacaaaagtggctggcacaggccgatacgttcgcacatggagtcaccttgtagccactgtcacctggaggataatatgcttagttatgcgggcgttccccatctggagatatgacatgactcacccagctgggtcatgaacttgtgcagcgtgtccacattccgcaccgtgctggccagcagggtttccagtccacctccgcgtcgggagtacaaatagtccatggcacccagcagtgcatcgaactgggaatcatcgtagatcacatcggcggctatcaaaagatccgttttagcatgcgaatcccaggggaactcactgaccgcagcccagtttagctgctccgcctggggcatctgctccttgggcgtgtctggaaaattcaggctgatattctcgcgcattagctggacgcagggttcactgccatcggtcagcaggacctggcccacttgcagctgcagggccggtagtttcagcatgattcccagcagcccggcaccggctcccaactccactatgttcttgccacgcaccaggtcgcggtgctgcaggaggtaatcgccgagggccagagccgcttcccaggtgcacaatcccgttgtgccctcggccacgaagctggtggactcacggagcgtgatgtgggcgcccggttcgaggagataatgtttgtaggcgtacgtggatgaccctgtgctcgcttcgttctccgccaccggaccgcacaagctgctgtatatatcgtcgtgcagatcttcctgatctccgagcaggagtagcaggtgcttgaggaaggcctccaggtagctgcgacgcacaggatagcactggttcatcgggtggccacaggtggccgctaacagctcctgctgatcctcccagctgaggggcagcgtgaccgactgcaatggacaccaaatcgattcaacaggtggccgggtcataatgtatcacatggattactcaccgaccaggccatcttgttcaccggatagcaacagaggaactgctgctgcagcttgccgtactttctggacattttccgtgctccaagttccgagttcctcggctactcgatatgaaaacccactcccagacgaacgaaagtgacaacgtgaattgtacccggcacttggagagcagtgtgaccaattaccaaaaacactctctgacggaaaaacaaatggggtattcccaactttggcgagtacctaacaatatagagtatattacgagtaatattgatacggcaaaacaaatactctataataaatatctttgcctaataacaaaacaatctagaatgttatagtcgtcttccccgactatcagatactcagcaagtggaaatgcattagcggaattcaattattttgatggcatattatagactttgggaaaaaaaaataaaacaaagaattatcacacgaaagaacgattcggctattggtcctgatcaagaatatatgtaatttttatggttggaaacgctaccatctagctattaccaacgaatagtatactcttttactctacgagtaacgggcatacaaatattttttattattaaatacatcactgtgaacggcagtccacgtagtgccgaagcgcaccaggagagtgtgctatgtagatataagtatgtatacacacaaggaacgaaaatctgctgtagttggcagataacgagtgatacatcaaaaggtacaaaattttatggttccgataaaagtacaacaaattggaactgagacccatcagttgcgttttaattgctactgacaaaaaaaccgaagtcttgttaaacctccgtttgaaatatattttcaaaacaagtaattggccatttttcaaaatgagagtttatgtcgatttggttttctcccgcaacaaaacgttatttggaaaacctaaaatattatattttctgttaaacaactaaatatgaccaaattttggaaaaacacgttagcttagcggaaaaacttctataaatagctacagtttctacgcccataacgtctaagcacttggctctagagacttcctttcaaatgaattttgtccacctcgaatatttttaca

SEQ ID NO: 17378 - DNA, 1006 bp, DROSOPHILA
ttttcatatcgagtagccgaggaactcggaacttggagcacggaaaatgtccagaaagtacggcaagctgcagcagcagttcctctgttgctatccggtgaacaagatggcctggtcgtcggtcacgctgcccctcagctgggaggatcagcaggagctgttagcggccacctgtggccacccgatgaaccagtgctatcctgtgcgtcgcagctacctggaggccttcctcaagcacctgctactcctgctcggagatcaggaagatctgcacgacgatatatacagcagcttgtgcggtccggtggcggagaacgaagcgagcacagggtcatccacgtacgcctacaaacattatctcctcgaaccgggcgcccacatcacgctccgtgagtccaccagcttcgtggccgagggcacaacgggattgtgcacctgggaagcggctctggccctcggcgattacctcctgcagcaccgcgacctggtgcgtggcaagaacatagtggagttgggagccggtgccgggctgctgggaatcatgctgaaactaccggccctgcagctgcaagtgggccaggtcctgctgaccgatggcagtgaaccctgcgtccagctaatgcgcgagaatatcagcctgaattttccagacacgcccaaggagcagatgccccaggcggagcagctaaactgggctgcggtcagtgagttcccctgggattcgcatgctaaaacggatcttttgatagccgccgatgtgatctacgatgattcccagttcgatgcactgctgggtgccatggactatttgtactcccgacgcggaggtggactggaaaccctgctggccagcacggtgcggaatgtggacacgctgcacaagttcatgacccagctgggtgacagtggctacaaggtgactccatgtgcgaacgtatcggcctgtgccagccacttttgtcgcgatcacaccgccgccgtccagattatctccataagacgctag

SEQ ID NO: 17379 - protein, 319 aa, DROSOPHILA
MSRKYGKLQQQFLCCYPVNKMAWSSVTLPLSWEDQQELLAATCGHPMNQCYPVRRSYLEAFLKHLLLLLGDQEDLHDDIYSSLCGPVAENEASTGSSTYAYKHYLLEPGAHITLRESTSFVAEGTTGLCTWEAALALGDYLLQHRDLVRGKNIVELGAGAGLLGIMLKLPALQLQVGQVLLTDGSEPCVQLMRENISLNFPDTPKEQMPQAEQLNWAAVSEFPWDSHAKTDLLIAADVIYDDSQFDALLGAMDYLYSRRGGGLETLLASTVRNVDTLHKFMTQLGDSGYKVTPCANVSACASHFCRDHTAAVQIISIRR

SEQ ID NO: 17380 - DNA, 3086 bp, DROSOPHILA
ttgtcttttgtaacagctgagccatcgcttggaattttcctcagtaaagctccgttagcgctggcggctggccgcttccaaaaaaaattcattagaaagttgtcacaaaaaatttgttattaatattaatcaaaattcaagcaattaagataatggctcggttaatttcgggagttcgcaatttgttccatcgatatccattcgtcaccaacagcgccatctatgggagcctttatgtgggcgccgagtattcccagcaattcgcatccaaacgctggttggccgtaagtaaaatcatttacagacactcatgtgcagaatatgagcttggagatatatccgagggcgatctggcgatttctaatcctatttatgtgccccgtagacggcgagcaaacctgaggatatcgattatgcaacaataggaagatatgccgtgatgggtactgcagtatatgccccaacactttacctttggttcgtgccctcagttttatgaatctgtacatacatagccacattttattattacttgcacatgtacacagtgatggtcgacatagtagctctgcttttttgtttgatttctaatacaatctgtttatcatgaaatctataacttttcattataatttcttatttctaaatttctgattttatgttatgactaaaaaacgacactttagagcaaaaacagtcaacttaaaatattagtatataaatcggagctattacgttggccgaggctgttcatactaacacatctgtggaccattcaatttactcacacttacatgcttgccatttaaccattctttttatttcctcaatttgcttcgccgtacgcttctgttgttgtttttgacttttatcaatttgtttacgattccggtaaagctccatgagcacgtgtcgcaagtcaagagcatgtctctccgccatttttatcactttctcttcacactttctctttagaagcacccacgccaccagagcaccaagcttttcctctttaattgagtgagagggaaaagctgcccagaaaagcacgcaacgcactgagaaattgggcatatttgcacgacataaaagtcaaaatgcaacgtaagtttgggaagttggaagttggctactggggatctggattcgaaaaacaaaacttacaaaagaaaacaagatgcacacaaggatatacaaacatagggaataaagatctcggaatattataaatacatatcacaaacacatacacaatgtatgaaacacttacacataaataaatactaacaccataaattgattacaaatatgcaaacacactatataaagtaactccaaaagcactatatatacaccaaaaaaagatcttgcttacctagcctgctttagcttttactttgatgtcttaaatataatcaagcatatatatcaagcataataattcaaataatcaatttcctaggtacaaatggttagatcgcgcttttcctggcaccactaaggttatcatagttaaaaaattagtgcttgatcagtttgtactaacgccttatctattgactgtgttttatgcaggtaagttccactgatacactcaaatgtaaagattaattaatgtatattaaattaataatacattttcatgtttatttttgtacgcttaacacatgttctctgttatttgacaattaacaaactaatttctatttccaggcatgtccatcatggagggctctgcggatattttcctggaactccgcgaaaaattcgtgccgacttttatgcgttcctgcattttctggttgcccgcgcaggccttgaacttttccctggttgcaccccgattccgtgtcatctatatgggtatttgtggattgatttgggtgaatattctatgttggaccaagcggcaaagtcttccagtcgcaacgaaagaaattgcaactgattcaaataataatgcagctgccataaggaattccgaaacatgagatttgaatatacaccatacaccataaccatgtatatagtcctagatagtttttgaccatgcattgccaaataaaggagaagcaaatagtgtggtagacttatttatttaacctgattgcaaagcgttcgtatacagtgcgtatgattgatgttcccataaacggaaactcatcaattactacttaccctctattcatctatttctgtgagtgcgagcttgtgtgtgtgtgtgtgtgtctgctgtttatcagcgtgtgtaagcgcgttaaattgtgtgcgtgtgtgcgtaaatgtttccatcaacatttgccacactcaaacaataaagaactatcctgcgtatcccgctggactccgtgcactgaactccctaaaccaaaatttatgtgacatataacaaaaaattcaattttttaaaattatccctgtttttggttcaaacataaccaggtgcgcttcgtcactacgtgcactgctatccatagtagtaatcaggtttcgtcacttataagagcttttgtatgtttaagtgggttttgccttaacatttacattagatattgttccctaatttatgtctcttgttcaatggcagctatccgtggctaaatgcattgtaattccccgatcgcattaactttttgcctaattattgctcatctctaccatctcggccgactgatgcccatgacccctgacccacgagcttacggagcacccagcaaaactaattagacgtggcgtgtttcggctgccaactcccttcgatatccgccccatgttaatgcgttgagtgtgtgcgtctgtttaacttattgttgtctatttaaattgcaatttgtcaatatgcgtgtgtgttgtagttaccgcacgcccatctgaggccacctccttgtttttcctcacagttttccatttgcactgaaagaaatcgtagtaatataaagcatttgatagcaagctaaacaaaattaaacatgtcctcaaaatatgtacgttaatgaagtagtattatattatatctatatcttgttttaagggcaaatagtatccctacgaataagatatatcaataactccaaattcaatacact

SEQ ID NO: 17381 - DNA, 590 bp, DROSOPHILA
agcttttcctctttaattgagtgagagggaaaagctgcccagaaaagcacgcaacgcactgagaaattgggcatatttgcacgacataaaagtcaaaatgcaacgtacaaatggttagatcgcgcttttcctggcaccactaaggttatcatagttaaaaaattagtgcttgatcagtttgtactaacgccttatctattgactgtgttttatgcaggcatgtccatcatggagggctctgcggatattttcctggaactccgcgaaaaattcgtgccgacttttatgcgttcctgcattttctggttgcccgcgcaggccttgaacttttccctggttgcaccccgattccgtgtcatctatatgggtatttgtggattgatttgggtgaatattctatgttggaccaagcggcaaagtcttccagtcgcaacgaaagaaattgcaactgattcaaataataatgcagctgccataaggaattccgaaacatgagatttgaatatacaccatacaccataaccatgtatatagtcctagatagtttttgaccatgcattgccaaataaaggagaagcaaatagtgtggt

SEQ ID NO: 17382 - protein, 88 aa, DROSOPHILA
MEGSADIFLELREKFVPTFMRSCIFWLPAQALNFSLVAPRFRVIYMGICGLIWVNILCWTKRQSLPVATKEIATDSNNNAAAIRNSET

SEQ ID NO: 17383 - DNA, 4005 bp, DROSOPHILA
atgctcagccatgctccccagctcggtttctgttcaatccccacgtccccccccctccgtttggggccaaaaaatattactcggttgccattccacttaagattccgctggccaagtgcacttctgatggccacaaatggcaatggctgtgttgtctgtcgcgcgtatttagcataaaaggtgcggccaagactttggcacggtctgcgtgcttttgatgttgcccccaaactgaacaaaacccctccacaccaacccaaaagcccacgacattgttgatattttgcatcaaaattctgacaaacttgtccgtcacggggaaggggagtggcaaagggatgggggtctagatccgaagcggaagtggcgacattttaggatgtcactccgagtttgaggtcgccgcaaagtgcgcaacacaatttgcataatgcccggtgggacggatggatgtggctgcggatgtggatgtggatgtgaatttggatgtggatgcggatgtggatgtggacgtggatgcggcgaagcgcgcggggaatggcgatgcttgatgcggtctagaattcggtctacgtttcggattgctgcactgggggaaaatataaattaattacatttaaagtggtgatcgcattacgagcgtgcattattaaatctaccatttgtaaagtatgttaatggcacttaatctagcctcaaataattcatattgctaaaacgataatttactttagagctctactaatctacaataggtttactttttatttctacacaatacacttttaaaatgaaacttttcaaactgaactatttctgttattttgataataataatatcccttcgcgtaaggacattctggaatacctatgattagaaatgctgagatccgaaggcattgccaaatattttgtacatttatttgctcagtgtatgcaaatgagcgggtgatgaacaagcaggcgaccctatcttcgtcagtattggttcaggtcttgttcggacagtaataacccacacgcagacaccttcccgttttcgctggaacctacacattcaataacacatcccagtctaaaacatcgtcctgcccaaggacatcatgcagaagtcgcccaggatgagccgcctgtcggccgaaaaaaagaaaaagaaagacgatgaaaagaaggacaatgcggaggaagagttgcagaagaacaaggagctaaagtgcgtgagcaactacgacaagaccgagatactcgactatatgccccgatatatggataccttctggaaaatggacacgcggctgagcggatccaaggtggatggtctatggatgctcaaccagtccaactacaacaagggactggccttcacactgaacgaaaggcgagtgctatccattcacggactacttccggtggcagtgcgaactatagatgaacaggcggagatctgcagtaatctcctcgagtcatttaccaataacgtgcaacagtatatatatctgacatatctgtctcgtcgaaataggcgattattctactaccttttgctgtccaatcccgatcgctttgtacccatgacggatgcctcgggctcgatagatctgctaatggtccacaggatgatccattcgatgggccagggtctttacatttgcattaaggatctggggcacgtttcgcaaatcctgtctaattggccattccgttgcgttcgctgcctgctggtgagcaatggtgcctctgttctgagtgtgggtgacttgggtgtcgacgagatgcccatactgttctccaacttgcatcagaatgtcgtctatggcggcattcatccggcttattgcttggccgtaatgctggatgtgggtaccaataatgaggaactgttgaacgatccgatgtatacgggcctgcgggagcgccgttgctcagaaaaactgtacgaccagctgttcgaggaattcacactgtccgtgatgcagcagtatggaccacgtgccctgatcctgtgcaaggactttgaggcccagaaggccaagaagcaattggagctgtaccgcgaacgccagtgcattgtcgacgtggactttcagtgcttcgctgcagttgctctggccggtgtgatagtgtgcaaccgattgaagagagtcttcttctcctccaacgtattcctgttctacggcgccgaagccattaacattggcatggctcgattgtgtatggtcctgctgaaacgtgagggtctcatcgaaatgaaggccagggagaagatttggttcttcgatgccaatggattggtagtactggggaggaaggatatacccgaagagcttctggaatttgccaaccaaagggatccgatcctcgacctggtcgaggccattcaggagttgaagcccaacatccttgtgggtgggtcatcgctgccgaatacctttacccccgatgtcctgcgtgccatggagaagagcgccgatcaacctgtgatatttgcactatcaagacccctcgagcaaacagaatgttctgcggaggatgctttttcctacacaaaaggtcattgcatcttcatctcgggctcgaagcttcccccgctgaagtatgccaacaaatggtatcagccggggcattgcaccagtagctatttggtggctggaataagttgcggcgtgatgttggccggatttacaaacattccggatgaggcattctgtgtggccgccgagcgtttggccagcttggtctggccctgtgacctggagaagcggaatgtgtatccgccgatgaggaaaatccagtgcatcagcctgcagattgccgaggccatattctcgtacgcctttggacgcggattggccactctatatccgcagccggaaaacccaatggaatacatcaagaactcgatgtacaacccggagtaccgaatgaacatcgttgacgtttactgcatgcaaaatcgtagtatcgccaccacggaatcccgcaagtactacacgcttgatatctaggacctgtacttacgtttaggccattattaaatgaactaaaccagagggctaaaagctgggattatgggccagtaactggcgggcaaattgcatggcatatcatgtctaataacagttgtttgcccagtctgcatattgatttcgattcgaaccaaagtcggagtacaagtacgccagcgggcaattaattgcatgcaattttcatgtgtcaactcatgctgtgtgactatactcgcatacatatgtatgtatgtacatatgcacgcacatggtctacgcttgcatgtgtgggtggtgtttcgggattggtttcacaattctccggggagtgcattcgaaactatcgcagtacgacaataaaataattgaaacaaccaccatgaaatggcaggaaacatagacacagcaaaaatgcagacaaattaaattgcacgtgtgtgtgtttgcgtctggctttgacaggtgtgcgtctgagcgaaagcagcgatattccattccatttatcaatacggaaaatgaaatgcaacccggcattgtgtcggtttgctctttgtcatattgaattatttgcttaggttttttttactgcactttccggctaacgtttatcagttgaccttttggccagaacggagcccagctggagttttcgatagccacatacgtacatatatattttttactagccaatagaactggaccgtacccaagtcgtattagcttcaccgcaacattttattggccttaactcgaagggaatttctcacaatgtgttcggaccccaagagatgacttcgtaacctatggttttcagatcctgggcatcgattgcgtgtcgcgaaagttcttgaacaacgctctgtacattgctggttttctgaaatcaaacaaaattaaggaaattttgaaaaaattaggatgaccatgaacttccaaaaagaagagattcttgaagcttatacaagcaatatcttattaatattatcttatcttacccatg

SEQ ID NO: 17384 - DNA, 2005 bp, DROSOPHILA
tcggacagtaataacccacacgcagacaccttcccgttttcgctggaacctacacattcaataacacatcccagtctaaaacatcgtcctgcccaaggacatcatgcagaagtcgcccaggatgagccgcctgtcggccgaaaaaaagaaaaagaaagacgatgaaaagaaggacaatgcggaggaagagttgcagaagaacaaggagctaaagtgcgtgagcaactacgacaagaccgagatactcgactatatgccccgatatatggataccttctggaaaatggacacgcggctgagcggatccaaggtggatggtctatggatgctcaaccagtccaactacaacaagggactggccttcacactgaacgaaaggcgagtgctatccattcacggactacttccggtggcagtgcgaactatagatgaacaggcggagatctgcagtaatctcctcgagtcatttaccaataacgtgcaacagtatatatatctgacatatctgtctcgtcgaaataggcgattattctactaccttttgctgtccaatcccgatcgctttgtacccatgacggatgcctcgggctcgatagatctgctaatggtccacaggatgatccattcgatgggccagggtctttacatttgcattaaggatctggggcacgtttcgcaaatcctgtctaattggccattccgttgcgttcgctgcctgctggtgagcaatggtgcctctgttctgagtgtgggtgacttgggtgtcgacgagatgcccatactgttctccaacttgcatcagaatgtcgtctatggcggcattcatccggcttattgcttggccgtaatgctggatgtgggtaccaataatgaggaactgttgaacgatccgatgtatacgggcctgcgggagcgccgttgctcagaaaaactgtacgaccagctgttcgaggaattcacactgtccgtgatgcagcagtatggaccacgtgccctgatcctgtgcaaggactttgaggcccagaaggccaagaagcaattggagctgtaccgcgaacgccagtgcattgtcgacgtggactttcagtgcttcgctgcagttgctctggccggtgtgatagtgtgcaaccgattgaagagagtcttcttctcctccaacgtattcctgttctacggcgccgaagccattaacattggcatggctcgattgtgtatggtcctgctgaaacgtgagggtctcatcgaaatgaaggccagggagaagatttggttcttcgatgccaatggattggtagtactggggaggaaggatatacccgaagagcttctggaatttgccaaccaaagggatccgatcctcgacctggtcgaggccattcaggagttgaagcccaacatccttgtgggtgggtcatcgctgccgaatacctttacccccgatgtcctgcgtgccatggagaagagcgccgatcaacctgtgatatttgcactatcaagacccctcgagcaaacagaatgttctgcggaggatgctttttcctacacaaaaggtcattgcatcttcatctcgggctcgaagcttcccccgctgaagtatgccaacaaatggtatcagccggggcattgcaccagtagctatttggtggctggaataagttgcggcgtgatgttggccggatttacaaacattccggatgaggcattctgtgtggccgccgagcgtttggccagcttggtctggccctgtgacctggagaagcggaatgtgtatccgccgatgaggaaaatccagtgcatcagcctgcagattgccgaggccatattctcgtacgcctttggacgcggattggccactctatatccgcagccggaaaacccaatggaatacatcaagaactcgatgtacaacccggagtaccgaatgaacatcgttgacgtttactgcatgcaaaatcgtagtatcgccaccacggaatcccgcaagtactacacgcttgatatctag

SEQ ID NO: 17385 - protein, 633 aa, DROSOPHILA
MQKSPRMSRLSAEKKKKKDDEKKDNAEEELQKNKELKCVSNYDKTEILDYMPRYMDTFWKMDTRLSGSKVDGLWMLNQSNYNKGLAFTLNERRVLSIHGLLPVAVRTIDEQAEICSNLLESFTNNVQQYIYLTYLSRRNRRLFYYLLLSNPDRFVPMTDASGSIDLLMVHRMIHSMGQGLYICIKDLGHVSQILSNWPFRCVRCLLVSNGASVLSVGDLGVDEMPILFSNLHQNVVYGGIHPAYCLAVMLDVGTNNEELLNDPMYTGLRERRCSEKLYDQLFEEFTLSVMQQYGPRALILCKDFEAQKAKKQLELYRERQCIVDVDFQCFAAVALAGVIVCNRLKRVFFSSNVFLFYGAEAINIGMARLCMVLLKREGLIEMKAREKIWFFDANGLVVLGRKDIPEELLEFANQRDPILDLVEAIQELKPNILVGGSSLPNTFTPDVLRAMEKSADQPVIFALSRPLEQTECSAEDAFSYTKGHCIFISGSKLPPLKYANKWYQPGHCTSSYLVAGISCGVMLAGFTNIPDEAFCVAAERLASLVWPCDLEKRNVYPPMRKIQCISLQIAEAIFSYAFGRGLATLYPQPENPMEYIKNSMYNPEYRMNIVDVYCMQNRSIATTESRKYYTLDI

SEQ ID NO: 17386 - DNA, 4121 bp, DROSOPHILA
ggcaggcgaaagcaaaaagaccacacaaaccttaaaccaagaaattatcattattgttgaaaacaaagcaagaagcataccgtgaatcgttcacaatcactttaaaaccaaaatgaaatgaaatcaataaactataaaaattgaaaaagttaaacccagcaagtgctatttacttaaaatcgtatggaaagataacaatcttcttaggggctgactagatttaaggtcgatttatttagtttgttttttaattgaaattggctaagcaatcgtattggttgagtcatgcaattgaaattgttggaactatgcatacaatattttgtatatgtttagtttaggagactgtaggaatttcgtagtaagctctattttttcactattcttgtatataaatgcacataatgatcttaggtataatgatcttaggtagtggtagtacatagcaatgtgtgtgcccagcggacgggggaaccatgtccatctcggatcgaacgtggctcctccacgtccaactgcctgacattcgagtatagtgggaaaagtgagtttcatttcatttcatttcatttgaattgaattggagtgaggaaccgtattgtttgagtgcggacttttcaggttgcgcacttcgttgaatttgtctcctgataaagctacaattaattgagcactaactttatgtgtgtgtgtatatactatatataagtacaattatatgtatcaaaaatgcaatcaacaatatcagtccgttgccgtggccagcaacaacaatatctcctattctcaaactccattcatttcacgcccgctgaaacggaaattgataccagatattagggattagggcttagggatagtcaagcatactccaatggggatggatgtgatatgtaaattgagcagatcagtgaaggtgcctagcctctggccaatccaatccatttcggtactagccttgcacgtatcccagttccgtctactcacccagccgtggatcctatggccaggcgaagttgatgcccgtcagctggtagaacttgttgttgaagggccggtagaactcccggaggcgctcgatggccccgggatctatgtgcggatggttgcgccccttggtcttacccagacagtggggcgtggagcgtgcctccgacttgaagaggcaggggaagcccttggtggcattgaagtagaagtgcttctcggtgaccacgcgcttcagaccgaggaagtcctgtacgcgtccaatctcgtaggcgggatccatgatcagccgctcgccgctgatgaagagcagctgcgagagcggaaagtagagcagccagcgctccagatagcgtgcatagacgccgatcttcaccgggccccagttggtgtccaccaccgagtagctaccgttgacgaaggccagctgctcgaagagcttcatgtccgccttcttgctcgccgcctgtgtgtagtcggagatggcccgcgtcaccggatcccgcaccacaatcagtaatctacgggcgtataaaattgaggttaagtgaagatatgctagtgattgatggtccagatacgtagggttaatgtaaaacgcataatgcatttagaatataatgttaatcccttctatgttgatcaaatcgaatgttgtattccgaaaaccatttcacttaaggtgcttaaaagtatgataaaacctaaaacaagttctaaagtcttgtgtataaagcacatatttaaaaggactcaatatttaagggatatccgccttaaaaatctcagctaagcgtttgaaacacttttattatatagtatgctacgatttacgtacggtttcaatatttaagggatatcaaatcggccttaaaaagtatctctcttcaattttcaacacttctattataggtgctaaaaagtatgctatgactaaatacagtcttgtggataaagtgcagtattctaaaaatatcatttttaagaattgaccgtttttaagttctatcaaatctgatggagtaacaatttacgattatgatcacaataggtttgatgtagaaaagctcactttgttgccggattcatgtggtagacgcgctgcggcacctccttggtgacgaagtagctgggcgtcttctccatggtgatctggccctcgatagtgtacggcatgtggtggcggtaccagcgtagtccccgctggtagtgcctgtcgaagaagtgcacctccgaaccggcggcccgcacgtccggatgcaggcggatgaactcgagcagcgcccgcgtcccgctcttcttcacgccaatgatgagcgtgtcgggcaggtggcgcgatggtcggagcccctgctgacggagcagctgatacttgggcgccccatccaggctgctagtaaccgtctgtgccggcggagcaccggtggtggatgagctgttcctgctgctgctgctgttgctgctgctgctgttggcggcgttattggtctcgttgcggggcgaggaggtcagcgccagtagattgcgtaagttgctctgcgcgggagaggtcagaggtcaatgccacacatcgtgcgaaacatatcaacatattggcttatgaaaatgcccaacttgtaagtatgccgaaaagtatgcaactataaatgtacatatatataatcgtatatatgtatgtagatagcatcgcaaagttcagcgaaagacaaaacttaaacttttcacagcacacttttggacagcttgttaaatgttttgaaaccgctggggattattacaaccccccccccccccctaattttgagttggctccactttacacatgtgtgtagcgaaactttatattcgattttccaattatcagtttgttttcatgaataaatgcattggatattggatacatttagcccctacacttagacattgtccagtgattcgtggacatattcacctgctgcagactgcgactgatgctggccaggaggcaggcattgaagctgtaggagaagtagaccagagtcacgcagatcaccagggcgatggccaggctgcggctgctcaggctgaggctgctgcaccagatgctcatcacaatcatggctggctgggcgctagtggctgccgtgtctcgcatctggcggtataatcggttccgagcgctccgtcaaattccattgccactcagtcgccccggagcactgcctgcagcatccggattccgattgtgatttgcaatcgcagcagcggctggcggctaccgccaacgcgaagtcaactgaaggaatggggctgttcgcaacgctggagctgctggtagttgctggtggttgctgctgctgttaggtggctggtgggtggttggtgtggttggggtggtgctggcgctacgagttcggcctgcaagtgccggagctgtcgtcgcagccgagttgcggaagtgaaagccagggataaggcagggccaagacattggggtgccctgccagcggataagcgctgcctgggccgccggttcggctccgtttgtgcaggatgacaggatgggtgggggaagcggccgtgtcatggttgcgcctgggaagcgcacaggcgcattggacacatcctctctcgtctcgggacgcttatgcaactgagcgttttgcttgctctctcgccagctcgtcgaatcgccgttggtgtgacgtcgcaaatgtacactgcccgaaagaagtgccaagtcttgaatgtagcagataattaatgtagtgacagcttgctatcacatcatgtctttaagaaagaaagcagacatatatagttaaatcaaaagatactaaaatctgaagaatttccgctttgtgagggtttgacgaaatctttgctttctacacaaatcaaatcttaataaataagtatttcacttaagttagtaattaatttccaagtctgataaagttatatttatattaagcaataataatagacattattgatttgttaatttctaacttcacaacgaatacatgataaaatgtactccaaaaacgcaatcgttaagtagtatttctaatattttttattatttctaaaaatgtatatatgtatatagtttgttatgtaggctgggaatgccatcttaatatttattcgac

SEQ ID NO: 17387 - DNA, 1155 bp, DROSOPHILA
atgcgagacacggcagccactagcgcccagccagccatgattgtgatgagcatctggtgcagcagcctcagcctgagcagccgcagcctggccatcgccctggtgatctgcgtgactctggtctacttctcctacagcttcaatgcctgcctcctggccagcatcagtcgcagtctgcagcagagcaacttacgcaatctactggcgctgacctcctcgccccgcaacgagaccaataacgccgccaacagcagcagcagcaacagcagcagcagcaggaacagctcatccaccaccggtgctccgccggcacagacggttactagcagcctggatggggcgcccaagtatcagctgctccgtcagcaggggctccgaccatcgcgccacctgcccgacacgctcatcattggcgtgaagaagagcgggacgcgggcgctgctcgagttcatccgcctgcatccggacgtgcgggccgccggttcggaggtgcacttcttcgacaggcactaccagcggggactacgctggtaccgccaccacatgccgtacactatcgagggccagatcaccatggagaagacgcccagctacttcgtcaccaaggaggtgccgcagcgcgtctaccacatgaatccggcaacaaaattactgattgtggtgcgggatccggtgacgcgggccatctccgactacacacaggcggcgagcaagaaggcggacatgaagctcttcgagcagctggccttcgtcaacggtagctactcggtggtggacaccaactggggcccggtgaagatcggcgtctatgcacgctatctggagcgctggctgctctactttccgctctcgcagctgctcttcatcagcggcgagcggctgatcatggatcccgcctacgagattggacgcgtacaggacttcctcggtctgaagcgcgtggtcaccgagaagcacttctacttcaatgccaccaagggcttcccctgcctcttcaagtcggaggcacgctccacgccccactgtctgggtaagaccaaggggcgcaaccatccgcacatagatcccggggccatcgagcgcctccgggagttctaccggcccttcaacaacaagttctaccagctgacgggcatcaacttcgcctggccatag

SEQ ID NO: 17388 - protein, 384 aa, DROSOPHILA
MRDTAATSAQPAMIVMSIWCSSLSLSSRSLAIALVICVTLVYFSYSFNACLLASISRSLQQSNLRNLLALTSSPRNETNNAANSSSSNSSSSRNSSSTTGAPPAQTVTSSLDGAPKYQLLRQQGLRPSRHLPDTLIIGVKKSGTRALLEFIRLHPDVRAAGSEVHFFDRHYQRGLRWYRHHMPYTIEGQITMEKTPSYFVTKEVPQRVYHMNPATKLLIVVRDPVTRAISDYTQAASKKADMKLFEQLAFVNGSYSVVDTNWGPVKIGVYARYLERWLLYFPLSQLLFISGERLIMDPAYEIGRVQDFLGLKRVVTEKHFYFNATKGFPCLFKSEARSTPHCLGKTKGRNHPHIDPGAIERLREFYRPFNNKFYQLTGINFAWP

SEQ ID NO: 17389 - DNA, 13004 bp, DROSOPHILA
cttcaaattcagcagcagcagacattgtccggacccggatccatcacattaacagcatcgccacaactgcctatctctatcagtagaatgcgacagcatcagcggctactccaacatagttcatctggctctgggaggccttttgcggccgatcattttatcctgccgccaagaaatattgcgcaatagtggttccaaagctaaaccacagtagagatacaaatcaaactgcagagccgaccaatcagaccgccggtgctctgattggccgcccattggagactgcgcgttatggctaaggtaaccagtttcaagatggcaacgcgcacgtaccaatcagaatcaagttagaacgctatattcgagttcctcgactatcagattcctactacctactatacgtacctactacgttaataggagtgcgaactagaacatttacatatttttggcgtaccgatactaatcagcaagacaaataaaatgtaaagaaattgttcaaaagtgggagttttgggcggttagtgagcgttaaagtggacgtggtagtccttactctctcgcctttatagttcctaatatctctacattcattcggaagcactcggctatagtataccctttaactgtacgagtaaggggtataaaaaacgtaaaggtggcggtggctgtagcttacgacactccttgacactgggtcccaaaatagcagttcagtgtgtttggttttattaatataatatggttggttcttcgctgaatgtataatattattattaactgttgttacttaatggttatcaatcctgaagcataaatttagcacttgcttattttgtttgtataaatagcagcaaaatagtgatattcgatagatcatgtgaataaatatttatttttcttcaaaaatatcgatatattgaaatgtagataaatttgtcacatccctagttcgcccgaatggctgcgtgtgtgtctgtgcgcgcgcctgtattgtccgccatcttgtcagcccgacttcatcgaaaattacaaatttaatcgtttaacgcgttttatgcccacttaacacaccagaaagtgctgcagtacacattttcccacaaaaaggatatcgtcttgagtacgctgcgctcagcaaagggggataaaattgcatttgaaagtggaattgttggtgcggagaaaaaattgtgcagcaaaaaattcccaggtctgtgctgtatgtgtgtgtgagaggcaggccagggttgccgatcctcctatttatatgtgcataaaatagatttttaacagtaaatcccattaacttgtgatcaattgagtgcgaatcgctgtaaataattatttggcgggctgttataatttttatttcccaaaaaaccgcattattctgccactttactaattcccaaaaacatgacaaccctgtccgtgggaagggtactcaaacaacaaaaacgaagtacgttgcgcggcgccactttgacgtttgaatcgtcatcagacggttgggtaaattttctcgctctcgttgctctcggtttcggccccactgtatgcgtgtgttgtatgtgtgtgagcctttatgtgagtgtgtgcggtccgtgacgcattcttgttttgcatcgaaaatcgccaaagcaaagaaaagcagaaaaagctgttaaagctaaaaatgattaaatgctgaaaatcaaagcacagttaaaaatcaaaagaccctgcgtgtgcaactctaaacgcaagtgtatctgtgagtgtgtgggtttggtggggggctgtgtgggggaaggaagcgaaagagccgctaaagagaagcagaaaaaagggcgagggcgactgctggtcgaaacaaaaaaaaaagagaaaaaaacggatgggggaaacagagaaatcataaaaacgccggcaacagcgattctcgagtgcccttcccgccactccccaacagttgccatcccacccctcgcagcggcggcacacccacaaaccacaaagcgaatgacaaacaaaactaaacaaaaagctaaaagaaattcaagacgcgctccccactgaaagttcgtttacacggaattggttatttgttttgtttagttttggaaatttgtttattggcgacatatgtgtggtgatgaacctccccctccgcccgctcttagttatcgtgtgcatgtgtgtgtttatattgctgaaattcttcacaagagttgagtaaagtccgtgagaaaccgagattatcgttaacttggttttaacggaacagatgtgtgtgttttttttttcataccaacaacagctgccgctcactacctacaacaacaacaaaaagagcaacataataaaacctcgaataacgaaaatttcgtacacttttataaaaaaacaaaatagtgatcgtaagccttggatattttattgtgtgaataattctgttttaacttaattcgccttataattatgatactgttataaaataatacttattgcaccaagaaatcacaaaacagctaaggccaaaggaagtgttttatatcggagatttactttcatgttaaaatggaaaagtaaagaaaattaccacattaattggatctatcatgcggatgaattgtttaaacaacttaagtgtcttttaaaaattatacatgtttatctttccatttaatatggatgcacaatcaatttggattataaaaatatattattttgcattcgaaaacaataccaaacggcttatttaggaaacctttcaaaagctttaaatattcctaccagcgttattaaatttccaaattgaaataaatatttatttgaataattcagtgagtcattttatggaacccattaatatttattgtcttttgaccgcgaaaaagcaaagaaaaatgcaaagcaaaatctttgactgtgaagcccataattatctcgtatgactcacgattttggaagtttgtttgcagacaaaacgagcaagatatatgctccataagttatgccaacattgttggcagcactcccaaggcttccccgggttgcttccagccagtgtccactgtaccactgctctggagccatgagacccactctgtgggatgtggacgggcctacgtgcaatgcaaaagtggccaagtggagctgcagatggagttcgtttggcttcgctggctggctgaataaactgaaccgcatgtctggctcttggcttttaccccgcatcccgcaccgtcctccccaccgcatcaaaaatccatctccagctgcctttgcggtggtttccagccccgcccttcttgctttcccccacccggtcgtcattatattacgttttttgcacatttcttgctttgcacaatttagccttcagtttccggttatgaaggaagcagcaaacgggttcggactcagtatctccctctctctctccctctgcccgttttcctcacttacgggcaatgtaatgtgcatttaaatgcaatttctgctgctgtgcgtcaatgtcgatgagtttgcaaatatcatgaaagcgcgccgaaaatatgggaatcatttctcacccttatcgtaaatctgaaacacaagtcaatcatcactatttttaaacattgcttatttactccaggaacaatcactatcttatcatgttcatattaacaataaaggaaccattatatgcagatagtttgatggcatagatttgattaatatatcagtttctggttcttgataaaacgtactaatatgacagcagttataaaatgtagttcatgtctggttataaactaattttaaaagctttttatcgctgctattttaacagttgtcggaattattgtaaaacgcccgactaattagctgttgaaatattgagcaacatttctgagatacaactaaaatgtgaagaaacaagggtgttagggcccccgacacttacaaatgttttgcaaatgaatgcctagtgtttttcctaccagcatgttgaaaaccattcaactggtagtcgtcgtactcgtatattttccagttctggtgtttttatgccgccgtagcccagtgagcgtaacgcctggaaacgctttgctctcgtaattaacctctcgaccgaccggctttctgccagcctatcggtttacctggtcgcttgctacctggtccaagcaaagcaacaatccatctgtatctgtgtgtagcagctatccacagctcgtttaaccagcagacctttgagcacggtttcttgggccatcacaagccgaaaaccttcgtgttccacggcgtgcgttttccccgggggttttcttcgttcttcgctaattctgccgaaaggtgcctcaaaattttccattaatgttagagtagcagcagactaatcgccttgaaaacacatgaacatgatctattattccattgcttgtgcgtttcacatcgagtattcaatcagtagtcagtcaagtcgttttaaaattaaagaatctaaacttgtcgatgactcagggggatatttaaattattctttgttttgaacatatcgttccactttaaaccctttagcttaaaaaaaataataaaaatggtaataaggcagagttgtaatttaatacatatttttcaatttctttttaagccactcgtccaatttgtaattggatttttatttcattgttgaatatgagcaaattgaagttgatgtgctgcgcatttttcatgaaaaaccattaacacaaaagcactcgtttgtataatacagccattccaaatatagaaaatggatagacatttgctggtattgcaataaaattttatttgtttatcttaaatgtttcacgctttaaagttaaaactcccatcgaaaagtcactcaattgtttaggttaagtattcttggaatggctaaattggaatggcattaaagttgcagtagaaggcatttacaattttgaaagacatttgatgtcatggttctattagtctgacgcctattatctcgtttcccatccactctacttttattatgaagctttgtgactaagaattaagcatctaaagatcactgatctcgggctttttatgccaccatccagcggctatttgtaaggtttctacccgcttgtcttgtattttctgttcaggttcgatggcttgtctctgcagctttgacttcttttgtctcggcgttctttggcctttcttgttttctcgtttcttcttcttctcgtttctcgcttcttatcattcgagcgtgtttccaagttggaccaaaaaaacgagttaacatttaagacctaaaatggccaaaaagcagcgacttgctagcagatcgctcgaaagaacaacaaaagcaaacaataacaaattcccagcatcgtcattatttgcaattatcgacagtttgcttttctgcggtttcctccatctcttcctctctctttctttttgtttgcacgctaaaatcttggacttcgtattcgtctgcggtcttgagatcaaaaacctttgcttggttgttattgaggtacatttatcgaaaggaaaataccgatatgatgaatgtcttgtaggttatttcatataatgtttaaatcgtattcttaggttttcttttataggcaaggaaatgatcagatgtttcgcgtgatatatatgtatgtatgtatatatatgcgactatatagcctctataaagatttcaatatgcgacatccacaactggagttgtttgatttatgatcggggtgttttcgcctaggccttagcctttaagatatctttcaatgtctgcctgccgttccggatgaataagtaaaaataagaagcataaacaaaggtgtcacgtacacttttgcactcacacgtactgcaaaggagtcggatagaatgagatagtgggtgcggaaaagggggatattcggatttggattgggatctagtatgtgtgctgctgtggagtcgggcgaagtaaagtgaagggaactgctggcaaatgctttcaaagtcatttccttctactcggaaaacgtaaagaaagcataaacaaacaaagaaacattccactcgcagctacatacatatgtatgtatgtgtgtacgtgtaagtcggataacttgttcctcccaagcacatattgtaatcataaaaatacttgccttctcggtcggaatggaaatcaatatgtgcgagactaatcaaaaagctgtaaggcgaattgaaacaaaacaactgagcggaaatgtaaaatatttccccatctcatattttttttatttatatggtttgtgatggtgttgtctgtaattgcaccgaatcattctcgtatttctccttttcctccccgattcgctgtaaaaagtccagcaattcgcccccgatttgtgcttatcttgttactcttctcgcatttttttctttcaccgcctctgttttctttctctgccccaataattgctgtttcgctacgttcaataagattatagtatttgtattcctgcgcagttgtttttgtttcgtctgccatacatatatttgtgcacacaaacgtgcttctttgatttgcttagcatgcaaatttgcgattttttctttgacgcgcttcgtcagcgaacaaatgtggtcaagtaactagttttgcagtcctgtttgttttaggcaaagcaagaattgtgggaataccagataatgtaggaaaactatgaagaatacgtggttatttaaaaataaaagaatttcttaacaatatttattccgttttatctcgtaaaataaagcgaacaagtgaaaaaaccttgaacattttgtcttattcttttgaccgtgactgttttcaggcgattgtttgtctgggtttattatttttaattattgcgattttgctgcgctatcagcatttgtatttgttattaacggcggcggtgccaagcggcacccgaagcaccaaagaaaattgtcgagaaaggggtgatggggtgagtaaagaaagaggtgtaaggcggagaagcgaggggcaaaagcgaagcggaaagaaagcaacgaacgattcacttgaactggtttcggcaagcagatttatttgttttgattgtagtttgtttttattatggcattcgtctgccttgcatcggtgcatgcgtgtgtgtgtgcgtgtgacattgtctatgtgtgagtgattgtgtgcgaaaggaagagagcgaatgtgtgtgcaaatgcgttttggcagagagcacgtgacaacgcccatttatgacgatgacgtcttcctttgaactttaaacccattggttttgtaacgcttttcttttcgattgcaggtcaagtaacgagagataacaatagagcaacaagagcagcagcaaaaacaacaggagccgaaagcactggaaacaaaagcggcaacggcttcacattggacatgtcatgtcagcaagcctccagattccattcagccaccgctacagccacattagccaagagcacagccaccagaaggattgccacagcagcagcagccgcaacagcaacagcgatagccgcagcaacagccgcagcagcagcagcaacgctgacgcccgtggagagcattgccggcaagacgacgtccgaggactcggatccctatgccttcaccgagactgtggccgtcacaccacccattctattcaatgcacaggtaaagaagcagtcggaaatttcctaaaccccgtccatatcaggatttgcatagatcaaaaaattgtagtatttctgtaagaaaactgtatacatatggatgggggtttctttgtagataagatcatctgatttttatacataaaactaggttctttgtcaaccgtagtatttagcttacgttaccacagttttaccaccattattttgaaacttgttatttgtgagcctttcaaaacactttcaagtgtatgctaatcacatggtaaataaattctggaatttttattgcaaaagaaattggtgataatttcagaacctgaacttcaatatgaacaggttccaacttttgatatatggtattatattacgctcgctttatgtacacaaccgtattctatgaaattcacttacccaactgttttgcttacatattgcagaaatcgagagcccgcctaaccgacagcaatagaggcagcaacaagaggcagacggcagcaacagctgcggccaacagaaaggcgaacctggtggcccaactgagtgtcacagaggcagcaaaggcgcaggcgtctttggcaagcaacaacacaacgaatttccatcatgtcacgcaatctcagagacagtcgacggcgctgcagttgcaattgccactgcaatcccagtcacagtcgcaggcctcgccgaagcgggccaccaacgtgtgcatagtccgcccgcagcaacagcagctggagaagatagccacctcggagtcctgccagtcgccggcagcaccaccaccgctttacgcccacactccatcgctgtggcagacgccgctgctcatagacaatgggcaaaagcaacagctcctccagcagcagcatcagcaaccgcaacagcaacagtccgttgctattgcgttggtcagtccgcccacatcgcccgcctcattaccttcgcccactctgccgcctgccaccgctgcagtgaccgccatggtggcaccgatttccgtatcgcccaagggtggattacctttgccgccatcgaagttccatcacaccacactggcgcaacatctgcagaaggtggagtgcttgaaaaaaaagaaatccttgccactggcctgccaaaacaacaacaataacagcaatttgccgaataacaacaatgtggagtcgcttaagaaaccggtggtgcagggaacgagctacaatcagactcatccgccaccgctgatggttttcaatacgggaacagttgcagttcccgcgcagagtccgcagactgctgctccacagaaacattccaccggcaacagcgtagatgacagcgatctcaacgagatacccgtcaatgttatcttcagaaagccgcaagaggcaggcggagcggcgaaaacaggtggaccgggaggattaagtgcacctgtttcgggaacgccgcaaactcgtccagctgaagtgaaaatggtgactcctctcacgccgcccactccaccagagatgagcgcaccgcccctgctagcgcaaatgcaacccccgcagatacccacgtcttgtgttccagctttagctcccagcttcaaagtgtcgtcaccagcagttctcagcccgaaggtgatctcaccagctcctgcaagcccaaagctcttgtgtccgacagcacccgcttcaacgaactcactgcaaattgcgccaaaagctgttccagccactacaacctcatctgcaccagcattagccacgaaatcagaacaaatgtcttccaaagtggccaatttaaacgccttcaaccgtcaagcacccatagcttcaaagggcgttagaaatggcatcactaacaacaataacaacagaaacagcaatgtcgttgcgaagaaatcgtcaccaacttcgatgccgcctccaaaggatccgattgcaccgattgcagcaaacgagttgacggattccgaacatcgtcagcgacgccgcaagcccgcctccgcctgcagacgcagcttggacactctgagtgagaacgagtccttttcagtggattcgccctactgcctacaacagcattggctgcactccggctttaataataagtcccacgacgcgccactatcgcaaagtaaccggcgtgaggatcgaattgctgttcgtaaaggagccctgaggcgacaagcgctgcagctactgtctacgcgctccctgcaggagcttcccatgcgagcggccaaacagcggctgcagtgcgtccagaacatgctgatcaagtaccaagatcacgctggccagcagcagggaatgtaagtttaatgtagtgtaatcattacccaatttatactaattgtactgttttccgttaaagtggaattggcaaccactgtctggtggccagctgcaagcagcccacgcttagtatggcagcgcactgcgagcgtcacatcgtgaacaacagcacccagcagcttttccagccttgcgtcgcctggcggatggatggaaccgcttgccaggctcctgtcttcgatgtgctgcacacattggcgctctgcaaggtgcacagccacctgcgttctggtatggatggagcccgtccagcatcgaaacagccgcccgttagtttaccagtcgctggagtggcgactctttatgtgcctgtgaagcagcagcgaaagcgcaaggctaatacgaatgccgtggctcgtcctcagaaacgtggtaggaagccggcgaatgaaccgattgctaaccagatcagcagccagataaacaaactgatacctggggcaggaatgcagcgtaaaagcagcaccacatcgcttgagtccattgccagtaattcgcaatcgtcggccacctcacactcacagccgccttacaagcccggaaatgtgttggccgctgtacctgcagcacagaacttgtcccaacggtccattcctccagcgctggctccgctcagcagtgattttcaacccaaccatcagcagcaggaaccgcttttggttcccaagttggaggtggattcattgtttaaatttgatgccgatcaacagcaaaatcagcagcagcaatcgactttggaccccagcttactttctttggacattgcgaatatcaaggccgaggagattagccaaattgtagcacaattggcggcggccggtggtgatttacaaaatcccaacaataataataacaacaacataggaatccataataacaatagcgtgcacttcaacaacaacaacaacaatagtatgaactacagcaacaataacaataacagtttcccctcattcaacacggcctttggcaacgccatgggccagccaagcaacacaattacgcacaatggccacgctgttccggcagtgctggccaatacggccgatcttcttggccaggacatgtttggtatttgcgagaacagctcggcatacgccagttccgaggataccggattgggcggtctcagcgagtcggagctgataggcactaacgatgctggtaagtttcaaaacggtgaaacttttatgacttccatataatagctatgtatatatagaaggaagctggacaaattccctaagattttttcagtattttgacacgttatttctctcttccagatgatatagcattgaatggcgcccacttgctggaggagcacgatctggtaaatgtgttcgacacgctgtcagacgatgccttcaacgagctgttccaatccggtgtgtatttaaccacaattttacttgttcagcttttcattgtactaatccatgtgtgccttcgctgccaacgccaccgccatcgccttggacctgtgcctatgcagtgcaacaagccgagtgcgaggctatggaccgggctttggaccgggccttacagcagacaatgggcggctcggcggacagcgcctttcttaacgatttcctggacgtcggcgacgatctgctggccgatgctgtgatgcactcaccaaacacgtccggcatcgatgctcctcccctctttggggacagcagcagcggcggtggcaatagcagcagcaacggcgcctccgacatccggggcttggtgcagacctaattccggcatcaggtcggatttatggcctacagaatttacagattcatttagagagacagagagagagattttcaagcttgatttcccattcacttttaggcagttttcgcttagaatttcggtattttctttttggccatttcttacctgcgattctagtttggcacaatgtttctatatgcagcttcaatgttatgcatgcattcaccagcagatatgcatgaataaaatagcattcaaaaaccatatagttatgcgttaatgtgaaaaacaaaaaaaaaaacacacacaaaaagtaaaaaatttgaaaaaatgtccaaaaatattaaattcaactttaaatcaacattaagaatgaaatgtatatgtatccgtacgcaaaaacataatattgtaaattcgcggagaggtgtagctttacgtacatcttaacgtaacttaatttgttagtgaaccaacaaaaggattgtagagatcagctttattatacatataaacgagaaattataaaacaataccagagcaaacagataaaatgaaaccgaaattgtaggaaatctagcaacaaattttgaattctgaattaaagttacgaacgcgatacattggaaagttcgttaacataaacaagcctaaaatttgtttaaaaattttgtgaacgcatttacaacaacaaccacaacaccatacactcaaatgagaattgcaagaactacgaaaacaaaacaggtgaagctgaaattgtttagtttgattttagttcttggtttgcacctaatacacatacacatacacacccacacctaaacaccaacacacatacatacaacgtacaagggactagtttgaaaccgcgaatcgtattactaaatatatatacaactatatatacttatatatataaaatatagctatatatacataataccacttaatatatctgtacacatacttttaagtgtaagctttaatttaaaccaacccacaaacaaagaaaagaaaaccctataacaaaaaaaaattaacagattgtaaaagtgtatacttgatttatttttaagctcttttatttagccattgctcgatggccacaaactttgttcgattttaattaagcctaacaaattttaaaagcaaaattaggctgaccgacaatttttgagttttagcatgcgtttgtctattctagattatgtaaattaacaaatattatatagaacataaatgaattgtaattttctttagtctagtgacaagcagcaactt

SEQ ID NO: 17390 - DNA, 4183 bp, DROSOPHILA
ccatcttgtcagcccgacttcatcgaaaattacaaatttaatcgtttaacgcgttttatgcccacttaacacaccagaaagtgctgcagtacacattttcccacaaaaaggatatcgtcttgagtacgctgcgctcagcaaagggggataaaattgcatttgaaagtggaattgttggtgcggagaaaaaattgtgcagcaaaaaattcccaggtcaagtaacgagagataacaatagagcaacaagagcagcagcaaaaacaacaggagccgaaagcactggaaacaaaagcggcaacggcttcacattggacatgtcatgtcagcaagcctccagattccattcagccaccgctacagccacattagccaagagcacagccaccagaaggattgccacagcagcagcagccgcaacagcaacagcgatagccgcagcaacagccgcagcagcagcagcaacgctgacgcccgtggagagcattgccggcaagacgacgtccgaggactcggatccctatgccttcaccgagactgtggccgtcacaccacccattctattcaatgcacagaaatcgagagcccgcctaaccgacagcaatagaggcagcaacaagaggcagacggcagcaacagctgcggccaacagaaaggcgaacctggtggcccaactgagtgtcacagaggcagcaaaggcgcaggcgtctttggcaagcaacaacacaacgaatttccatcatgtcacgcaatctcagagacagtcgacggcgctgcagttgcaattgccactgcaatcccagtcacagtcgcaggcctcgccgaagcgggccaccaacgtgtgcatagtccgcccgcagcaacagcagctggagaagatagccacctcggagtcctgccagtcgccggcagcaccaccaccgctttacgcccacactccatcgctgtggcagacgccgctgctcatagacaatgggcaaaagcaacagctcctccagcagcagcatcagcaaccgcaacagcaacagtccgttgctattgcgttggtcagtccgcccacatcgcccgcctcattaccttcgcccactctgccgcctgccaccgctgcagtgaccgccatggtggcaccgatttccgtatcgcccaagggtggattacctttgccgccatcgaagttccatcacaccacactggcgcaacatctgcagaaggtggagtgcttgaaaaaaaagaaatccttgccactggcctgccaaaacaacaacaataacagcaatttgccgaataacaacaatgtggagtcgcttaagaaaccggtggtgcagggaacgagctacaatcagactcatccgccaccgctgatggttttcaatacgggaacagttgcagttcccgcgcagagtccgcagactgctgctccacagaaacattccaccggcaacagcgtagatgacagcgatctcaacgagatacccgtcaatgttatcttcagaaagccgcaagaggcaggcggagcggcgaaaacaggtggaccgggaggattaagtgcacctgtttcgggaacgccgcaaactcgtccagctgaagtgaaaatggtgactcctctcacgccgcccactccaccagagatgagcgcaccgcccctgctagcgcaaatgcaacccccgcagatacccacgtcttgtgttccagctttagctcccagcttcaaagtgtcgtcaccagcagttctcagcccgaaggtgatctcaccagctcctgcaagcccaaagctcttgtgtccgacagcacccgcttcaacgaactcactgcaaattgcgccaaaagctgttccagccactacaacctcatctgcaccagcattagccacgaaatcagaacaaatgtcttccaaagtggccaatttaaacgccttcaaccgtcaagcacccatagcttcaaagggcgttagaaatggcatcactaacaacaataacaacagaaacagcaatgtcgttgcgaagaaatcgtcaccaacttcgatgccgcctccaaaggatccgattgcaccgattgcagcaaacgagttgacggattccgaacatcgtcagcgacgccgcaagcccgcctccgcctgcagacgcagcttggacactctgagtgagaacgagtccttttcagtggattcgccctactgcctacaacagcattggctgcactccggctttaataataagtcccacgacgcgccactatcgcaaagtaaccggcgtgaggatcgaattgctgttcgtaaaggagccctgaggcgacaagcgctgcagctactgtctacgcgctccctgcaggagcttcccatgcgagcggccaaacagcggctgcagtgcgtccagaacatgctgatcaagtaccaagatcacgctggccagcagcagggaattggaattggcaaccactgtctggtggccagctgcaagcagcccacgcttagtatggcagcgcactgcgagcgtcacatcgtgaacaacagcacccagcagcttttccagccttgcgtcgcctggcggatggatggaaccgcttgccaggctcctgtcttcgatgtgctgcacacattggcgctctgcaaggtgcacagccacctgcgttctggtatggatggagcccgtccagcatcgaaacagccgcccgttagtttaccagtcgctggagtggcgactctttatgtgcctgtgaagcagcagcgaaagcgcaaggctaatacgaatgccgtggctcgtcctcagaaacgtggtaggaagccggcgaatgaaccgattgctaaccagatcagcagccagataaacaaactgatacctggggcaggaatgcagcgtaaaagcagcaccacatcgcttgagtccattgccagtaattcgcaatcgtcggccacctcacactcacagccgccttacaagcccggaaatgtgttggccgctgtacctgcagcacagaacttgtcccaacggtccattcctccagcgctggctccgctcagcagtgattttcaacccaaccatcagcagcaggaaccgcttttggttcccaagttggaggtggattcattgtttaaatttgatgccgatcaacagcaaaatcagcagcagcaatcgactttggaccccagcttactttctttggacattgcgaatatcaaggccgaggagattagccaaattgtagcacaattggcggcggccggtggtgatttacaaaatcccaacaataataataacaacaacataggaatccataataacaatagcgtgcacttcaacaacaacaacaacaatagtatgaactacagcaacaataacaataacagtttcccctcattcaacacggcctttggcaacgccatgggccagccaagcaacacaattacgcacaatggccacgctgttccggcagtgctggccaatacggccgatcttcttggccaggacatgtttggtatttgcgagaacagctcggcatacgccagttccgaggataccggattgggcggtctcagcgagtcggagctgataggcactaacgatgctgatgatatagcattgaatggcgcccacttgctggaggagcacgatctggtaaatgtgttcgacacgctgtcagacgatgccttcaacgagctgttccaatccgtgcaacaagccgagtgcgaggctatggaccgggctttggaccgggccttacagcagacaatgggcggctcggcggacagcgcctttcttaacgatttcctggacgtcggcgacgatctgctggccgatgctgtgatgcactcaccaaacacgtccggcatcgatgctcctcccctctttggggacagcagcagcggcggtggcaatagcagcagcaacggcgcctccgacatccggggcttggtgcagacctaattccggcatcaggtcggatttatggcctacagaatttacagattcatttagagagacagagagagagattttcaagcttgatttcccattcacttttaggcagttttcgcttagaatttcggtattttctttttggccatttcttacctgcgattctagtttggcacaatgtttctatatgcagcttcaatgttatgcatgcattcaccagcagatatgcatgaataaaatagcattcaaaaaccatatagttatgcgttaatgtg

SEQ ID NO: 17391 - protein, 1200 aa, DROSOPHILA
MSCQQASRFHSATATATLAKSTATRRIATAAAAATATAIAAATAAAAAATLTPVESIAGKTTSEDSDPYAFTETVAVTPPILFNAQKSRARLTDSNRGSNKRQTAATAAANRKANLVAQLSVTEAAKAQASLASNNTTNFHHVTQSQRQSTALQLQLPLQSQSQSQASPKRATNVCIVRPQQQQLEKIATSESCQSPAAPPPLYAHTPSLWQTPLLIDNGQKQQLLQQQHQQPQQQQSVAIALVSPPTSPASLPSPTLPPATAAVTAMVAPISVSPKGGLPLPPSKFHHTTLAQHLQKVECLKKKKSLPLACQNNNNNSNLPNNNNVESLKKPVVQGTSYNQTHPPPLMVFNTGTVAVPAQSPQTAAPQKHSTGNSVDDSDLNEIPVNVIFRKPQEAGGAAKTGGPGGLSAPVSGTPQTRPAEVKMVTPLTPPTPPEMSAPPLLAQMQPPQIPTSCVPALAPSFKVSSPAVLSPKVISPAPASPKLLCPTAPASTNSLQIAPKAVPATTTSSAPALATKSEQMSSKVANLNAFNRQAPIASKGVRNGITNNNNNRNSNVVAKKSSPTSMPPPKDPIAPIAANELTDSEHRQRRRKPASACRRSLDTLSENESFSVDSPYCLQQHWLHSGFNNKSHDAPLSQSNRREDRIAVRKGALRRQALQLLSTRSLQELPMRAAKQRLQCVQNMLIKYQDHAGQQQGIGIGNHCLVASCKQPTLSMAAHCERHIVNNSTQQLFQPCVAWRMDGTACQAPVFDVLHTLALCKVHSHLRSGMDGARPASKQPPVSLPVAGVATLYVPVKQQRKRKANTNAVARPQKRGRKPANEPIANQISSQINKLIPGAGMQRKSSTTSLESIASNSQSSATSHSQPPYKPGNVLAAVPAAQNLSQRSIPPALAPLSSDFQPNHQQQEPLLVPKLEVDSLFKFDADQQQNQQQQSTLDPSLLSLDIANIKAEEISQIVAQLAAAGGDLQNPNNNNNNNIGIHNNNSVHFNNNNNNSMNYSNNNNNSFPSFNTAFGNAMGQPSNTITHNGHAVPAVLANTADLLGQDMFGICENSSAYASSEDTGLGGLSESELIGTNDADDIALNGAHLLEEHDLVNVFDTLSDDAFNELFQSVQQAECEAMDRALDRALQQTMGGSADSAFLNDFLDVGDDLLADAVMHSPNTSGIDAPPLFGDSSSGGGNSSSNGASDIRGLVQT

SEQ ID NO: 17392 - DNA, 7394 bp, DROSOPHILA
gtcggtaaaaccatgtaaacagccgcagcgaaagttcattgccacccaccacaccacccagccagcagttcccaggacacacacacccctactccaccccccccccctaccccctgttgcttgtcatttgctgcttcatatttcttcattgccataatgaagcccaaaacagaacagggcaaactgcaataacaagggaaaaaaccaaaaataaaaataaaggagcaaaaaaaggacatccatgcgagcaaagtaacacgtaaattaatcgcaattgcaaaagttatttgttaccccctgcaatttacaagggatttccccggggaaatggaaacagcacacaaaactcgagtggaagaaaaactttcggtggctctgaatggtgggaaaattgtttatttatcccttgcatcgctattgaatattcactctattacattttttatatgtatgtatatttttgttcatattgttaaaggtttaaatacatgaaggacacatcactatcactgtgcccaacacagcatcgcacttaattaaccaaatactcaagccaaaatcagtccaaagtatattgaaattgaattagtttcgtggtagattgaatagaattaaggaagctatctattggtagcagatttcagcacaaaagtttccaaggcgagggaaaactttatcatttccctctatgggtcatctacactgcactcaatatatttgtaataactaaatataaaaaaatatttaataaataaataaataattaaaatatcacaatactttgaaatatctttttacaaagaatattatttattacatataacagatagctagctctacgtgtttcgagtgtgagccagctttaatttttatcagccaagtccaggccaacaataaacgcataaatgaggtcaattcccaacaatcgataaaagtgggccaaatagaatgtataaatagtactatataagtctatataaatgtattcaaattgctgcagtcgctgaatgggcaacttgcgagttggcaatggcaaggaaattaagttataacacgcaatttggcccaaacaaacttgcgatgagacgtcgataaattcaattatctggcactggataaaacgttaatatccactgtgctgagctgtcgatcgcctgcggtttattcgaaattaattttcaagtggccgctttgaacggaaaagaccgaaagacatcaaatcaaagtcaagttgaaatcaacggtgggtggagtgtcgttcggacggaaaaaacaatgcgaaatagatggccaaaagggagctgacaatttaatttgccagccaggatgttcaaaggacgcaggacaacgaccttgccaagtgtccaagtgtaaccgataggacaacatggattacaatccatccatcctgaatccattaggaatcaaaaccgagcgaaatttgccgcacaatcaagagttaaagttactcagtgcgacactgcgagaaataagtgccaactgtacgattaaaccaatgtgaatattggtgtcttaatatcggtatatgttaactttgctatctgagttgtttaataaaacagcgacccaatttaagcaaatatgtttagtttttaaacatttattcatagaccaattgttattttttggctttatcaatcctattcgccatatactatacattaaccgtttaatgttatttgatttatagagctatagatttatatatcttttcttgattttagtcaaatttttaacagtctataaaaaaaaccagtccggttgaaaaacgggcttaattggaaaatgacttgagccgagaaggtgttttccgcagtcaggctcctcgggaaatgccagagacagcaaattatccgctttcccatggaatggttgagctgggtcggaatgggggttggtgggtggaacatagtgtggaaatggaacccattgaatggcagccgtaagccgcaacaaaagaggctctctggcgtctttgtcgccattgtcaatgtcactccggttgcgatttccgatttccgatttccgatgcccactgccgctgcacttgcccttaaggaatcgacaggtggatctcaggtgttgcgaccttgatccctgacgttactttggttatctacgagtagaacgatggtcgtcccttggatgtggattctccaatcagacaatgctcatgcttcaatgccaatgcaatcattattgtagcatacttttcagctgcgacttgagcaggaaatgtatagttatcctgttcctaaaatatattattccaaattgacttttttatattgggaatagataggaatttgttatgaatttaaactaaataattaattatatttactgattgaagagacccaatatatttgcagatagaaatttggcataatgaatatgtcgagaatgaccaatttagcattaactaatcggattttgttgctcgcaattaaaaactcattagagtaaattatagttaaaaccagattgcctgcatttgagataaaccttaatttaaatatatattttatgtaatactgtggcgcggcatattttgttgtgaacaatgaaatgcgttaattcgaggggtttggttcagcgaaaagccaatttaattgtggcattcgccacacttgtatatattttaattttcgatattaaatgaaatcttcgcctgcagttgtacaaattcattgaagagaattgaagtatctgttcggatatttaagtttaatccgataatgagccgagtggcactccataatcccgcacacctgtgcatccccattttcccccacatttctatccacatccccatccatatccatatatgcaacctttctgttatgagcatttcacacccaattaaatcgctaaggccagaaggtacatacgtcaactattaccccgggtcctttcccttatcctttggccaatttaagcacagcccgctggagaagagaagaagagttcattgggggcaataatggcgatgataatgactatcattgcgatgatgggggtcatgtgaggacgacgactgacacacaacccatcgctgctcgaatcgttaacaatttctgacattttgatttataaattccaaaccaacccaaccaacccaccctcgccaaagtctaacgcccatttcagcgcgtctattgttcctgcagctgtttctttggccttttttgtgagctcctcgccgctgcacaaagtgaaatttacgtttgatccccaaacgattggggcgggggcttttcgctcgaaaatttgcagcggcaaaaaacaaaaaaaaattggcagcggcagcggggtaaatggctggagaggatgaccaaaattgcttcattcaggccccccagagaaatgggagaaattataacgagaagggggtcagagttcaagcaaagccatgctcacggttcgatgccataaaatgttattatgcactcgagtgtgcaccgaatattccgatgtactggcgcgggaatccccggccatataaaccagttcacggcaaccccaccatcacaccaccaccaagtttcaattggtttaaacaatcgagcagtgcttttaaatccacaaaagcactctcctataaaatatgagaaatattgatatataataataatgtaagcatatatgtaggtgtaaaataaatgtttattaatttaaatcaagcaatttaaacacgcactatatctaatttaagatagaaacatcttgttgcttggtggaatgccccgtactaggtctttttctcgtttcgtattactttaaagatatttattttggtaacataagtaaatataaggggcggtgccacacccataatttttggtatcatataaaatatcgcctagtgtaacccaatacaaaaaaacagaaactaaatatctctcttcgttttgatgctattaattttggccacaaaaaggtaccaaaggtatcagcctaaagtggaatggtgggtgggatggtgattggttggatgatgggtgggtatgatggttgggtggtgtcatgcccctcagggtgctgcactccatatgcgtgcttgactgtggtgcgctggtgaagtgacgcgtgcggcgggcaaagaccattgaactttaacatgtcactgggtatgggaatggatggggatggagatgaatatggcatagccaatggccacgaaattagccattcaccattgaatggtatggaaaatagtggtatgtttagaaagaaccatcacatctgttggatatttgattgactacatcatagcccatttcgaccaaaaacgattgaacgattaaaagagctgaaaagtgtgtatttgtggagagtaatatttatttttccattcctcgagccttttcataaacattgccaacaagttaagcctgttttccaaagagattcgaaagagtcggatgccacaagatacatatgtatgtatttgcacctctacccatacagacccccttatctaaatgctggttcacacgcccattaaaataattttttaatatttattcggcacaaacaacctgattattcgccttatcacagtgcatatgagagaaaagaagaagaagaaaaaaacaaaaaccgaaagccagagagccacataaataaattaattaatgtcgaagcgcgaatacccttacaccttttgggttgcatattgttgatacaagtgtgaaaaatactatatcatattaaaaatttatggtttcttagttattaatatttacttaaaaccatattgaaatacatatttcagataagaaagaccacaaaaccaccgacaacgaaagccttttccataattgtaatattttcaaaagaaaaaactgatcatttatataccctaaccataaaaatcttcggtaaacttcattaaaaaataatatttcaagcaatttcatacgaacttaataaaaataatatagaaaatatgtcaaaagtggatttaaaatcacttcagttgctaatggactccttgagcagggaattgtccccgccaacaaaggagccataaagacaaagagagtatcaaacaataaagaaaaaaaaaagtataaaacaattcccccagcaatccgagcaccagacatcggctgctcgagctgcctgccacatctccataaaatctccgtagctgacagcgaatattatcgaaatgccacgcccagttctgctcattcacggtggagccggtgatatatcggactccaggatagcgggcaagttcgcgggcattaagcaggcactgcgctccgcctgggggctactgagtccggacaatggcagcggcggaggcagtgccctggatgccgtagaggcggcggtgcgcagcatggagctggacgagaacttcaacgccggctacggctcctgcctgaacaccagtggccaggtggagctagaggccagtttaatggagggccgcgacttgcgagccggctgcataaccctgctgcgggatgtgatgcacccgattacagtggcgcgtcgcctgatggagaagcagcgacacacctttcttggcggcgcagcggcccaggagctggcactagccacgggcagcgaacgactgcagccgggagcactggtcaccgagggggctcgcttaacgctgaaggaattcgaggatcaggtggcccagggcaaggatcccttcttcgcgcgcaccgaactgaccgatgacaagccggtgccgaaaacggatcccagtggcgaaacagtcggagcggttgccatggacgcatcgggccaaatagtggtgggcacctccaccggcggcatcaccggcaagtggccgggtcgcattggggacacacccattctcggcagcggcacctatgcggataactgccgtggaggcgtctccaccaccggacatggcgagaccctcatgcgttacaatctggcccagcgcattctgtccgccatggagtaccagggactgtccgcccaggcagccgccgacaaggagtgccgcgagatgaccaaacggctgggtggcactggtggcgccatcgtggttggccactccggtgacctgggcatcagtttcacgtcgcgtcgcatggcgtggggatatgtccaggatggcaccatcttttacggcatcgagggtcaggtggtgcaccaggaaccgttcacactttccacgtaactaaattcggagtacctacctatccaaggatttatcaaaatcccagtagaatagtaaacaaattaaagaatcttctttcatttcaaaaagttacataaataaatttgacttgttttaataagaagcacacgcatttgttttaaatagttagttcatttgatcaagagactatataaataaattaatgttgaccacactatttcttgcttatttgattatatccactgcttatttatttacacaattaaacatggataatcaattgtattcgtctaacgctaaaatacgaaaattgcacatttctatagcttatggctaggcaatattgcattataaaataaaattaaagccattaaacataaaaaagagctataaaacatctgttggctaaagatacaaactaaattcgatttagttaaaaaaaaaaaatgtgatcgattatgttctatagttgttattaatgaattaattaagcagtaaataagagagaaaacgtattacttctagcctaaagcgatccctgacttagtagaaatattgccaacgaaccagctgatgacttaaaactttctcatttctagttcgaggtaaagctcatccgttgaacgtctatgtgtgccggccgaaaacgttgtacacaaggcagagtcatcgtactggacggtggtcagtagaaggtgaacgcagtggtcagctgcgactggctcactggggcgcaacatcacgctgggattcgtgcgcatcggttagaccataacaatgcttggccgccggatcgcggtacttgttctcgtgctccacggagtgcgagttcgtgcggcacttgaccaggcacagctcgaagtggtccgtcacgctggcgaagatgtacttgggcgtgttgggcgcctgcaggacgcgctccagcagcggctgttgtccggggtgcaggcagcaggagacgcaatactcataaacaccgcaacagtgggtgctggtattgcatgtgcggcagctgtagtatccaatgccgggcagctccaggttgcagcagccgttggttagcacctcctcgcgtcggcacacgaatcctcgctcgtccgccagccattggcggccctggacagagttgcggcagcgtgcctcgggatcgccgcgcgtgcgattgagctgctcctccggcgccagaagctgctgcgtccacaggagcggtcgtgtg

SEQ ID NO: 17393 - DNA, 1681 bp, DROSOPHILA
tcgctgaatgggcaacttgcgagttggcaatggcaaggaaattaagttataacacgcaatttggcccaaacaaacttgcgatgagacgtcgataaattcaattatctggcactggataaaacgttaatatccactgtgctgagctgtcgatcgcctgcggtttattcgaaattaattttcaagtggccgctttgaacggaaaagaccgaaagacatcaaatcaaagtcaagttgaaatcaacggtgggtggagtgtcgttcggacggaaaaaacaatgcgaaatagatggccaaaagggagctgacaatttaatttgccagccaggatgttcaaaggacgcaggacaacgaccttgccaagtgtccaagtgtaaccgataggacaacatggattacaatccatccatcctgaatccattaggaatctcgagctgcctgccacatctccataaaatctccgtagctgacagcgaatattatcgaaatgccacgcccagttctgctcattcacggtggagccggtgatatatcggactccaggatagcgggcaagttcgcgggcattaagcaggcactgcgctccgcctgggggctactgagtccggacaatggcagcggcggaggcagtgccctggatgccgtagaggcggcggtgcgcagcatggagctggacgagaacttcaacgccggctacggctcctgcctgaacaccagtggccaggtggagctagaggccagtttaatggagggccgcgacttgcgagccggctgcataaccctgctgcgggatgtgatgcacccgattacagtggcgcgtcgcctgatggagaagcagcgacacacctttcttggcggcgcagcggcccaggagctggcactagccacgggcagcgaacgactgcagccgggagcactggtcaccgagggggctcgcttaacgctgaaggaattcgaggatcaggtggcccagggcaaggatcccttcttcgcgcgcaccgaactgaccgatgacaagccggtgccgaaaacggatcccagtggcgaaacagtcggagcggttgccatggacgcatcgggccaaatagtggtgggcacctccaccggcggcatcaccggcaagtggccgggtcgcattggggacacacccattctcggcagcggcacctatgcggataactgccgtggaggcgtctccaccaccggacatggcgagaccctcatgcgttacaatctggcccagcgcattctgtccgccatggagtaccagggactgtccgcccaggcagccgccgacaaggagtgccgcgagatgaccaaacggctgggtggcactggtggcgccatcgtggttggccactccggtgacctgggcatcagtttcacgtcgcgtcgcatggcgtggggatatgtccaggatggcaccatcttttacggcatcgagggtcaggtggtgcaccaggaaccgttcacactttccacgtaactaaattcggagtacctacctatccaaggatttatcaaaatcccagtagaatagtaaacaaattaaagaatcttctttcatttcaaaaagttacataaataaatttgacttgttttaataagaagcacacgcatttgttttaaatagttagttcatttgatcaagagactatataaataaattaatgttgaccacact

SEQ ID NO: 17394 - protein, 332 aa, DROSOPHILA
MPRPVLLIHGGAGDISDSRIAGKFAGIKQALRSAWGLLSPDNGSGGGSALDAVEAAVRSMELDENFNAGYGSCLNTSGQVELEASLMEGRDLRAGCITLLRDVMHPITVARRLMEKQRHTFLGGAAAQELALATGSERLQPGALVTEGARLTLKEFEDQVAQGKDPFFARTELTDDKPVPKTDPSGETVGAVAMDASGQIVVGTSTGGITGKWPGRIGDTPILGSGTYADNCRGGVSTTGHGETLMRYNLAQRILSAMEYQGLSAQAAADKECREMTKRLGGTGGAIVVGHSGDLGISFTSRRMAWGYVQDGTIFYGIEGQVVHQEPFTLST

SEQ ID NO: 17395 - DNA, 3577 bp, DROSOPHILA
gcgaagtgaccgtagagcggatcggcttcttgatgtgcttcgacacccaccagtcgttctccgactcgaaatagcacacggatatgagtcgggcgcccgaacccacagcgaacttgttctccgccggcgaccacttgacgcaggttgccgcccgattgatgcgcagcagcaccaacgccggcttccacttgccatcgtcgccctgcgtccacacataggcattacggtcggcggcacagctcacaatccgattggtgttcttggcccagtcgatgcccatgacgcgcagatcgtgctggttgagcacgtccgccagcttccagtcgctgccctcccggctgtatatgtggatctcatggttgttgggcgataaggcaatctctgcgaatttttgggagtgggtggtggtgagtcacactgtgccggatgagtaatttgggtcgcacttacgggttcgatccttgttccatgcgtggcaggtgatggaggccagcgaggtgccaaaggtgtatgtctcggccatcgtgggtggctaaatgcgctcggaatgtgcagtgttcgctcgtccaaatccaaccacacgcgtagtttcttcggttcggttcgccggattttcggattttggatatcgctgtgtagcaattgggcgttgtttccgctggattttagcttcgctctcgttttaatcgcggactctgggccgtcaacacgattaagctggcgttgctgggatggattctggctttgcctgggccggaagagtagagcgttgtggaaaaaactctttggaaaagtaatgcacaaaattaatcacccgaaattagagctggaacaaaaatcgatggccctcaatactatcgttatttcgttatatcgatatttttcgattgtttgaaaaatgctaaggtaccagtgctgttacgcacgttcggtatataccagagggaataatttggcgccatttcaatggtcacactaaacagaaaccatttcttgtaaacaaatttttaataactggctggctcgtaatttatttttgttattttataaaccgaggaagtattttcccttttgaaagcccgtttaaataacaccacttcgcctgtgggtagctgaggaaacttaaaagcagacgacagctatggaagccatctgctcctccttggagccgctgtttccctgtcgggaggcggccattgaaacgctgggcgagctgataggagattcgagtgagacatatccctcggcaatttacctattcggacacagtggaaccggcaaaacagctctgaccagagctttcctcaaagaatgtggaaaacggcaaaatgtccgcacagcgcatttaaatgccatcgaatgctacaccaccaagataatgctggagatcctgttagactcgctggcacccgatcaaggtgatgcgctgaaggtcgacaacatgctggactttgtggagcagctgcgtcggcaggccgctacacgcgtggaggatcagggatttctcatagccgtggataacgcggaaaggctgcgcgacatggatgccaatgtgttgcccgttcttctccgactgcaggagctgaccaacctgaatctgtgcgttattctgctctcccagctgccctttgagaagttctacaacaagaccggacttagtgaaatcgtctgcctgcacttggcgcagtacaacaaggcggagacacagcgcatcctgggatctgactttcagcaggtgcgaaatcaactgctggaacagttcgcccaggataagaagcgtctggagatttgccaggaagccgtaactgaagacttctacaacaactatctgaatctctttctgagcgtcttttacaaagcctgtcgcgatgttccagagctccagctgaccgccaggaagtgtctgtccacatacttggagcctgtactcgacggcactgtggatgccacggacatctcccggctttggcggcatatagctggaccactgcgttccgccttaacccagatttatatgcgaattgaaaaacccgcggaagaagttgaagatttcaccgccatagaagatcagagcgttcgcaagctggcgcagtcgctggagctgccctactatgccaaatttctgttgatcgctgccttcttagccagccacaatgccgccaagcaggacaagcgattgttcgtcaagcaccatggaaaacagcgaaagcggatgcagacggtcaacgccagagccaaggtgggttattcaatttttcgatgactccatttgcttattttaataccttttagaccacggagaaaatgtccaccactttgggacccaaatcctttagcatcgatcgtttgctggccattttctacgccattctagaggagaaagtcggtctgacctgcaaccttctctcccagatctcaactttggtgcacctcaatctactaagcttcgtctccggcgaacaaaacataatggaaggttccgctaggctgcagtgcaccattggcttggagtttgtcctgcagattggcaaggtggtgggctttaatgtccgccaatatctctgcgactttatgtagcccctggttgttttttttagtttttaaatatatttaataaatagtccggtacatcgcttatgtgtatggtctccgccagccttgtgtcccggctgcgcaactgcatcagtccgtttcttagcgtttgctcgtttataacaagtgtataaggtatgccgagcatatccgtttccagcaagtgctctgctaaatgagaagcgttcttcgtcgtacgaattccatccccttcagaaagtctaagaccggcgtggttgagaacatgtttcagatgctgacaaagatcagacaagtcagcagatagctcggaatcactttccacacaggcaattccacattgatatggcgccagaacgcggtgtaagagcagggattgcgagtcccggccatgatcacagccatccagaagcagagctaaaggataataatatagaaagattttcaaagatagttatgatgaccacttaccgcaggtggtagtttccagctctatcacagaccttatgacagtcggttgcacaatttcacccgttcgcgcatcgggcagccggaagtctttgtcgtccactattctcaccaggctcagttgctccacggtcacttctcctgcatcaccgtagctcgtgcggatatcgatggcttgatagtcgttgggattgagatcctcagccaaatcgcaaggtacgatgcggtagcgactgggattcgaggaaagacgcatccaccagatcttgctctcacgctgcatgttgtagaagtgctccagtgcgcgatgtggttccactaggaagtccgtggttaaatgtagcgtaggaccctttatcccaaatagggaattgctagtgggaccagaacaagtgctttgatgtttcagaagagtgggacatttggcctttcgaggatgatctttgacgagtttttggaaattgttacggaattgctggctttgtggaaaggaaaaacgctggatgttgactggatttatgggttctttcgtggcgcc

SEQ ID NO: 17396 - DNA, 1524 bp, DROSOPHILA
caaatttttaataactggctggctcgtaatttatttttgttattttataaaccgaggaagtattttcccttttgaaagcccgtttaaataacaccacttcgcctgtgggtagctgaggaaacttaaaagcagacgacagctatggaagccatctgctcctccttggagccgctgtttccctgtcgggaggcggccattgaaacgctgggcgagctgataggagattcgagtgagacatatccctcggcaatttacctattcggacacagtggaaccggcaaaacagctctgaccagagctttcctcaaagaatgtggaaaacggcaaaatgtccgcacagcgcatttaaatgccatcgaatgctacaccaccaagataatgctggagatcctgttagactcgctggcacccgatcaaggtgatgcgctgaaggtcgacaacatgctggactttgtggagcagctgcgtcggcaggccgctacacgcgtggaggatcagggatttctcatagccgtggataacgcggaaaggctgcgcgacatggatgccaatgtgttgcccgttcttctccgactgcaggagctgaccaacctgaatctgtgcgttattctgctctcccagctgccctttgagaagttctacaacaagaccggacttagtgaaatcgtctgcctgcacttggcgcagtacaacaaggcggagacacagcgcatcctgggatctgactttcagcaggtgcgaaatcaactgctggaacagttcgcccaggataagaagcgtctggagatttgccaggaagccgtaactgaagacttctacaacaactatctgaatctctttctgagcgtcttttacaaagcctgtcgcgatgttccagagctccagctgaccgccaggaagtgtctgtccacatacttggagcctgtactcgacggcactgtggatgccacggacatctcccggctttggcggcatatagctggaccactgcgttccgccttaacccagatttatatgcgaattgaaaaacccgcggaagaagttgaagatttcaccgccatagaagatcagagcgttcgcaagctggcgcagtcgctggagctgccctactatgccaaatttctgttgatcgctgccttcttagccagccacaatgccgccaagcaggacaagcgattgttcgtcaagcaccatggaaaacagcgaaagcggatgcagacggtcaacgccagagccaagaccacggagaaaatgtccaccactttgggacccaaatcctttagcatcgatcgtttgctggccattttctacgccattctagaggagaaagtcggtctgacctgcaaccttctctcccagatctcaactttggtgcacctcaatctactaagcttcgtctccggcgaacaaaacataatggaaggttccgctaggctgcagtgcaccattggcttggagtttgtcctgcagattggcaaggtggtgggctttaatgtccgccaatatctctgcgactttatgtag

SEQ ID NO: 17397 - protein, 460 aa, DROSOPHILA
MEAICSSLEPLFPCREAAIETLGELIGDSSETYPSAIYLFGHSGTGKTALTRAFLKECGKRQNVRTAHLNAIECYTTKIMLEILLDSLAPDQGDALKVDNMLDFVEQLRRQAATRVEDQGFLIAVDNAERLRDMDANVLPVLLRLQELTNLNLCVILLSQLPFEKFYNKTGLSEIVCLHLAQYNKAETQRILGSDFQQVRNQLLEQFAQDKKRLEICQEAVTEDFYNNYLNLFLSVFYKACRDVPELQLTARKCLSTYLEPVLDGTVDATDISRLWRHIAGPLRSALTQIYMRIEKPAEEVEDFTAIEDQSVRKLAQSLELPYYAKFLLIAAFLASHNAAKQDKRLFVKHHGKQRKRMQTVNARAKTTEKMSTTLGPKSFSIDRLLAIFYAILEEKVGLTCNLLSQISTLVHLNLLSFVSGEQNIMEGSARLQCTIGLEFVLQIGKVVGFNVRQYLCDFM

SEQ ID NO: 17398 - DNA, 2653 bp, DROSOPHILA
ccataagcggacactagagcgtaagagaaaggaagagatcagagatactatcagatatcggcgggaattatacaaatatatatgtgtgtatatataattattgcgatgtatttgcttgccgccttcgttgtgcgccgttctgtgctggttcattgaccggatcgctcggacaccgctcctctgcaaaatgcacctgttttcttgcacacctgactacgtcagcgtcaagagttgccaaaacgataataaaagcaaagggtagggcgaaaagtgtggacacacaccgcaggaaaaacactgccaattcccatttaagatctgatatagagccagcccagagtcatgcattctttttttaactcaagatgcaaaattcgttctaaaattagttgttgaattggtggtcatactagtgagttaaagatagtaagcacatgatgctgccatataaaaaaaaacgaattggaacatttctcttcctttccgaagaatctacttttgctagcaatatttttttcctgtgcattggcaggccagcagaggtaagtaaaaaagaagctctaccttaattttagaaccagacggaactgaactgaaattattacacaatatgcaggcgcagatacataattctgccgtttgtagattctatttccccacgttcctatgaccatttcacatgctcactctttttgttttgttgctcttcgctcttcgttcgctgatggcttgtgcaacaaaaatagacccaacgttataaacaagaatgaaaaaatcaagcaacagggtaaaacctgtaagtggcagcagctgtgttttcgatgataatccgcgacatttgatattccaacactccatttctaatttccaaaaaaacatgtggcgagagcaaagatacttttcctttctattcgttgactaattgtgcaaacgcaaaaaaaaaagttgtcggtcagttaaactgacatgcaacaaatttttctaggccaacttctctgtttcatccaatgggcttactagtataatagagtgcccgttccgccttcattctcgatgatgatgatgacgatccctgaaccatcagcacattgccatcgacccgatctctatctctatctccatcttcatctacatcccgcttcacatccaacagcaccgtgtcccaggcacttttgggcaggaatttagagatgatctgatggccagcgtcgtcgtcatccgcctgatcctgattgccatttgttggccaatttctgacacgatgctggcagccaatttgcgccaaataattgatgtaatgaggcggatgatggtgattgtggtggccgttgtgcggatggtggttcaagctgctgctgctgctggtgatgatgctgctactgaagctgccaccagctgctgcaccaaccacgaatggcgcccaatccgcggtggccttgtcaaccggatcgccgccattcattgactgccaataaaccagggccgtcgacatatcactggcaatcggaatcgcaatcggaatcgcgaacgcactttgcactaaccgcttccttttttcaatcaaaatgatatgcttatttcgtttatttttatatagtttatttaagtaatttaagatccatttggatctggctgtatgaagcgcggtctgtttcgtgtgaaaattcagcgcaaactgcctcggtttttgttcccccagttctgtccccaaagtttgccactcgtcgttgttgttgttgttgtcgtctgttttatttatacggaaccgtgttttctccctgctcttttatttcacttggtgtttttgcacttttttgctgcacttatgcggaacacacgaacgaagccgagcgccgatagcgagattgcagcaacgatcatcacgatctcggcgtggtaatgatcatgaagctaaagtagggaatgcccggctatctggcatcggaattcgctatattaacactacactagactcgttcagtgttgcacaattgcatttgagtaaatgggaaatagaaaaatctcttggtgatatctcttggtcaaatccatacctttcgacctttgtttcggagtgcacatctctggtgttgaagaagctcaactgattgaaacagtgttgggtaaatacctttcagtatctccatattgatcacagagttacttgcacttgcttgtgattaaccacaaacgaataaatcggttttcttaggtattctcccccattattgttggtgaaaagctcacttctggctggccttttgttttctatcacaagtgttttttttgacagagggagttccgcttttcgttgataatggcatttcaataatgacatgtagcgtagtgacatgtagcgaatgcatgtggggtaaatgggggaacgctgggtggttgtgggtgggaaagtgctcgcacttgtctcgtgcgcgcaaagatacaaatatacatacatacatacatacatacatatgtaagtatgcatttctttgtttcggcttttgcgtcgtcggcaagtcaaggaaatcaaaacaaagcaaacgaaatgtgaaattaaaataaaatgtaattaaccccaggcaaaaagtgtgtgtacataatgcagtgcgttacaaaactgtataactggttgagctgccacttggcagagtgg

SEQ ID NO: 17399 - DNA, 653 bp, DROSOPHILA
aacagaccgcgcttcatacagccagatccaaatggatcttaaattacttaaataaactatataaaaataaacgaaataagcatatcattttgattgaaaaaaggaagcggttagtgcaaagtgcgttcgcgattccgattgcgattccgattgccagtgatatgtcgacggccctggtttattggcagtcaatgaatggcggcgatccggttgacaaggccaccgcggattgggcgccattcgtggttggtgcagcagctggtggcagcttcagtagcagcatcatcaccagcagcagcagcagcttgaaccaccatccgcacaacggccaccacaatcaccatcatccgcctcattacatcaattatttggcgcaaattggctgccagcatcgtgtcagaaattggccaacaaatggcaatcaggatcaggcggatgacgacgacgctggccatcagatcatctctaaattcctgcccaaaagtgcctgggacacggtgctgttggatgtgaagcgggatgtagatgaagatggagatagagatagagatcgggtcgatggcaatgtgctgatggttcagggatcgtcatcatcatcatcgagaatgaaggcggaacgggcactctattatactagtaagcccattggatga

SEQ ID NO: 17400 - protein, 163 aa, DROSOPHILA
MSTALVYWQSMNGGDPVDKATADWAPFVVGAAAGGSFSSSIITSSSSSLNHHPHNGHHNHHHPPHYINYLAQIGCQHRVRNWPTNGNQDQADDDDAGHQIISKFLPKSAWDTVLLDVKRDVDEDGDRDRDRVDGNVLMVQGSSSSSSRMKAERALYYTSKPIG

SEQ ID NO: 17401 - DNA, 12222 bp, DROSOPHILA
tcgctaacgttaactattcggattcgacattcgacgaaatgaaatcgaagtgtcttcaatttgaaacctcaactcaaacacacacacaacttgaacacttagcacatgaaaagattttgaaaccgacactctagcctagcattttagtatgcatttttaaatctattgttgctccggtgcttggtgcgcataaaaaatgacattgcatattcctagtgctgtgcgaaatagttagaaatagtttacctagcaattgccaccgttctcaactttcattcaagcggggcttagtttttgattaacacaattttgatgacaccaattaatgcagctaatatgacattgaaaagcttaggaataagcaattaataatactagttcgaatttagtggcaatgggaacatgatatttgactgatatttgcggaataaactttcgtatcttttttttgcattatcaagaacatcgttgcgtttgctaactacacattttcgactcatcatccatcaagttcgcaaggtgattcgttggctatataaataggtacattatagttagttatagttattaggtatagttatagttataggtatagatatctataaattggctggcctaaaatgttgatcatcgtgtaaatatgacggctatcgttatttctaaagcttttacttccttatcgtcgttactacttcattgtggtattcttattctctgttcgaacattttgtggctgcgttgctttcgttatgttaacatttgcgtttcaactagggttaaatatctaccagtacaagtacaataatatgaatataaatcttaaagctttgtttctatggaaatacgcattcccttccatttcatttcattcgcacaaccctcactcgacgtgggacgattacaagttaagaacgagaaagaaaaaaaaaaataaaacaaataaaagaaacgcacatatacaacttaagtggctataaagtttcttagaaatgtaagcatgtacactcagatttatatatttgcaatatatagttgtaaacaattgaaacgttaaacattctcacacaaacattgctgcttgctgtggattttgtaattttccggtgattggcacaaatgtttcgagcagacgacgcaaaaaaaaaaaagaaaaaaagaaaagaaaataaaaggaaggcaaacaaaataggcttaatcacgaataaaaacaagttacattttaaggtatacatttaactaggctacgatctagctgcaattgttgttgctgtgactggcgacatcggccacggcctcctcgatggcggctcctcgaatggctccgcctgcagctacagcttctccagttccagttccagttccacatccacttccacttccagttgcagctccatttcctgctcctggcaattcagcaatggctgccgctgtgggcgtaatggccttgggtgcaaagtaaacctcgtagttgtaatatcaaagctcttcgctggccaatttctgctcctgcacatactccttgggaaagtagcccacctgcaatgcaacgcttcagtaacaacctatcttagttggattgcactgtgtgcgctcagctcaccgtatcgccgattttgccacgccaccagcccttgctgtccccatccttgccaatgaccagcacctggcagtcagtgcgcagctgcagctgattgctgcccgcctttggttcgtagtcgtagagagcggtggcgatcacctccttgtagggccactgcagcgactgattgagcctgcaaaccgagagagtcgtgatcaatcgaatagcttttactacaatatttgcttaccccgcaaagttctcgcccagatcgttgcgttcataataggagaccagctcgacaatggtcttgaaatgccttcgcgaggataagcagtacagcatggagtcgccggagttctcctggttgattttcatgtgcttgatcacattatcatcggtcctgttggatggaaaaaaaaaaccgtaaacgatgattccaatgcagatctggccaaatagtgttaactactcactttaggctaagcgcatacatcgtctcgtgggcagtggatgggccctgcggacgaactcgcaacaggtaggtgcctatgcgccggttctccagccggtgggccgccgtctcccgatccatgttgcccgcaaaccaattgaactcggacaactgacgatcgcagacgggtggcggcacacttaccggattctgtttgcagcgacccgtcgacgagatgcagcccttgtgcacgctgatctggcacaccttgcatcgatagccctggtggatgcggcccttgaggaacttggagcagtgacggcacgttgtcggggcgtcaaacgtgtagatctccattttgtggtctgtgctttggcagccaggcggttccaggctttccctgtatatcgtattcgaaatcggttaagtaagtgcatttcgatcacgctacacaatcatcacttcacttacatggcctcggtgagcgccttgcgccacttgtcccgctcgtgctccgatttcaggtacaaagtgaaggctgtcttgcccgacttgcgggccaggaggagctggtacttgaatcgcgtatcgcggccaatagtgcgtcgcgaatggctctgctccacgcgatagtcggccaggttgtgggagtcgcggtaggtgtactgcatgtcgcccgtcttgatatgcagcgccttcaccatgatgaggatcttgtcgaaaacgaaggcgtatcgcagcttggtcttctggtcctcgtgcgccttaatgtgcagctcaccgtcgagaagcaggcggccgtactgcagcagatcgctgccgttgccattctgcagcagatgaatatcgcagatgctgtccttcaccttctgtatgatgaccaggtgatcggagtcgcgtttcacctcgttgatatattgcgacacgtctatcatcgcctccttggcccgctccagcgagcggtaatcgtcgtgcagcggcgatgtctccttcaccagcttgtccagcagcagatggtacttgagaatgcgctgcatgggcactgagagtatgtcacgtagctgcagtttgcccacattgtagtcccgctcgcacttctgcaccagctgatcgatgatctggttcttcttgcacacatccgccaaatagtcaatggcgcccagcaggagggagcagaactcgccgtagatgaggaagggttcgcggaagtcgagaaacacctgggccatcttcactttggcattgggcgtcagcgattcccttagtttgtccaggaactttgtatggatgtcgaccagctcctgaagcgcaacatggattcatgaagtttttaaggtgaacagaataaatcacaggcagctgcaactcactctgatgcgcgggaatatgagacgcagctcgtcctggttgagatgccgctccagcggacccataaacttggtcttcagcgcagtgagaacgtccaggtaattggactccgtgtcgatcagctcgcggatgacatagtcgcgctgctcaaagctcgtcgacgaggcggtctagaggggaaggaagaacatggagagcagggagttagtacggacacgattccggcctaagtgacggggccaccgaagtgtctcatgcatggacaggcggtttggtacgcaattctacctggcttctactcgtcctgtgcagggcgcacaggtcttggtacacctcctcctcttttgtgttggtgtggtcgtaaccggttccattgcatgcaatattgtcggtggtactaaacgaaaacgaaacaaaggccagaaatcataaaataaacaatgcaaaatcataatggacattcgagcagaggtaaaacaataaatgagtagcaaaacgatattcaacagttgttttttttttaagctatttcctgcctgcaactataacatacagttgttaacaatagattatggaggagtattaataaaggaactgaaaacacttttttttggcaagtttaaaatttctactgagtgcgccacatattgaaactcgatagaccgatagtcagtctactctgtaatcgatttccccaccgttagccaacacagcgctgttacgtccaacaggcccaccgccacagcagccctggcttgccagtgccagtgcagccagggctgcatcgccatcaagaacatctgtggcagaacaaataaaaaaaaggaaaatactcgctgtgtattttcggaatttaatttggcaacttcccccctccgaattcagcgacttggcctgctcgcaccgcctggacacctgctactgcagtgctcgcaacatggaccaccacacgtacgccaagagcggatccaagaagtgtaagcaacaaccacagcacgtgctcgctgctccaactgcaacaatttttgcattcttgcacttttgcacttttgcagggtccgcggaagagaagcgcaacctggtggtgcagcggatcgcggcggacgagctcttctcccgctactcaccgaagcacgcggagccatggaagtgagtttcttggggtttcttggttatcaaatccacgaggagatcgcggccaaatccggacattttggccatcgaagactttgtttggtttgttttgctttcaatagagtggcaaaagaaggtgccacaatgtccagatcagatattaggttaaaagcttggttataaacacaacgtaggtttcattgtgattatcattattaattgaaattataactttttttgaaacctaatccatttatagagtcaagcttagaagctcaaacaactcattcttaatgtgtgttcagcattaattaggcactcttgaaattcccaactagttttactaattgaaactttaaaactaagaaaaaataacaattggcatgtacttgattcagtttcactacctcaaattttaaatatagcaaattaaaagcttcgattgctatgaaaactaacccaattccattgacaaacagaaaattcaaggaaatggccaagatcggcgatttcagcgagattgcgctacgcaagcagtggttctccatggtgcagcggtaccgcatccacaaggccaacacactgggcgtcccactcaacaagcagagcatcgaggagctgaacaaggaatgggagtttttcggcctcatccacgcctacatgaaccagaagaccgccgacctgcactcgtacgcgctcaaggagccgaatgtggagcagccgaacaataacctggccatcgccagtgtctactcctgcgacgaggcgcaactctcgccactcatgctgggcgtgctcaatgaccacaactttggcgaacgctcgccgcccaacggatgcgacaccgatgacatggacgagtccaacacgtcgccctgccacgggaacagtggccacagcaacaacgatgagctggacaggctgctggccgaggcgacggcgcgcaaggatgcggcagttggcgacggcgaggatgtgtgcatgctgagcaacaccaactgccacgaaatggaatgcggcccggtgatgattggcggcgaggtgtcgctatccaacagcagatacaacgacttcgaggaggcgacagtgcccacggcaacggctgtgaagagcgagaagccggagaagcctatcccgaaggcgcgtaaattgttaaggaaacaccatcgcaaaggtctcagcgaaaaggagaagtattacaggtgtgtgctacctacacggtgaatcccgtttgctgctaaagattaatcgtaaaatcccctttgcaggcaccgccgtcgctacgagcagcgaatggagaagcgtctgatgggactgtgcaccgtggtgggacaactgctgaagcagtttgctcccgacatggatgtccagccactgttggccctgggcagcgatgtgacgctcagctcgccagcgccaagcagcagtgacgaggagaggagcgaggttctggaggagacggaggaggatcaagagctccagcaggagcagcagcagatgcagctggagctggagcaacagaagctgggagtcgaggccgatgccatgacactcagagtctgagcgaacgcatccgagtgcttctctggtcggtcgcctgcttgtttcagggttcaagtgcaagttcctagctgtgttgcttcacaatcaacaaacaaaatatcgtgtgggctctcaaatgactcccaccactgcgcttcgtcgtcattacgcggacaaccgtccacagtgattttccgctaaagaatagggcgtgcacagcgccgcatagatagacacgtacgttcgttcagtgataacgaaagcataatacgttaatcgaaagaacgaatgtaaacgcattagataaaccagaaagcaaaccaaatacaatacgtatggcaatgtatgtacgaaactcaatgtaaaaaagtcaatgggctcaatgggcgtcttagtttcttagtcatttaacttaactaacgcgcaactagtagcagcctgcgctataaaaatgatgtactaaagaaaaacacagaaatcaaggtggcataattaacataaagggaattgggatataatttttggtaaaacccaaacggacgagagatagtggggcatgttgttaatgggatttggctttcaatcggccgtgctccgtattccgtgttccgtatatcgaccttatcgcaccgcatccctgacaagctgacaagcagaagctctcggttatggatcggtgtgttcttgccccaccctccccaccatcgccatccacgcgctccgatgactgtaccgcactactttcgcgcagcgcagaaactcggtagtatcggtgtaaatacgcgtaaggcggtgatgggcggacggcacttccatagccacttccggtggctatgtttggcccggccttcgatcggtgtcaagttgggttcgataacccagcgccaccgctgctccgttgcattcccgttatggaacctctggtggcggccttgtaggaaccgccaggcggaatcagaatgggaatgccgcagacgcagcgatacagttatctataggcttggggatgcgggctacgtcggtggtggtggtgcgcgttagtgttagtggttcgttgtggttagtggttaatggttagtggagtgagagtgagctcaagcgcaagcaagacaagcagtgcagggcatggattgcataggtctacagagaggaatcgaagggattgtggggcatggcattcgagggaagagcaaggatcgggcgcggaaggaagaagaggttgagggatagaaagaggccagaggaggctgatatctaagaggctgttacacatgacgatacacgggggtggtttgagttctaacaccaaatccgaggagcagaaggtaatctctgttcatgttacgtttcctttccacaatcaaagaagattactacatcgtagctttgattgggtgaaaattgaaaggagccaattaaattgagcccatacactcgtaagtggcttaaagattactttccgttccaaggacccaaacaccatctccagccagacaaggaaacacagctgcgtggaaacagataatttctatgcaaaacatttgggtttgcatggaaactccgttgctacacagcgcgtctcgttgggatttggccacgcttgggatgcgttttgatagtagcatcccaccccgctggacacaaagacatttaatatgttggacagcacacctcgggtttggccttcgcctggaaggtaacgtagcacaaatcctcgtagaccttctcgtcgtcctcgctgtagatgtaggcatactcgtgctcggtggacgccatcgaggagcggtagttgtagacggcggcggccgctcgctgcagccgctggctctcgctgaccagaagcgacgacgatgaggaggaggtggacaccagacggcccataggtggccccggtgcagcggacacaggaacgcttggcgctgcggcggccaacggtgattgcgattggcgggcatacgattccggcgtgggtgtgaccgcattggatgcgccatccgtcgtggagctaaccacatccagggcgagatcgaaggatagctcgcgcacatggctgccctggcagtcggaaagcaggggcgtctcgacgcccgcatcctccgcatcgttgtcgatggtcgagtcgcacatattggagagcgagtcctcgatgtagtcgtcgatgtcctcggtgccgttctcgatcgtaatatcgctattctcgtccagcgatccgctctgcgacgttcggtcgtagtattccgccgacgaggaggcggaggcgtctatgctgctcgtcttccgcatgttcagatcgctgggggagtctccccatatgccaaacacacacgcacacacacgcacgcacacgcacacaaagcaacaaacgcacacattcacataaagggttagtgtgttagacagagataggagacagagagaaagagagagagagagagagagagtgtgttagatagagttggacacggagatatcttggaccgacttcatcgccttgcacagagaactctaccgatctcccgagggcgaccattcgatatggacggctagatatcaggagtaatattagtttcaaaagttcagcgatttctacggtttttgttcgattaaatagcgcactttaaggtagcatttcttaaaagcatcacacagtttcaggcaacttttgatgtgtattttcaatactttcttactttcgttcatgggattttacagggagcaaaacaagagaatattttggaaatgctatttctttcatgtgcgcgataagcaggctgtcatgggcttatagacttgggaccggtcagcatgtgagcgcataatgagaacgggtattcgtgtggcaggggcgtggacgtgggcaggggcaggggcagggtcaggggtttgcaatggtggcgcaggaaatgcaggcacatcgcccgctcatggagagcagatcaagatcaagcggtggaatacgcaacatggctaagggaacagtggacagggacagggctctcgcccaacaaacgcgtcaactcacgtggaatgcaggtccttgtagatggcctcgtccgaatgggaacgctccgtgggcgaaagctgtaggttgaagccactgaaatggtaagcaattgattagttggttggggttactattgatcggattccctctatttctaaaaattgaaatacgtaagtgtctaaaaatataattcaaaaagctatatttagcaattgtaatacaatataataataatacttgtacgcgccaaaacaatgttatacatctttatagaaattccgattcagcatattgaaatgaacatgtatatatttgcaagctggatggaatgatttacttcatgtgttattttgaaaaccattccgtgcaggtatttccaaaatgtacatatatgtatatgtacacatatcatttgatttatgaatttttggaatttttttttttaatgaatctacagactacaactgaaaccttttctttaagcatcgaaaactataatttcaattgtgtttccacaatgaatttccctttgaaccaccagttgctcggactggcatctatgccattcgattctgaatggtatgaacagaagacccaattgtttgctagtcgggatggttaactaactgggtatcaatgtgggcaatcggagcactcacataagatccggatgcagttgctgcaccttgcggcactgcgacaacttggagagcgtgatgaggacacggtggaagttggtcaggtcgtacagcattgtcggctcgaagagatcggcgtcccggatcccgaagttgttgtggcacacgtccaggaacaacttgatgttcttgctgcacaggaactgcaatggatcaattaaattcaattcaatttaattacgtgccattctaattgtatttggcattatattatatttcaggtcactctcactcaaaacagacgtacttaaaaataaaataataaatcatattgttcaataatatttcactctaatttggcatactgaacaaaatatgggatttcggagaatttatttcggcacattttaaacacattttcgatcgaattcgttaaattattacagtaatttttctctggaaacgcatttatttcattttatatatatttatgtttattatttatttattcacacatgcaaattcgtgcataaatttggcatattctatttctttatgaatttatgatgttttggccaattattgtcactaattgtaagtgatgtttgttttaatgatttaaattatttttacagatatacttccccctatttctctcagtgttgcttgtttacaaggtttagagtgtgccacccattcacaatttgccagcaaagtcacttgcttctcgcatttcactcacctgtgccatttgcggcttgcgattgaactcgcgcggatccaagctgctggggtccaggtggatgaccaggttgcagagcagcacgccgtcgcgcagcgtcatcgccaggatgcggatctcggcgtccggctgggcggccttgtggtcgggcggaatgaccttgcacctggtcagccaggcgacgcactcgcgccacagatccccgttcacgccggccacgcccccaaaactgttgctgctactgctgctggccatctcgcagtggttgggttgggtattactatatggattgggatttggttttcgtttcggatttggaggaggggttgcgggtggggcgctggcgttggcggtgatggtgtgaagtggggcgcgggcccaactggcaagtgttggaggggggaggaggagggtgggtgggtgctactcgcgtcgcgttaatggacacaattgagactcatcagttggccgttgcgattggattggtgaacccgagcacagatacacagagcaaaaacggaaggcaatgaagagcacaacactagccaacaccacacacaacaaaaacaacgatttcgggacaattcgagcgtagtggggtgtatcgcgttcgcgaagggctcaccctgtgcaccggatacgcgcgaacagtgcttgcggctgccgagttgctcagaaagtgctcgccactgtggttttaaaactaatttactttattgcaaaatattgcgtttatcgaagaggaagagcatactcgacttcgataacagtctgggcggccgtgtaaccgcttgcggctccttcgaaaataccaactgcatgtgtggtatttacgatatgttaatagcattgttactttgtgacgaaaattaattgtgcacctcggtatgctttaatataacaagttgatgtaaattagtaagtagagtaaatacacatgacatatattgactccaaaaaaaaagtcaccaaataatcttgcagaagaatattaagtaaattttcccttacagtatttgttttaatttcgtaatttataatcatataaaatagttctacgataaggagaattcctatctgggggtaattcagctgtcctcgaatttctcaggtaatattttgaatatttccgttcaatttttataattagtgcacaagaaattcattatattacagacactagcctttcagaggaagtaagcaagcaaaattgtatgtcaaatgtaaatgtaagatgtaagtgtaaaatgaaatgtttttcattgaaagtcgcgtaaatattccaaattctcgtgcccgcggtggcgcttcgtagttggttttttctcctgcgccgacgacggtcactttaaagcggcgagcaataaaaaaaatgtaaattgtgcagcaagtgaaattgaaaagcaatatatttaagtgtgatctgtgtgttgtggtgtgtgggtgtgtgttcgacatacagctaataggcgagcgggcgacggcgccgcacccgcctcgccacgcccccatcggcgaatcgaaaaagaggcgaagcaacgcgatggcctcccaacattccagttggcgttttggcaagcggagcaaattacaattacgcatcaaaggtaatgtaacgaatgtgctaattgacatcaaacacggcgacggtggcatcggcataatggcgcaatcactccgttcgacgttttgtctcacatggctcgccccaccgacccccgccattccattcagtttgcattattttgcattacggcgagg

SEQ ID NO: 17402 - DNA, 3541 bp, DROSOPHILA
aagtcgagtatgctcttcctcttcgataaacgcaatattttgcaataaagtaaattagttttaaaaccacagtggcgagcactttctgagcaactcggcagccgcaagcactgttcgcgcgtatccggtgcacagggtgagcccttcgcgaacgcgatacaccccactacgctcgaattgtcccgaaatcgttgtttttgttgtgtgtggtgttggctagtgttgtgctcttcattgccttccgtttttgctctgtgtatctgtgctcgggttcaccaatccaatcgcaacggccaactgatgagtctcaattgtgtccattaacgcgacgcgagtagcacccacccaccctcctcctcccccctccaacacttgccagttgggcccgcgccccacttcacaccatcaccgccaacgccagcgccccacccgcaacccctcctccaaatccgaaacgaaaaccaaatcccaatccatatagtaatacccaacccaaccactgcgagatggccagcagcagtagcagcaacagttttgggggcgtggccggcgtgaacggggatctgtggcgcgagtgcgtcgcctggctgaccaggtgcaaggtcattccgcccgaccacaaggccgcccagccggacgccgagatccgcatcctggcgatgacgctgcgcgacggcgtgctgctctgcaacctggtcatccacctggaccccagcagcttggatccgcgcgagttcaatcgcaagccgcaaatggcacagttcctgtgcagcaagaacatcaagttgttcctggacgtgtgccacaacaacttcgggatccgggacgccgatctcttcgagccgacaatgctgtacgacctgaccaacttccaccgtgtcctcatcacgctctccaagttgtcgcagtgccgcaaggtgcagcaactgcatccggatcttatcgatctgaacatgcggaagacgagcagcatagacgcctccgcctcctcgtcggcggaatactacgaccgaacgtcgcagagcggatcgctggacgagaatagcgatattacgatcgagaacggcaccgaggacatcgacgactacatcgaggactcgctctccaatatgtgcgactcgaccatcgacaacgatgcggaggatgcgggcgtcgagacgcccctgctttccgactgccagggcagccatgtgcgcgagctatccttcgatctcgccctggatgtgtaccaccgacaatattgcatgcaatggaaccggttacgaccacaccaacacaaaagaggaggaggtgtaccaagacctaccgcctcgtcgacgagctttgagcagcgcgactatgtcatccgcgagctgatcgacacggagtccaattacctggacgttctcactgcgctgaagaccaagtttatgggtccgctggagcggcatctcaaccaggacgagctgcgtctcatattcccgcgcatcagagagctggtcgacatccatacaaagttcctggacaaactaagggaatcgctgacgcccaatgccaaagtgaagatggcccaggtgtttctcgacttccgcgaacccttcctcatctacggcgagttctgctccctcctgctgggcgccattgactatttggcggatgtgtgcaagaagaaccagatcatcgatcagctggtgcagaagtgcgagcgggactacaatgtgggcaaactgcagctacgtgacatactctcagtgcccatgcagcgcattctcaagtaccatctgctgctggacaagctggtgaaggagacatcgccgctgcacgacgattaccgctcgctggagcgggccaaggaggcgatgatagacgtgtcgcaatatatcaacgaggtgaaacgcgactccgatcacctggtcatcatacagaaggtgaaggacagcatctgcgatattcatctgctgcagaatggcaacggcagcgatctgctgcagtacggccgcctgcttctcgacggtgagctgcacattaaggcgcacgaggaccagaagaccaagctgcgatacgccttcgttttcgacaagatcctcatcatggtgaaggcgctgcatatcaagacgggcgacatgcagtacacctaccgcgactcccacaacctggccgactatcgcgtggagcagagccattcgcgacgcactattggccgcgatacgcgattcaagtaccagctcctcctggcccgcaagtcgggcaagacagccttcactttgtacctgaaatcggagcacgagcgggacaagtggcgcaaggcgctcaccgaggccatggaaagcctggaaccgcctggctgccaaagcacagaccacaaaatggagatctacacgtttgacgccccgacaacgtgccgtcactgctccaagttcctcaagggccgcatccaccagggctatcgatgcaaggtgtgccagatcagcgtgcacaagggctgcatctcgtcgacgggtcgctgcaaacagaatccggtaagtgtgccgccacccgtctgcgatcgtcagttgtccgagttcaattggtttgcgggcaacatggatcgggagacggcggcccaccggctggagaaccggcgcataggcacctacctgttgcgagttcgtccgcagggcccatccactgcccacgagacgatgtatgcgcttagcctaaagaccgatgataatgtgatcaagcacatgaaaatcaaccaggagaactccggcgactccatgctgtactgcttatcctcgcgaaggcatttcaagaccattgtcgagctggtctcctattatgaacgcaacgatctgggcgagaactttgcggggctcaatcagtcgctgcagtggccctacaaggaggtgatcgccaccgctctctacgactacgaaccaaaggcgggcagcaatcagctgcagctgcgcactgactgccaggtgctggtcattggcaaggatggggacagcaagggctggtggcgtggcaaaatcggcgatacggtgggctactttcccaaggagtatgtgcaggagcagaaattggccagcgaagagctttgatattacaactacgaggtttactttgcacccaaggccattacgcccacagcggcagccattgctgaattgccaggagcaggaaatggagctgcaactggaagtggaagtggatgtggaactggaactggaactggagaagctgtagctgcaggcggagccattcgaggagccgccatcgaggaggccgtggccgatgtcgccagtcacagcaacaacaattgcagctagatcgtagcctagttaaatgtataccttaaaatgtaacttgtttttattcgtgattaagcctattttgtttgccttccttttattttcttttctttttttcttttttttttttgcgtcgtctgctcgaaacatttgtgccaatcaccggaaaattacaaaatccacagcaagcagcaatgtttgtgtgagaatgtttaacgtttcaattgtttacaactatatattgcaaatatataaatctgagtgta

SEQ ID NO: 17403 - protein, 852 aa, DROSOPHILA
MASSSSSNSFGGVAGVNGDLWRECVAWLTRCKVIPPDHKAAQPDAEIRILAMTLRDGVLLCNLVIHLDPSSLDPREFNRKPQMAQFLCSKNIKLFLDVCHNNFGIRDADLFEPTMLYDLTNFHRVLITLSKLSQCRKVQQLHPDLIDLNMRKTSSIDASASSSAEYYDRTSQSGSLDENSDITIENGTEDIDDYIEDSLSNMCDSTIDNDAEDAGVETPLLSDCQGSHVRELSFDLALDVYHRQYCMQWNRLRPHQHKRGGGVPRPTASSTSFEQRDYVIRELIDTESNYLDVLTALKTKFMGPLERHLNQDELRLIFPRIRELVDIHTKFLDKLRESLTPNAKVKMAQVFLDFREPFLIYGEFCSLLLGAIDYLADVCKKNQIIDQLVQKCERDYNVGKLQLRDILSVPMQRILKYHLLLDKLVKETSPLHDDYRSLERAKEAMIDVSQYINEVKRDSDHLVIIQKVKDSICDIHLLQNGNGSDLLQYGRLLLDGELHIKAHEDQKTKLRYAFVFDKILIMVKALHIKTGDMQYTYRDSHNLADYRVEQSHSRRTIGRDTRFKYQLLLARKSGKTAFTLYLKSEHERDKWRKALTEAMESLEPPGCQSTDHKMEIYTFDAPTTCRHCSKFLKGRIHQGYRCKVCQISVHKGCISSTGRCKQNPVSVPPPVCDRQLSEFNWFAGNMDRETAAHRLENRRIGTYLLRVRPQGPSTAHETMYALSLKTDDNVIKHMKINQENSGDSMLYCLSSRRHFKTIVELVSYYERNDLGENFAGLNQSLQWPYKEVIATALYDYEPKAGSNQLQLRTDCQVLVIGKDGDSKGWWRGKIGDTVGYFPKEYVQEQKLASEEL

SEQ ID NO: 17404 - DNA, 2981 bp, DROSOPHILA
tctttgccaacattttccacatctgcgaagagtcctgtgcgccgcaaagcgcgtcaagcgattctggtgcggatgatggttctgagaggtgatttcacttcttattttcctatttgctcattgaaagcagtgattgtatatgattggtatcgcttacagctcttccaattcggattatcccatggcatccactgtgcagatggttcagtgttcggatagcaaatccaatcagcccataacaacattgaaaagcctcaaggatcccaattttctactggacaacactagcatgagatctcagaggtggagctgtctagctattcatattcagaactctcatattcaaatatctatttatctattgtagtcccaacaacagcttttaccagttggactgcggaaactccagcatttatgctcgtcccaagccaccgccatataagggcggtactttgggtcgaaatggagtggacatttgacaaacatctccccgagtgctctactgctgaggagtgttggattcgagcgcatacaatttcaataagcaatatcgaggaggagcgttatatcaattgcataaatactcacacctgccgaactagacaaaccatatcgtaattatcattttatatagatatgcaagcatgaaactagccaattagtttgccatttaagaataaaggcaatcaaataaagcataatattttagaagtctttcgttttaactattttatgacctactcatctctgctaaagtcgaattcaaacacttttcttttataaaaaggaagtactaaattctttacgcgcctaattttaaattcaattgaaaccagtttttatgcataaaatcgatatttcagtttgagccaacgtatcgatgtatcggttgtaaaatcgttcttatttccagctctagaatgaatgttccgcaagttttcgtttttcggagaaagtttttacagtttttgcgggctgcatagtgccgaatcatttcgcaatggcgccacccgaaaatgggatccttgaggtcctcgaaaatctacttgaccggtacaaaatcaacctgctgcaaatgatgttcggcaccttcatcgccacgatcgtgttctttggcggactgatgactttcgtggagaagtacctgcccaatagcatacgccagtcctttcggtatggcaagcacagtttcaagggtgaaacggatcctttggtggcctggctggaggttccgaagtcctggttcaagcacttctacacatttgccctgttctggagctggctggcattttatgtgctcgtttcaaccgttcgggagcaaaaggaggcgcccgaatatgtactccaattcctggacatcatgggcggcggacgtagtcaccggaaggtggagatcgactcaacgactgcctgtgtgggcgcatttatgctcacgttgcagtgcacccggcgtttttacgagaccaattttgtgcaaatcttctccaagaagagcaaaatcaatctgtcgcactatgccgtgggctatgtgcactactttggagccgttatagctttactatccaatacctccggctttgtgcgcggctccaagcccatggagttcagcctcgacaagctgacaagccagcaaatactctacctcggcgtcttctttctcgcctggcagcagcagtatgccagtaacatgatattagttaacctgcggaaggatccgcggacgggaagtgtcaaaacggaaaagcaccttctgcccaagggtgggcttttcaatctgctttcgtcgccgcacatgttcctcgaggtggtcatgtacttctgcatcgccgatctctacatgccagttaggatttggcgattgatcttcctctgggtggccagcaatcaaacgatcaatgctctgctaacccacaagtggtaccaggaaacattcagggaatatccaaagaaccgacgtgctatcattccgttcctgctctgagtccgaagactggaaacatttcgcatttttgtacaaataatttagtagtggaatttattaaagtcgttttacacgcacgaaaaatgtgtgctcgctggtgattttaactacaaaaacgatatagggtgaacttgaactggaacaggactgcagtcgattctatttgaacaagaaactgtggggaaaagagaagccaacttaaatatgtgataaattgcttgcaggatagtaatgactgacctatagggataaccctgcgccttcgaacgaaaaacggacaacaggaaggagaagaacacggtgaggagcaccaaaccagtcatcgccattatcctgttcttgttgtgagcctttggtgttcccgattcaatcagcagaatcatgcccagcacaatcatggcatctgtaatcaaagttattagttaaatagtccaaaaatggtcaacagaactagagtgaagactaaagactcaggacttactcaggaacatgacgatataggtctccaccaccagctggccctgcgaggagccatggatgtaggccacgccaccattttgcgacttgtggaccagcggtggtccacggatatgattccacatttgacccgagatcatggcgaagcagaagaatactgcgatggcaccccacagattcttgttgtacaagaactccaagttatttcgccgaatgtaaagaaaacttcccaccagggccaccaatgtgatcatggccacggtgccagaatagtttggtggacggaaaatgcgaatggtgatgtccgttcgctcggcaacgaatttcgcaatagaatcggcggcgaagccgacgcgatggatatccatggtgtcagctccctttggcttgcccttggccgggaaatgcatgaacaccggggcggtgttcaggcgcagaagttggaaaacctcggagccgtcatcgaaatccaccatagcaaagaagagtttgttggagtaagtcgaggagaagcggtaggagt

SEQ ID NO: 17405 - DNA, 981 bp, DROSOPHILA
atggcgccacccgaaaatgggatccttgaggtcctcgaaaatctacttgaccggtacaaaatcaacctgctgcaaatgatgttcggcaccttcatcgccacgatcgtgttctttggcggactgatgactttcgtggagaagtacctgcccaatagcatacgccagtcctttcggtatggcaagcacagtttcaagggtgaaacggatcctttggtggcctggctggaggttccgaagtcctggttcaagcacttctacacatttgccctgttctggagctggctggcattttatgtgctcgtttcaaccgttcgggagcaaaaggaggcgcccgaatatgtactccaattcctggacatcatgggcggcggacgtagtcaccggaaggtggagatcgactcaacgactgcctgtgtgggcgcatttatgctcacgttgcagtgcacccggcgtttttacgagaccaattttgtgcaaatcttctccaagaagagcaaaatcaatctgtcgcactatgccgtgggctatgtgcactactttggagccgttatagctttactatccaatacctccggctttgtgcgcggctccaagcccatggagttcagcctcgacaagctgacaagccagcaaatactctacctcggcgtcttctttctcgcctggcagcagcagtatgccagtaacatgatattagttaacctgcggaaggatccgcggacgggaagtgtcaaaacggaaaagcaccttctgcccaagggtgggcttttcaatctgctttcgtcgccgcacatgttcctcgaggtggtcatgtacttctgcatcgccgatctctacatgccagttaggatttggcgattgatcttcctctgggtggccagcaatcaaacgatcaatgctctgctaacccacaagtggtaccaggaaacattcagggaatatccaaagaaccgacgtgctatcattccgttcctgctctga

SEQ ID NO: 17406 - protein, 326 aa, DROSOPHILA
MAPPENGILEVLENLLDRYKINLLQMMFGTFIATIVFFGGLMTFVEKYLPNSIRQSFRYGKHSFKGETDPLVAWLEVPKSWFKHFYTFALFWSWLAFYVLVSTVREQKEAPEYVLQFLDIMGGGRSHRKVEIDSTTACVGAFMLTLQCTRRFYETNFVQIFSKKSKINLSHYAVGYVHYFGAVIALLSNTSGFVRGSKPMEFSLDKLTSQQILYLGVFFLAWQQQYASNMILVNLRKDPRTGSVKTEKHLLPKGGLFNLLSSPHMFLEVVMYFCIADLYMPVRIWRLIFLWVASNQTINALLTHKWYQETFREYPKNRRAIIPFLL

SEQ ID NO: 17407 - DNA, 3063 bp, DROSOPHILA
ggatcgaatgagtggcagagcctgatctttgtcaattcctagatagtcagtgcttccttctgtgcatgtacgttcgactggacatgggcaaaatcacactagatgatagtgggcgaaacgagatgtgacgagagacttgcttagttttcggctagcgactaagtaaatatcactttggatgttagtggttgggaggccacccgtggtggcaaatcttggcataggttcatctcgcatataagtgtgtatatgaagtaaattgagagtcgtcgccgttggccaatgtaaataatacgatttctgatttacaattaagaatgtgttatagagttataagaaacgtgtcatctggatggcttgccattttttttttaatgtcaacaacactcatgtgaattgtataaagtataaggttcaaactaacatcaatttaattgcaaccgattttggttttacttaattctgtaaatgccgattccagtttaaatatttgcctgtacatactaaaataattggattttattacgtcaactctagttaagatttagaaatatccaaaaaaggaattggttgagccgatttctcaccactggcgttgcctgtatttagtttctcactataaaacgatttatgtttagcataaataaaattaaaatcaacaaaattatattcgcttttaacagaaatattttaaaagtttaattaatggggggaaagggaatgcgagaatttactttgtgtgatgcgtaacaatgaatggagattaccctctttacttacattagatttttgtttaaattttccatcccaaatgatataacaagaaataaattagtttatttaaagattattcactatattacagaaatttcaaatttaaacttggtctatttccatacagtcaaaatactaaatactaaagtaaaataaagtatattataacggtgacgatatttccgacagctttcggtatataataacgcaagctggtcactcttccaaaacctgccaaaataattttttgtcaggattaagtttattgttatttattaaataaaaaaacatgtgtgacggcgatgtggcaattgcggagctggaatcccgtctggatgaggtcagtctggaggacataggtgccagacatcgtcgcgagcgcaaggatttgcaggccaagctgcaggccatgaagaagaatgcgccgaaaaataataaaaacaagcggaaggagttcctggaggagatggctcgcctggagggagagctggagcagcgccacaaggcggaactgaaggcagcggaagccatggaggcaccggtgttggtggaaccggtcgtcaaagagccagcggaaaagccagaaactgaagtgacagacgatgatggaatcgaggaaaaagaggaacagctggcgcccaatcagcgtgtttccaaggcacagaaacgccgggacaagaaggcaaaggaggcacgtgcacgagaggcagagatcaagacggagctgcaaaatgctgccaatcagccaacgcccaagttaatcgaactgcagcagattacagcaaagctatcccaacgccaattatcccttcacaatataccctccgatggcgactgcttatatcagtccatcagacaccaacttatcgtaaatgctcttccaggtaatgcttcacgattcagtccacacagcaccaaaactaatccataataattgcaccaaaggtcacagtgttcaggagttgcgggaggaaactgccaattatgtgcgtgctcacaaggactcgcttatctcatacatgatccacccggaaacaggagacattctgaacgaccaacaattcgaacaatactgccacgacatagcaaaaactcacgcttggggtggccacatagaactgaaggccatctcatcgctactccgggtgcccattgaagttatccaagcggaaggagcaccgacgctcctggggcaagaggaattcggtggatcaccgctgatcatctgctaccaccgccacatataccaattgggtgcccactacaattccacggtgccagcagcctaaacgggaaatgcccaatggcatttaccatcaactcactcgattttgtaacagattgttttattacatattatgttgactttataaatacgtatgcatttggaagatttgaattattgtcaaaaattgcaagtatgtagtagttatatacaataatagtcaatataataacaattctaggttagctagcaacttagttagctggatttgttctaagaaaatatttcctatatagaaaaataattcgtttagctcaaatttagttttcttgtggcggtttagtgtaaattcaagcaataatttgattattcctcaaagcctagctacttattacttggtaatgttgttgcaacaacccattatttgtccttttttctaggtaaagcgttcgatttcaattatttgtccttcttgctgtccttgggcttctcggcagccggtttgttgggataaatagcgaacatggagagctgaatgccgcccaggaccagcagcaaaaggttctgcagctgaaatagaagaattttcggttcaaatttacattctcgtttaatagaattaattgctaacttaccaccatcacagtattcttgatggagatggcatacagcgtccaggaaaatgccaccagattaccggcaaagataatcgggaacggcattccctcggtgctcttcttctcaatgattttcggcagatgcagcaggggagagcccaccatccaaaccaggatgccggtgatcagcattcccaggcggaactcaatcttggcgggatcctcgaagttggcatacgcggtgatggccaataggaacaccgaggaatagccaatctgcttccagatcttgctcctgctggcgctcgaggcgtagtagtaaaatccgaagaggaagacgaagtttatcaccaggccgattaaattcgtattgatcatggcagcatcattcataatgttggccagcttcaagctgagaacggtcctagaaagttcaacaatttgtta

SEQ ID NO: 17408 - DNA, 1002 bp, DROSOPHILA
aaaacctgccaaaataattttttgtcaggattaagtttattgttatttattaaataaaaaaacatgtgtgacggcgatgtggcaattgcggagctggaatcccgtctggatgaggtcagtctggaggacataggtgccagacatcgtcgcgagcgcaaggatttgcaggccaagctgcaggccatgaagaagaatgcgccgaaaaataataaaaacaagcggaaggagttcctggaggagatggctcgcctggagggagagctggagcagcgccacaaggcggaactgaaggcagcggaagccatggaggcaccggtgttggtggaaccggtcgtcaaagagccagcggaaaagccagaaactgaagtgacagacgatgatggaatcgaggaaaaagaggaacagctggcgcccaatcagcgtgtttccaaggcacagaaacgccgggacaagaaggcaaaggaggcacgtgcacgagaggcagagatcaagacggagctgcaaaatgctgccaatcagccaacgcccaagttaatcgaactgcagcagattacagcaaagctatcccaacgccaattatcccttcacaatataccctccgatggcgactgcttatatcagtccatcagacaccaacttatcgtaaatgctcttccaggtcacagtgttcaggagttgcgggaggaaactgccaattatgtgcgtgctcacaaggactcgcttatctcatacatgatccacccggaaacaggagacattctgaacgaccaacaattcgaacaatactgccacgacatagcaaaaactcacgcttggggtggccacatagaactgaaggccatctcatcgctactccgggtgcccattgaagttatccaagcggaaggagcaccgacgctcctggggcaagaggaattcggtggatcaccgctgatcatctgctaccaccgccacatataccaattgggtgcccactacaattccacggtgccagcagcctaa

SEQ ID NO: 17409 - protein, 312 aa, DROSOPHILA
MCDGDVAIAELESRLDEVSLEDIGARHRRERKDLQAKLQAMKKNAPKNNKNKRKEFLEEMARLEGELEQRHKAELKAAEAMEAPVLVEPVVKEPAEKPETEVTDDDGIEEKEEQLAPNQRVSKAQKRRDKKAKEARAREAEIKTELQNAANQPTPKLIELQQITAKLSQRQLSLHNIPSDGDCLYQSIRHQLIVNALPGHSVQELREETANYVRAHKDSLISYMIHPETGDILNDQQFEQYCHDIAKTHAWGGHIELKAISSLLRVPIEVIQAEGAPTLLGQEEFGGSPLIICYHRHIYQLGAHYNSTVPAA

SEQ ID NO: 17410 - DNA, 4036 bp, DROSOPHILA
aaaatttccgcagaaaattctcgctaatccctttttaatgcgttcagaattacgcgagcaggtagtaatgggttttagtctaccgccataaagtccgccttttacaaatcgcaataaattagaaaggaattcgtaacaatttccaaatttggtgtttaaagtgcataactttttaatggagtatattaatttcttactttatagataataattccttaaagataatataaaaatataatttattggatctccaaatgctttcaattatattggatctctaaatgctttcaataatccaatcttttaaatgtagcctctaatcaattaatacgcttttaaaaaaacgcgcgcaggtgaaagaacccactgccgttttaaagtgtgtacatactggcgaaatcatatggtgggcatacacgtgtatcggttgtacagtttatgcgttaatcgacttcgcgaactacgaaacctaaagctgattgctattataaaataaagactttactaaacaattgatagtgcccattatagttgaaagcctaaagaaataaacgcttatcaaataaaatcactgccgtgggttactgccatgaagaaattatgatctgctgaaagtcgagttgtctgccgcatgaacgccctaacatacggctctttgcgggtgtctctcttaacatttcgttatgcgatttgaatggggcagttgcattggagcctcgtccgccgaacacagaacattacaaacgcgtttccaggagtaattgtcggtgattttaatcgaaaacaattgatacgagcgcggtgcggcagccatcaaaatcaaagagtgctaaatcggaatcactgccctaagtgaagtgtattgtgtaaccttttgagacgatgacaataggccaaaaggaggcggcgtggggcaggctgggctgccaatgatcatatgattgcctagagcggaaaaatactcaaaatcatagcagtcggctaggcatttcgttgccagaaacgaaaacaacaatacgtaaatcgaaaggacaaggtatattttcagccggtactccccatctccccaccaccatgtacacaatcaacaagggacctagcaaaattgttgctaaaacgcgtcgcggtgagtccaaaatattgatagtaataatggttaataatgccacaatagaccctttcaagagaacagctgttatgtcacaaaaacatactcttttcctttctctctctctctctctctatatatctgcctctgcctctcttgctctctggctctgttaactttttgttttgccggcgttttccacagtaaatgcgtattttatagctttccatggcatgttttccatccgcaggcctggcaccaaattttgaaaaattcgaaagcatcaaggagagcggccgcaagaacgctagtttcgatctgaacagtcccgaggagcacaaaaagtaagaatgccatgctcatatgtaaccatacccaaatcttgggtgcttatgcaaacggatggcacatggtgaaatgtggaaagcgggaaaagtgacgggggaaaacgcggactggggttcaagaccctcgtcttatcgcactgacattttatcgcaagaatccgtggcgacctagcacagtaatgctaattgctcccgagcaagtagtcttattctcgctaggggagacccattggaaacacgtgggtcaggcgtcggttatcggctccattttaatttaaatgcccattgaggccattgaggcattgacttttccacgtccgttacgtcacggctccaacgtaacttcgcggcaatgctcggcacaggttgtgccaaaacaaggctgattaatttacttattttacctggaagggtgtggagttattccgaatgtctaactgcaatcgaaacatgtaacttcagagtagagtacttataggtaattgaagagtgtatctcatttcttgtttatttttatgccttttatatcaactgtattacgcttgctgttaaaagtatcttatggatgcgagttttctagaatttcccatagccatttcagctgaaatctgaaaagttctctatataaatattaactttataaactcccaattgtatttaatttcttgcgattgcttttatttttagaacttcaagataaaaattacctaaccctttgccgaaatactattatctaaattaataaaccacaaatccttgtcagtcaatgggatggcactgtttactatctgccactgtagatagcttatcagtactcattgctcttatgagtatatattgagtttgtaattttttcatcgatatgtaattttaacatttaaaagccaaaataatgtaatcgacgaactgcagcgcctttctcgaattaaaatgcatttagcgttcctcgaactgagtagcaagctgtcgaacccaagttaccccacctcgttctccaagtgatttattttcgtagtccacatgtttggtggaatctgtgtggtttgcataagtgccttttcattgaaattcaagaacattgttattaaaattgtatgcatatttcctgatttttaaaaaaacagcataccgcgtccggtgtttcaacagagcttcgccaccaagcggataacgccaaccaaactgatcgaggatgaggtgataacgccgcaacatgaggaaataatacgttacataaatgactgtaagtcggaaatatgattgtaaagatgtacttataagtatttaataaatgtggtttacttttgttactttttggcagcctggaacatgctggtggcgcagaatccctacgactcgagctcatccgccaagcctgttgagaaacctgtagcggatgccaacaacaacagcgccgccagtccagtggaaagcataatggccaacagcccagtgcccgctgcctcgacagccactgtctgggtggagccaccgagtccagcgctacaggacttcaagcccttcgacctggagtcgtggtggggacgtcgcctcttccagaacataaccaaaagcctgtaggaccgatcgcatgggatcgaatgagtggcagagcctgatctttgtcaattcctagatagtcagtgcttccttctgtgcatgtacgttcgactggacatgggcaaaatcacactagatgatagtgggcgaaacgagatgtgacgagagacttgcttagttttcggctagcgactaagtaaatatcactttggatgttagtggttgggaggccacccgtggtggcaaatcttggcataggttcatctcgcatataagtgtgtatatgaagtaaattgagagtcgtcgccgttggccaatgtaaataatacgatttctgatttacaattaagaatgtgttatagagttataagaaacgtgtcatctggatggcttgccattttttttttaatgtcaacaacactcatgtgaattgtataaagtataaggttcaaactaacatcaatttaattgcaaccgattttggttttacttaattctgtaaatgccgattccagtttaaatatttgcctgtacatactaaaataattggattttattacgtcaactctagttaagatttagaaatatccaaaaaaggaattggttgagccgatttctcaccactggcgttgcctgtatttagtttctcactataaaacgatttatgtttagcataaataaaattaaaatcaacaaaattatattcgcttttaacagaaatattttaaaagtttaattaatggggggaaagggaatgcgagaatttactttgtgtgatgcgtaacaatgaatggagattaccctctttacttacattagatttttgtttaaattttccatcccaaatgatataacaagaaataaattagtttatttaaagattattcactatattacagaaatttcaaatttaaacttggtctatttccatacagtcaaaatactaaatactaaagtaaaataaagtatattataacggtgacgatatttccgacagctttcggtatataataacgcaagc

SEQ ID NO: 17411 - DNA, 599 bp, DROSOPHILA
aaacgaaaacaacaatacgtaaatcgaaaggacaaggtatattttcagccggtactccccatctccccaccaccatgtacacaatcaacaagggacctagcaaaattgttgctaaaacgcgtcgcggcctggcaccaaattttgaaaaattcgaaagcatcaaggagagcggccgcaagaacgctagtttcgatctgaacagtcccgaggagcacaaaaacataccgcgtccggtgtttcaacagagcttcgccaccaagcggataacgccaaccaaactgatcgaggatgaggtgataacgccgcaacatgaggaaataatacgttacataaatgactcctggaacatgctggtggcgcagaatccctacgactcgagctcatccgccaagcctgttgagaaacctgtagcggatgccaacaacaacagcgccgccagtccagtggaaagcataatggccaacagcccagtgcccgctgcctcgacagccactgtctgggtggagccaccgagtccagcgctacaggacttcaagcccttcgacctggagtcgtggtggggacgtcgcctcttccagaacataaccaaaagcctgtag

SEQ ID NO: 17412 - protein, 174 aa, DROSOPHILA
MYTINKGPSKIVAKTRRGLAPNFEKFESIKESGRKNASFDLNSPEEHKNIPRPVFQQSFATKRITPTKLIEDEVITPQHEEIIRYINDSWNMLVAQNPYDSSSSAKPVEKPVADANNNSAASPVESIMANSPVPAASTATVWVEPPSPALQDFKPFDLESWWGRRLFQNITKSL

SEQ ID NO: 17413 - DNA, 3152 bp, DROSOPHILA
ataaggtgaagaatgcggcgcgaaagcaaaaagaagaggaaatcaaggacggcattcgagaaaagtcgcggtcgccaagtccgattgtgctcgagaaacccctacccaaaaagagcaacaagcgagtttatcggtgagtgttggttttccatcaaaaattttcacacaaaaactagaaatatttgcacttattttcttgcgcagatccaagagtcgcagtcgctcccgctcaaaaacgccgccccatcgagatagatcgttgtctcgctcccgatcccgctcgcgatccatggagcgctctttaacgccgccaccgatgaatcggagcaggttgggcggtggtaacaaccgcaagggtcgcaatcgatctcctcgccacgaacgggacaacaacagcggcagcacaaataccagagagggccgtggtgatcgtggcaattccaatagccgagacaatggcaacagcaccaacctaagacgagtggaccgcgacagatctctaacacctccgagctttctgtaaatcatggctatagtacaatttcatgacagtcggaccaatgagctatctttgtttttccaggggaagcacatttgccaagccagcggatttcatcgaggaatcgaacaagggccaccaaatgctcatgaaaatgggttgggcgggcacgggaactggactgggctcaaagaatcaaggcatcgacacgcccatttcgggaggcgaggtgcgcgatcgtcgagagatgtacaaggtgaagtggcaagagtgcgcaagaaaggacaacttataattttctatccacagggagtgggcgctaatatgcacgatcccttcgagagctttcggaagaacaaaggagctgccttcgcgcaccggatgcgatcgcgagacgacaagagttaggatctgccaacggtcataacttcccagttttttgtttcctttagcccagaaaatatacatttttataaaagcgaactgaatttttatacaagattaggctataacattaaagctggattgagcggccttggcatttactttttccaggacctggaccaggcccttgccaggaccgcattcgaaggtgcgtggaaagtcgacgccctgcttgcgctcgtacatctcgtggagagtctgctcccacttgacgggcctcacgatttgcttgggcagctgcgttaggatgtgcttggcatggcgatagggtttgccatccacattggagtacactctaatgacggggtcctgaagtcgcaccgttttcagggctttggtaaatggctccacggcgctttgcattagaggagtgtgaaaggcgccactgacagccaatctcttcatccgccggattttgaaggacttggcattttgttccaggaactccagggcctctacgttgccggccactaccttgcagtgcggatacatgtagttggcgatgccacagtagggcgactccactcctttgtccagacaccattgctgcgcacgagcgcaggcctctcccagattggtatccggtccgtagagagtcatcgccatggctccggctgcctggtcacatgccgcctgcatggcggtggcccgcacctgcaccaatcgcaatgccttgtcgaaaggcagggcatccgcgtacaccaatgcggtaatctcgcccaaactaaagcctgcggcagctacacacgtttcaatggccttgggtcgctcctcacgcaactgctccagtgctgccagcgaggataccatcacagccagctgagcgtgctccgtgcgattcagtttctcacgtggtccctccaggcagatcttgagcagatcgtatttcagcacctcgttggccagctcgaagatgcgacgggcgcccgggaaccggagcaggtctttggccatgcccacgtactgggtgccctgaccgggaaagagcatcacacttgtttccttgggatcgatggcgggccggcctttctgttccagcggctcagaaagctcgttgagcagttgctgccgcttctccgcgttctgcaaaagggcggaggtttctgttgtggccttcgcggcatcgctgctccagcgggaccagcttagggcaccggtaatccgcggtgatcgtagtaatctgcgggcggccaacatttttgttgaaggagttcgcggcataacataacagctgattggagcagagaaaagtagatcatatcgataactgtaatgcggccatcgatagctttagtacttcgatgattttagtacaattgtattttgaattttggcggcttatgctcaaaaacaatatgatcttaagaaatggaaaacattcagtgcattgtgataatcgacactttattgtaaatcttaattattaaagtcaacatgctatatacgctattaagtggttcaagtatttactattaactttaaataaatccaatggccaattggaattggtaaaaagatcaaaattcccaggtattttatttccccagacatcttagtcatggtctgcggtctttttccactatttatagccaaacttgatttatgttgctaggctcttatttagtcgttgatggtcatgacgaaataatgttggttgtttattcatgagtcactgactacatagaaactgagccaagtttttagttgagtacagagtaacaaagttactgtgcttagtaacatttcatttaagatactattttaaaatattaataattttttttttttttggtgtagccttttatttattatttaaaatctgtcctagtggacaataattaaattttatggagggaaacattaacgtaaggggagtacatcgagtgtacttgggtaggggaatattaataatgacaatatttttctgaagaaaatttggaagctaagttacgacttttcgtttcatttgcattgtattctataatttacgttttctaaagtcagaccttaaatatctatgaaaatttaaagaaataatagctctttatatgtttaaattcaaagacataagattaaaaccctgccaagacaaaagagtattttttggccatgtgctattcggaacccccgaaataagagtttctaatttgaaatgcgatcccagcaaggcaatcgcagagttttttgaacccagggcaaaagaataacc

SEQ ID NO: 17414 - DNA, 1152 bp, DROSOPHILA
ccttcaacaaaaatgttggccgcccgcagattactacgatcaccgcggattaccggtgccctaagctggtcccgctggagcagcgatgccgcgaaggccacaacagaaacctccgcccttttgcagaacgcggagaagcggcagcaactgctcaacgagctttctgagccgctggaacagaaaggccggcccgccatcgatcccaaggaaacaagtgtgatgctctttcccggtcagggcacccagtacgtgggcatggccaaagacctgctccggttcccgggcgcccgtcgcatcttcgagctggccaacgaggtgctgaaatacgatctgctcaagatctgcctggagggaccacgtgagaaactgaatcgcacggagcacgctcagctggctgtgatggtatcctcgctggcagcactggagcagttgcgtgaggagcgacccaaggccattgaaacgtgtgtagctgccgcaggctttagtttgggcgagattaccgcattggtgtacgcggatgccctgcctttcgacaaggcattgcgattggtgcaggtgcgggccaccgccatgcaggcggcatgtgaccaggcagccggagccatggcgatgactctctacggaccggataccaatctgggagaggcctgcgctcgtgcgcagcaatggtgtctggacaaaggagtggagtcgccctactgtggcatcgccaactacatgtatccgcactgcaaggtagtggccggcaacgtagaggccctggagttcctggaacaaaatgccaagtccttcaaaatccggcggatgaagagattggctgtcagtggcgcctttcacactcctctaatgcaaagcgccgtggagccatttaccaaagccctgaaaacggtgcgacttcaggaccccgtcattagagtgtactccaatgtggatggcaaaccctatcgccatgccaagcacatcctaacgcagctgcccaagcaaatcgtgaggcccgtcaagtgggagcagactctccacgagatgtacgagcgcaagcagggcgtcgactttccacgcaccttcgaatgcggtcctggcaagggcctggtccaggtcctggaaaaagtaaatgccaaggccgctcaatccagctttaatgttatagcctaa

SEQ ID NO: 17415 - protein, 379 aa, DROSOPHILA
MLAARRLLRSPRITGALSWSRWSSDAAKATTETSALLQNAEKRQQLLNELSEPLEQKGRPAIDPKETSVMLFPGQGTQYVGMAKDLLRFPGARRIFELANEVLKYDLLKICLEGPREKLNRTEHAQLAVMVSSLAALEQLREERPKAIETCVAAAGFSLGEITALVYADALPFDKALRLVQVRATAMQAACDQAAGAMAMTLYGPDTNLGEACARAQQWCLDKGVESPYCGIANYMYPHCKVVAGNVEALEFLEQNAKSFKIRRMKRLAVSGAFHTPLMQSAVEPFTKALKTVRLQDPVIRVYSNVDGKPYRHAKHILTQLPKQIVRPVKWEQTLHEMYERKQGVDFPRTFECGPGKGLVQVLEKVNAKAAQSSFNVIA

SEQ ID NO: 17416 - DNA, 5779 bp, DROSOPHILA
aaacgtgaatagtcgtagacatttgttgatggcaaacaaagatttaattgttttgttaagtatttttgatgtatattttttatttttctgaaaattctgtatctaaataagataaagcaatggatagcgatgaaatctaaataaaacttaaacaattatattattttaaactcgcttgatttgatttgtattgttttcagtttgtatggcccgcatttggtcagtttttaagagcaccccacttaaaccctccgctgacataaacttttaaaccctaacccaaaatccaattcacatatcgaactgtataaaatttgcgttagagctggataataaagaaggaaactgattgttgaggtcatggtgtaaattttagtataaaacaaataacatttatattaaaagttgccttctaacaagttgccttagaacacacacaaatgtaaagcccaataactccaaaaagtcgcaatatgaaaagttaaacataccctttacattttataagcaaactcattcggtatgagtttagtttttatgggtgcgatcattggcaatccgtcgtagtttaagatcactggaactatcaatgaccatagaatctgcccaatctacacttacaatggacgcaacaaccgatgggggacaattagttaaatgtaagaataaagcaatcaaatcgtattgaactcgatttttgcagttcggccaaagcatagttatgttaaccaaacaatcgaaggcgtttgattgattaacattgaagatcagtggagacggaggcatggagttgaatatgaaacaagttgctagcggttaagtcaccaaagtctgtacataaaaacaatatcaaaatgcagttaaaataaagcatttcaaatgataagcaaaggccacttttttccactaactttaatagaaattggttttaatctttcgtttagatatttacaactttacaaccacttaaatggagtagagtttgataatcgagtttagtttagtgttttcgtttcttgcccgctttctgtggtctaccgcctttggccgctggtttgccggcgaacttcttgcccttgtaggatttggagttcgatcgtcggttttcttcccatttcaattgtttgtcggaggacttgtccttgttaaagacggcattgctggttccctgaccctttaccttggccgtctcctccagcagcgaagagaagtcatcggcggcagcaaacagagaggacatatctaaggatgttgaaaaagtacatacattaataacctcatgactaccgttgaattctaaatcgatatcttaccgtgactctgtttgagtgttttggcaaagcttcgtcctcccaccatgtcggtggagtctttgcgggattttttggatctcggtggtgcatcttcgtcgtcgtcatcctcttcgtctggactctcaggagcatcgcttgaatcactgtcgccagggccgccttctgaaatcgagccctcatcgtcatcatcatcatcatcatcgtcgtcgtcatcaagtggctgcaaatcaatcgagcccgtttcatcatcggactgatcttcgccctcaatttcatcatcttcatcttctgccaagtcgtcatcaccccagtcgtcatcaatatcgtccatttcatcttccgccttgtcggactgcttcttctttttcttatccttggacttatccttctttatctcgccacccagctcctgcaggaagttcagctcctcttcatcctgctcttcgtcgacaccttccttgaacttcttgccgaaatatccatccaaataggcctcgaactcatcgtcatctacttcgccctccttcaggtattcctctccagcctcgccatcatctccctcttctgcggcgtccttcttgatctccttttgctttttgttctgcgccacaatttccgcctgtctacgtttatgctccaagaagttgaagatgaacatctcgtcctcggtacagttggccttggtcagcgatttcactggtcttcctcgcgctccgtgagccatgtatcgcttgtgtgccacggtagcattttccgctgcttgtgaagcttccagctttttcggattcttaaaggcgaaacgttccaaaaagtggggcaatccgaaatctctgagcggatcaccatagtaatcaatgcgtgattctaaaaaaatcgaaagggtttataaaaggctatgaatagaaacctaatggaatactcacgctgaagaatctgttcggcgaagacctgaacggtgggatggtagtgttgccgcagcaacaacagttcatggcggagtgcatatgcagctcctgcaaaagcgggcactcgatggtacggatcgtacttgcaggaatcaatatcccgcaccttggcctctgtggcagccacacgggcatgatgccaggatgatgcacttgacttaacatcattgtctgccttctcctccaatggattggagtccttagtatcatccgcctcatctttaacatcctcgtagacctcctcatcgtcgctaccgaacttgtccagatccgcactgattggtagaacaactttggaaccttcctccacttcctcagaagctccagtgccgccaattagctcacggcgcatgcgcagcaacttgtggatgacgattaaacaaccagctgcaatgtgcggtggagcgtatagggtcaactgcagcagacgcttcacgaatgcctgggccctggccacatggttgtcgatgtggatggcacgatgtacaatatgcagtagatgagccgccgttttgctacccacattaattaggttcagatccagcagctttacatataaagcattataaaaccgatccgatttctcagtttttactgcaaccaattgcagcagcaggccgagagtctgtacagcgaccctaatgtcagccaagtggaccaatcggtagatggtgtcctgcatttccttggtgagtaattccccattgctatcctttgccggcttagcctccacgatagctttttgcaagcatcgaaggatggcctgcatggtcctattatttacggctcccttctgcacgagaaccttgaagagggcaaagcatatattgaccaacttggtgcagacttcgggccggccagagggtgcgatgctggagaggaagcacagtgcaaagtgctgcgctcgctcggaaatattgttacggaaaagtagcttctccgcttcggcaacaataacaccgcacatgttcggatgtttctgggccacctcgctgaggtgatgcaacgccttggaggcaatcttggcgatgggatcgcccagtttgtttaccagcatggttagcagcagctgctccttttcgggagcataggccaacagcctggctgctgacacaatagaggagttcttattgtgttcctgtccagtctgcaggccctgcataacgttcttcaagaactcgtggtactgatcctttaattcgctctcaaaatgccagtacgcgtaaatgcggcgcttctgttcgttgcgcaaattctcatcctttttcagctttttccaatcagcaccacgtgtgtgcaccgccaggagttttctgtttggcgggagcagcacctcctgccacaaatccgtgagcactgcaatcacatcattgctggccttgttggagatcttgcagaagccaattaaagtgctcaatgcttccaaattgcccagtggattgctcgtcaccagaagggcgcccgcattggcccgatcctttgcagtacccttgtgcagagcggtttgcaaccagcgagcatccgagggattacctaaagatgagataaaaacattagtaggggttccaatttccgagtcgagaaagtcttacgtttattaaaagttatcttctccgcttcgaaggaattcttgcagagattgtacagctccagctgatcgttctccttcatgtccagcacctcatcggtggacggatagtcgggatgctaagatacgatagtgataactataaatgatttatttccacgatttcagtttagtttcaacataccacatgataccacttcttttgggactcctcgtcttcatctatttttgactgatatttgttgtgctttttggaaatggagtcccccagttcctcatcactgtctccatcgctgtcggatacattttttccagctccatcctcatcaaacttgattcgttggggctttttaaagttctccttggactctccgtcatctccaaacttgattttttgggacttcttggtcggttccgtctttgtgttggaagaattcgcagttacttcatcttctccatcatcagtgaacttgattttctgaggtttattggcgaagtccgacttttgaccattatgtttatggttgtttttgttgaaaggtttttgatgcactgcttctctatcctctccaaatttgattttctgtggttttggtccatttttatgattttggttgaacgacttggaagctacttgttctccatcatcgccgaactttattctctgtggtttgttggcaaaatccggcttttggtggttcttattaaaggacttagcacctttcgcttttccatcctctccaaacttaattttctgcggctttttcacctgttccttcccttcaaattttggcctttgtgggtgctcctttttgttttgtttaactaccgcctcgccggagtcgtcgaacacgattttcttgtttttgggcggtccaccgaattgcacacctgtggccactgctgccggcatgattttatattttctaaagctatatattagataaaaatcattaaataaaataaacggcgttagaaacaactcgcacgtgtattcaaatatgacattcaccgcgaaacgtaagcaacatatgtatgtcgtctacttagtgacgaatttcattgtctttatgatattaaaattttgtatttaaaatcttaaataagagagtatccaacttagttttaaaatttataaattattcagtaattaccattgaaatgaccgtgacttttgatagcaggtgggtttgaagttatataaagcttgaagttattataatctgattataagtaagaataaaattgaaattcttatatagaattactattaatttataaattattacattaacttatgtttaagtaactgaagttgtgctatattttcttttaccgttacaccatttttccacaatacatttacggtcttactgccttgacgcgcttgggatttgttaggacgtttatcgcatagtcctcgtgttcggtctcgtattttgaaagaaaatcgcagattatcgccaatttgaagcgattatcccggtctagatttcgaaggggtccttttggatagcgaacattgcaatgagcaccgaatcggcgaagccggcactcagccaggaggccattgtggcccagttccaacagctgcgcaatgagcagcgcaatttggtcaacagtttaaatacgctcgaaatggatttgagggaacacaagtgagtcaccgggggcccaaagatggatgacacgtctgtttgtgattttgggcaagtgggagaatccctgcagacacaatgacataactccttatcctccctagaactgtgatagaaactctggaggcggcggatcccgaacggaaatgctttcgtcaaattggtggtgtgctgtgcgaaaggaccgtgaaggaggtgctgccacagctggtggagaacaaggatttcatcgccaagaccatccaaatggtcacc

SEQ ID NO: 17417 - DNA, 3414 bp, DROSOPHILA
atgccggcagcagtggccacaggtgtgcaattcggtggaccgcccaaaaacaagaaaatcgtgttcgacgactccggcgaggcggtagttaaacaaaacaaaaaggagcacccacaaaggccaaaatttgaagggaaggaacaggtgaaaaagccgcagaaaattaagtttggagaggatggaaaagcgaaaggtgctaagtcctttaataagaaccaccaaaagccggattttgccaacaaaccacagagaataaagttcggcgatgatggagaacaagtagcttccaagtcgttcaaccaaaatcataaaaatggaccaaaaccacagaaaatcaaatttggagaggatagagaagcagtgcatcaaaaacctttcaacaaaaacaaccataaacataatggtcaaaagtcggacttcgccaataaacctcagaaaatcaagttcactgatgatggagaagatgaagtaactgcgaattcttccaacacaaagacggaaccgaccaagaagtcccaaaaaatcaagtttggagatgacggagagtccaaggagaactttaaaaagccccaacgaatcaagtttgatgaggatggagctggaaaaaatgtatccgacagcgatggagacagtgatgaggaactgggggactccatttccaaaaagcacaacaaatatcagtcaaaaatagatgaagacgaggagtcccaaaagaagtggtatcatgtgcatcccgactatccgtccaccgatgaggtgctggacatgaaggagaacgatcagctggagctgtacaatctctgcaagaattccttcgaagcggagaagataacttttaataaacgtaatccctcggatgctcgctggttgcaaaccgctctgcacaagggtactgcaaaggatcgggccaatgcgggcgcccttctggtgacgagcaatccactgggcaatttggaagcattgagcactttaattggcttctgcaagatctccaacaaggccagcaatgatgtgattgcagtgctcacggatttgtggcaggaggtgctgctcccgccaaacagaaaactcctggcggtgcacacacgtggtgctgattggaaaaagctgaaaaaggatgagaatttgcgcaacgaacagaagcgccgcatttacgcgtactggcattttgagagcgaattaaaggatcagtaccacgagttcttgaagaacgttatgcagggcctgcagactggacaggaacacaataagaactcctctattgtgtcagcagccaggctgttggcctatgctcccgaaaaggagcagctgctgctaaccatgctggtaaacaaactgggcgatcccatcgccaagattgcctccaaggcgttgcatcacctcagcgaggtggcccagaaacatccgaacatgtgcggtgttattgttgccgaagcggagaagctacttttccgtaacaatatttccgagcgagcgcagcactttgcactgtgcttcctctccagcatcgcaccctctggccggcccgaagtctgcaccaagttggtcaatatatgctttgccctcttcaaggttctcgtgcagaagggagccgtaaataataggaccatgcaggccatccttcgatgcttgcaaaaagctatcgtggaggctaagccggcaaaggatagcaatggggaattactcaccaaggaaatgcaggacaccatctaccgattggtccacttggctgacattagggtcgctgtacagactctcggcctgctgctgcaattggttgcagtaaaaactgagaaatcggatcggttttataatgctttatatgtaaagctgctggatctgaacctaattaatgtgggtagcaaaacggcggctcatctactgcatattgtacatcgtgccatccacatcgacaaccatgtggccagggcccaggcattcgtgaagcgtctgctgcagttgaccctatacgctccaccgcacattgcagctggttgtttaatcgtcatccacaagttgctgcgcatgcgccgtgagctaattggcggcactggagcttctgaggaagtggaggaaggttccaaagttgttctaccaatcagtgcggatctggacaagttcggtagcgacgatgaggaggtctacgaggatgttaaagatgaggcggatgatactaaggactccaatccattggaggagaaggcagacaatgatgttaagtcaagtgcatcatcctggcatcatgcccgtgtggctgccacagaggccaaggtgcgggatattgattcctgcaagtacgatccgtaccatcgagtgcccgcttttgcaggagctgcatatgcactccgccatgaactgttgttgctgcggcaacactaccatcccaccgttcaggtcttcgccgaacagattcttcagcaatcacgcattgattactatggtgatccgctcagagatttcggattgccccactttttggaacgtttcgcctttaagaatccgaaaaagctggaagcttcacaagcagcggaaaatgctaccgtggcacacaagcgatacatggctcacggagcgcgaggaagaccagtgaaatcgctgaccaaggccaactgtaccgaggacgagatgttcatcttcaacttcttggagcataaacgtagacaggcggaaattgtggcgcagaacaaaaagcaaaaggagatcaagaaggacgccgcagaagagggagatgatggcgaggctggagaggaatacctgaaggagggcgaagtagatgacgatgagttcgaggcctatttggatggatatttcggcaagaagttcaaggaaggtgtcgacgaagagcaggatgaagaggagctgaacttcctgcaggagctgggtggcgagataaagaaggataagtccaaggataagaaaaagaagaagcagtccgacaaggcggaagatgaaatggacgatattgatgacgactggggtgatgacgacttggcagaagatgaagatgatgaaattgagggcgaagatcatgattcaagcgatgctcctgagagtccagacgaagaggatgacgacgacgaagatgcaccaccgagatccaaaaaatcccgcaaagactccaccgacatggtgggaggacgaagctttgccaaaacactcaaacagagtcacgatatgtcctctctgtttgctgccgccgatgacttctcttcgctgctggaggagacggccaaggtaaagggtcagggaaccagcaatgccgtctttaacaaggacaagtcctccgacaaacaattgaaatgggaagaaaaccgacgatcgaactccaaatcctacaagggcaagaagttcgccggcaaaccagcggccaaaggcggtagaccacagaaagcgggcaagaaacgaaaacactaa

SEQ ID NO: 17418 - protein, 1137 aa, DROSOPHILA
MPAAVATGVQFGGPPKNKKIVFDDSGEAVVKQNKKEHPQRPKFEGKEQVKKPQKIKFGEDGKAKGAKSFNKNHQKPDFANKPQRIKFGDDGEQVASKSFNQNHKNGPKPQKIKFGEDREAVHQKPFNKNNHKHNGQKSDFANKPQKIKFTDDGEDEVTANSSNTKTEPTKKSQKIKFGDDGESKENFKKPQRIKFDEDGAGKNVSDSDGDSDEELGDSISKKHNKYQSKIDEDEESQKKWYHVHPDYPSTDEVLDMKENDQLELYNLCKNSFEAEKITFNKRNPSDARWLQTALHKGTAKDRANAGALLVTSNPLGNLEALSTLIGFCKISNKASNDVIAVLTDLWQEVLLPPNRKLLAVHTRGADWKKLKKDENLRNEQKRRIYAYWHFESELKDQYHEFLKNVMQGLQTGQEHNKNSSIVSAARLLAYAPEKEQLLLTMLVNKLGDPIAKIASKALHHLSEVAQKHPNMCGVIVAEAEKLLFRNNISERAQHFALCFLSSIAPSGRPEVCTKLVNICFALFKVLVQKGAVNNRTMQAILRCLQKAIVEAKPAKDSNGELLTKEMQDTIYRLVHLADIRVAVQTLGLLLQLVAVKTEKSDRFYNALYVKLLDLNLINVGSKTAAHLLHIVHRAIHIDNHVARAQAFVKRLLQLTLYAPPHIAAGCLIVIHKLLRMRRELIGGTGASEEVEEGSKVVLPISADLDKFGSDDEEVYEDVKDEADDTKDSNPLEEKADNDVKSSASSWHHARVAATEAKVRDIDSCKYDPYHRVPAFAGAAYALRHELLLLRQHYHPTVQVFAEQILQQSRIDYYGDPLRDFGLPHFLERFAFKNPKKLEASQAAENATVAHKRYMAHGARGRPVKSLTKANCTEDEMFIFNFLEHKRRQAEIVAQNKKQKEIKKDAAEEGDDGEAGEEYLKEGEVDDDEFEAYLDGYFGKKFKEGVDEEQDEEELNFLQELGGEIKKDKSKDKKKKKQSDKAEDEMDDIDDDWGDDDLAEDEDDEIEGEDHDSSDAPESPDEEDDDDEDAPPRSKKSRKDSTDMVGGRSFAKTLKQSHDMSSLFAAADDFSSLLEETAKVKGQGTSNAVFNKDKSSDKQLKWEENRRSNSKSYKGKKFAGKPAAKGGRPQKAGKKRKH

SEQ ID NO: 17419 - DNA, 4382 bp, DROSOPHILA
gcacattgataacgcggttgtttttggtgaaatttcacaactggccaagatctttgaccaatcgacaggcattccgcagatacagatccagctgcagcaccatggacaccaccgttcactccgccggcatcgatgagacccacctggtgcccatgagcgtcatccagcgacccattccctccgtcctggacgagcagaaggtgcaatccctgatggaaaccattaaggtgggttggtgcacgtacccatgtacctagataagggcagggtagaaaatacgttcggataaaaatcgattacaagatcttagttagcgttaaaatgtggaatacactatatataagatattagtacacgattgttagtttgttttaatatttattattaacttaatgtagccaatttacatagcttccagaattagctttttaaatttgttatttgaagctgtatattttgagaatccctgttgactttaaaaagttagttaatcatttttcgcgtataattggtatgctagtcctcagaaatgcctttcaagcaggaagacaactgaaaacatgtttcccaacactgggcacatacatagtactgctccactggttattatttacctctttcaccgcagaacgaaaccagcgaagatgaggtgccccccatcgacctgctgtggatctcgggcagcgagggaggcgactactacttcagcttcggcggatgccaccggttcgaggcgtacaagcggctacagcggccgacgatcaaggcgaagctggtgaagtccacactgggcgatctgtatcactacatgggctccagcgcgcccaagtacctggcctgatctttgtcgctgatcatttgttgttgttgtgcatttgtttttgataagaatgtcgtgatcgctggataaagttcgaaattcacggacatagcaataagaaaagctttattctttgttttcgtaaatttcttttgttttttttaataaagttttttatttggcaatcgttaaatttgcgtaaatatactgcgcttatcgccggactctaaatttgtttacctaatctgccactgatacaaagtagtatgcaaaaacaggcttagattcctttttgcattctgcatatttgttaggtgtctttaaaaataaaataattgtacaatcttgtataaatttgtatgaccccatccggagtgtttccttcctccagggtaatgctttggtcggcattttagcctacggttgcgatactgcttttactctattaacaataacatagcctataaaatcctatatataatacctaaacatattcgaaatgcactgcggcgaccatctcatcacctcaccagaggaagggagatctttcgcggagcacccgcagtccatgacgctgccagtcgttttgcgatatccacagctcgcgggcgctctcgagcacggacataatggccgctcccttccacgccaccatgccggcgtccatgcccttgatgaggacgttcacctcggactggacctgctggctaatccgttgctctagccaggcagccagaccgggcaatttggcactgctgcccacgagcaggatggagccgaacatcttgcgcttggtctcgtagctggacagccggttaatggactggattatggcctggtccaagggcaataccagaccctggccgttgtggtagcagccgttcgagttcatctgcccaccagctgtctgtgcacccagctgcgactgacagttgctgatggtctcgtcttgatccaccacaatgagctcctcatcgtcggcggtcacaggcagctgcggccgcggctggtatccggcgctggtggatagctgcaagatgtcgccaccccttacgccattttttcgacccgtctccttcagatactccgcatcgaagcagtcctcgcagtcgtattggtcctgcaccgcctgctgtgtgaaaaccgctttcgttcggcccgtgatgttcaacagctccgtgtggaagagggccagtggcgccattagggcctcatcgcccacctgtatggtgtagcgcagccactggccgttatgtttgcgcaggttgaagtgcttctcctgggcgccacaaacgctggcgttcaggtggcaaaacttttccttcagctcgtccagcagatgggcatccacatagctctcctgcacattgcactcgcgatagggaaagccgcactttcgcagcagcaggagtagcacctgatccaggtcgccgccgccataggacagccgcaccctggcatccagctgcgaaattccgtcctcgatgcaggctatggaggtcttttgggcgccaatgtccaccacacagccgtacccaatgccggcgccaaaggtggaggcgacgctgtcctggacgaggaagcagcgccgaaagcccaaacgcctcagcagcagggtcacgaactcgcgcagatgccgccgcacatagacatcgttgaccaccaagacggcgcagtgggtgcccagtttacgcagcgggatcttcagacgctcttccagggcgtacgaccagattcgttccaagtgctgcatgctggcctgaaaaaaaaaaaacagcttcatcagtttagtttggaaactacgaggaacaacgcagcacacacttgtagcgagccgcccttctcgttgtgcacattcagctcgcccctttgaatgggaaaatggatgtcgtagttgcgggcatccacagcaccgagtcgcaggatacggtcgtcgaacagcacgggtgcctcgcgatccagccagggctcgtccgccatctggccactgggcgccggcaccttctccgcctgactgctccggttgaagtgggccagttgctgcggcggagtggccacccgcaaccggtttttgttatcgacgacgcagtgctgcagaatgcgcgacaccaccaggcgctgctcctcgaactccaccatcaggccggagtttgagttgacgttgtccagcggcggcagcagcggatcatgatgcggcctatcgctggcccccggacgcctcctgtaggccaccgcgtgcagcagggtcagcggattaaggtcggccgccctgccgatcctcaagtgctgcgatccaggatggatgacgataatctttggcgcctccagtggctgcgcctgcggctggggcagcccaattggcggcggcgccggatgccggccactgctggtgctgctggctcgggatcgtctggacgaagggagagtagccaagttgcaaaattagttgcttcacataccacttacttattcacttactgcatcgtttgctttccgaaatccggatcctttgaaaatgcggaaatcggaggcaacaacaaatggcaacaaagccaatgtgaccgtggtgcgcaaatgagaacatttataaaacaggaacacaggaaaaacagaaagttaaagtaataaaaaaatagggctgatttacaaaactcatttttcattaattactattaattcattgttgaaattcaaagcactcatatatataacatataacaaattctttgtttagtatattgtgtgtggatggtgccgacgtgagtgccgtctggtcacactgtcaagaacgtggttttgttttttaatcatcaccattaaattgagcagccttactttccattgtgaaatacgccattccagagtgccaacgaaaacgagagtgccagtcaagcgatcatcgaatccactcagcgccacaatgtcgcacttcacctgcctgaactgcgatgcccgcttcgccagcgcggatgtgcagcggaatcactacaagaccgactggcatcgctacaatctgaagcgcagggtggcccagctgccgcccgttacggccgaggagttccagcagcgcgttcttagcgcccgcagcgccacggacgcggcactcgaggagcagaacctaagtgtctactgccacgcctgcagacgccaattcgccagccagaaggcgcacgacaaccacctgaacagccgcaagcacaaggagctgctggcccgcttcgagcgcgagcagatgacagctagcggcggcagcgccagcaccgccacatccgtgtgcacgcgcagcgtcgtggagcagcggccccatccggccctggccgccgcagccgctggcaagggtcgactggccttcgcggagcgggtggtcaaggccaataacgacgaggagatggtcgacgaggacgacgatgatttcgaggacattgaagaggaggaggtaggaagcgctatgcagatagagctcgcattagacttttccttgctcatagaagggttaccttgagaatgatttccttggagattctatgcctggttaagatatgcacctttacaacgtatacag

SEQ ID NO: 17420 - DNA, 2249 bp, DROSOPHILA
gtcacattggctttgttgccatttgttgttgcctccgatttccgcattttcaaaggatccggatttcggaaagcaaacgatgcaacgatcccgagccagcagcaccagcagtggccggcatccggcgccgccgccaattgggctgccccagccgcaggcgcagccactggaggcgccaaagattatcgtcatccatcctggatcgcagcacttgaggatcggcagggcggccgaccttaatccgctgaccctgctgcacgcggtggcctacaggaggcgtccgggggccagcgataggccgcatcatgatccgctgctgccgccgctggacaacgtcaactcaaactccggcctgatggtggagttcgaggagcagcgcctggtggtgtcgcgcattctgcagcactgcgtcgtcgataacaaaaaccggttgcgggtggccactccgccgcagcaactggcccacttcaaccggagcagtcaggcggagaaggtgccggcgcccagtggccagatggcggacgagccctggctggatcgcgaggcacccgtgctgttcgacgaccgtatcctgcgactcggtgctgtggatgcccgcaactacgacatccattttcccattcaaaggggcgagctgaatgtgcacaacgagaagggcggctcgctacaagccagcatgcagcacttggaacgaatctggtcgtacgccctggaagagcgtctgaagatcccgctgcgtaaactgggcacccactgcgccgtcttggtggtcaacgatgtctatgtgcggcggcatctgcgcgagttcgtgaccctgctgctgaggcgtttgggctttcggcgctgcttcctcgtccaggacagcgtcgcctccacctttggcgccggcattgggtacggctgtgtggtggacattggcgcccaaaagacctccatagcctgcatcgaggacggaatttcgcagctggatgccagggtgcggctgtcctatggcggcggcgacctggatcaggtgctactcctgctgctgcgaaagtgcggctttccctatcgcgagtgcaatgtgcaggagagctatgtggatgcccatctgctggacgagctgaaggaaaagttttgccacctgaacgccagcgtttgtggcgcccaggagaagcacttcaacctgcgcaaacataacggccagtggctgcgctacaccatacaggtgggcgatgaggccctaatggcgccactggccctcttccacacggagctgttgaacatcacgggccgaacgaaagcggttttcacacagcaggcggtgcaggaccaatacgactgcgaggactgcttcgatgcggagtatctgaaggagacgggtcgaaaaaatggcgtaaggggtggcgacatcttgcagctatccaccagcgccggataccagccgcggccgcagctgcctgtgaccgccgacgatgaggagctcattgtggtggatcaagacgagaccatcagcaactgtcagtcgcagctgggtgcacagacagctggtgggcagatgaactcgaacggctgctaccacaacggccagggtctggtattgcccttggaccaggccataatccagtccattaaccggctgtccagctacgagaccaagcgcaagatgttcggctccatcctgctcgtgggcagcagtgccaaattgcccggtctggctgcctggctagagcaacggattagccagcaggtccagtccgaggtgaacgtcctcatcaagggcatggacgccggcatggtggcgtggaagggagcggccattatgtccgtgctcgagagcgcccgcgagctgtggatatcgcaaaacgactggcagcgtcatggactgcgggtgctccgcgaaagatctcccttcctctggtgaggtgatgagatggtcgccgcagtgcatttcgaatatgtttaggtattatatataggattttataggctatgttattgttaatagagtaaaagcagtatcgcaaccgtaggctaaaatgccgaccaaagcattaccctggaggaaggaaacactccggatggggtcatacaaatttatacaagattgtacaattattttatttttaaagacacctaacaaatatgcagaatgcaaaaaggaatctaagcctgtttttgcatactactttgtatcagtggcagattaggtaaacaaatttagagtccggcgataagcgcagtatatttacgcaaatttaacgattgcc

SEQ ID NO: 17421 - protein, 607 aa, DROSOPHILA
MQRSRASSTSSGRHPAPPPIGLPQPQAQPLEAPKIIVIHPGSQHLRIGRAADLNPLTLLHAVAYRRRPGASDRPHHDPLLPPLDNVNSNSGLMVEFEEQRLVVSRILQHCVVDNKNRLRVATPPQQLAHFNRSSQAEKVPAPSGQMADEPWLDREAPVLFDDRILRLGAVDARNYDIHFPIQRGELNVHNEKGGSLQASMQHLERIWSYALEERLKIPLRKLGTHCAVLVVNDVYVRRHLREFVTLLLRRLGFRRCFLVQDSVASTFGAGIGYGCVVDIGAQKTSIACIEDGISQLDARVRLSYGGGDLDQVLLLLLRKCGFPYRECNVQESYVDAHLLDELKEKFCHLNASVCGAQEKHFNLRKHNGQWLRYTIQVGDEALMAPLALFHTELLNITGRTKAVFTQQAVQDQYDCEDCFDAEYLKETGRKNGVRGGDILQLSTSAGYQPRPQLPVTADDEELIVVDQDETISNCQSQLGAQTAGGQMNSNGCYHNGQGLVLPLDQAIIQSINRLSSYETKRKMFGSILLVGSSAKLPGLAAWLEQRISQQVQSEVNVLIKGMDAGMVAWKGAAIMSVLESARELWISQNDWQRHGLRVLRERSPFLW

SEQ ID NO: 17422 - DNA, 3113 bp, DROSOPHILA
tttacacacatgggctgaaaagatggaagacacacaggttagaacgactaatcgtgcaacgggcgcagcctcccttatgtacttatgatgtcctggatcaggtccttgtccgtggtctcctcgtgctgggcgatgcgcaccagcttgtctttaccaatcaccagatccatcacacggcacgtatatatcatcggcatggggatatacgccttggccagagccaccttggacacaaagacccggctgccatcgaacaaggggatagcgtcagcatctctaggggacttctgcacgctatcagttactggtttccttggatgctccgcgggcttcgggatggcagtgtccttgcttgggccatctggaacggcacacgatggcaaaaacgattaaaacactttagcttaggaggtcaacggaaaacataaacaaaataaaacacggttattgcggttttcttttttacaaagtctttatttcatttcgattaggaagctttcgcctacacttttagcgcaattctggcgtcaaaacagttttcccattatttttcacactcgttgcccaatttgacatattagaacacaaattatttattgaagtaagtccacgcgagtcacagtagacaaggaaatggcagcaacaatgccagggctgcactcgatgcacagcgagtcctcggtaaaagggcgagcaaaatgctacgttgtttgatctaaagtttttttaattatgaaaatgacataccttctttaatattactatactcaagtaaacatattactaaattatagcaaaatatgcatattggtattggtactaataaatacgtcatgcaaacagctcgttccgtgttagaaaacgatttaccggttttaagatggtctataatttttcagtagttttgcgcatacctatagctactgtactcccgaacattgcagccctgggtgcaagcgcttgatctggcaactctgttaaaatgtcgcccacagttgtgaaaaaatgaagtgatttccgaaaattgttgctaaattactaaacaaaaggtgaaattaagatttgtaatggccccgaaaagtgaatagtgttggtggagtcctagttgtgcatgaaagaaccgccttccaaagaagggagcccaatggcgagtaatgaagatgaataaatgccaacgacgcctggaatttcaatcaaatgtgtacaaatgttaaaacgaaattgcaaagcgacgccatgcgcgcaatgttaataaagtacagaaactagagtgaagcagggatatattacttggcggatcctcttgggcaatcaatcagtcagagcgttctaatcaataccccttcctcccacttcaatttgtgtcttgcagaacaggaggatgacttcaagttgcacctgcctctcctcgtgacaagaagaaagaagacgcccggtggctcccgcaagcagagttttgaccacctggaggtgagcttcaccagaagcaataggggtaacaacttgctgaccatcgatgggaagcccttcaccctcaatcgtcggatcaaggatgtgtgctactgggagtgcgtcaagctgcgctgcaagtacatcaagtgctccgcccgtgtggtgaccaaatccaatcggatctcggcactgagcgggctccacaaccatccctaagttacgaactacctgtgccatctcattagtctaataaaggtgtttacgttgaatcagtttatatcttccgcctctcctatcgttgttgattctatagtgtccttgcgcaactcaggacgccctctgactaatctctttcaattcttgcagcatgctaccaactggtgcccaatcgccgcggtgggaagaacctcatcttccaggggcacatgtactccgtggagcgcaagtaccgaaacagcatcaactgggtatgttccaagaacagcaacagcgtgcttcgctgcccggcgaggtgcgtcacaaatccggagagtggcaatggcatcaagctgagccaccgacgccacaatcatccggcggatgcctttaagccccacaagcgctgtcgaaagcgtcccggcgatcgaaagtaacaagtaaccatgtttcaggatgcaaagcatgcaggcttcggcaattgttagtcacactaaatataaatgtttctcatcgttgtcgaattgtaacattttggtgtaatggaatcactgttcatttggttttgggctttcacatatccgaattactttactaatactcactcatcagcacgtttcccataaactaattatagttttaagctgtagttaattccaaacgacttatgacttactatgaaaatctcctaacagattttcgccacagttgtgtttgccgacggaacggagttacgataatcgatggctaccgcttcgtgatcggtactacaaatctgcgtcgcacctatctgaagtgcgccaactttcgcagcaactgccgggcccgggccattcttaatacggatacgaacaaagtgcggatgaggcacgaccgccataatcactcccgtacggatgctgtgagcggacgtatctctaagaagtagcaggtaccgagctgtctagaggaataaacatgctgtttccgtttaaaaatgtttaactgcttttcactaccaacgaaaaaccataataaccttacatcctcacccataatttgaaagacctgtcctaatctaactaaattcgccaatctcttgcagataactcgaaaatagcgcagtatgtgcgctccaaccgaggaaccgatctcgtttaccacgagggaaacacctacacacccaatgaaaagctgagggagggacaaaagagtcgagactggaagtgctcaatgtaccataaggccaagtgccgggcccgcctggttactcgcattaccggtggaggggatattatacacgtgaccagcaacctgcacacacatcccacaatgtacaccacgcagaaaacggacattagcgtggttgaccagaaactgtgcctcgaaaggaatccactctgcgttaacactcgatcgattaaaatgtagatcaagtaaagaccaccgactgattactcgttacgattagcatgatcttcagtata

SEQ ID NO: 17423 - DNA, 679 bp, DROSOPHILA
aaaaaatgaagtgatttccgaaaattgttgctaaattactaaacaaaagaacaggaggatgacttcaagttgcacctgcctctcctcgtgacaagaagaaagaagacgcccggtggctcccgcaagcagagttttgaccacctggaggtgagcttcaccagaagcaataggggtaacaacttgctgaccatcgatgggaagcccttcaccctcaatcgtcggatcaaggatgtgtgctactgggagtgcgtcaagctgcgctgcaagtacatcaagtgctccgcccgtgtggtgaccaaatccaatcggatctcggcactgagcgggctccacaaccatccctaagttacgaactacctgtgccatctcattagtctaataaagcatgctaccaactggtgcccaatcgccgcggtgggaagaacctcatcttccaggggcacatgtactccgtggagcgcaagtaccgaaacagcatcaactgggtatgttccaagaacagcaacagcgtgcttcgctgcccggcgaggtgcgtcacaaatccggagagtggcaatggcatcaagctgagccaccgacgccacaatcatccggcggatgcctttaagccccacaagcgctgtcgaaagcgtcccggcgatcgaaagtaacaagtaaccatgtttcaggatgcaaagca

SEQ ID NO: 17424 - protein, 68 aa, DROSOPHILA
MYSVERKYRNSINWVCSKNSNSVLRCPARCVTNPESGNGIKLSHRRHNHPADAFKPHKRCRKRPGDRK

SEQ ID NO: 17425 - DNA, 3682 bp, DROSOPHILA
ttgactgtgattcaccaaaacaaaaacaaataagcaacatacagcgctgctcctcattgtaagctggtacgatgacactgagctccaaacttggcgagtcctcgagactgggaaaagtcactgttttaatggtgtgcgggtccaggaaggtctcctcatccttgtgccgcttgatgttgggatagggcttcgtcttgtagagcaccagagccgcaatctaaacgatggattatcagtaaaaataagaaagataggcgaatgtattcaagatctgaccgacagcgcagcgactgcaagcgtcgagagtagatagaaacagagctggcagaggcaggtccacattgtagggctttttttagcaactagtttgtatgaacaggtgcgcctgctacctgccagcagacattacttctccaatttgtgcgagataaacagagccacgtatttaattccaagaattttagaccgaaatgccgcagctgattagggttgtcaactcaatttagggatgacacttctccgcaaaacagtgactcattcacagtcaccgcagatatcgattaatggtctatcgcagtaagaattctatgattttgaattaaaataaaatatataacaaaaggcaatttaaaatggttataaactttcttatgcttgcgaatattaagtagatataggttaagtatgtagttttaaataataaatcaaaaactacgatatgatataggactcatggtacaagactttataaaacacattttctgattgatttttttatgttaacataagttactctatatattttagtcaattctaacctataaatactattaaaaactgaccttagtcacaaatatctctgcttaaggatcgaaacacgcatgcgcgctctttgaaattcaaaaacaacaagttctgagaatatacgtagtcctctcccattcagatacacaccattggaatttttcatcgcctctgcgctgggcggaataacaatttgtttatagtcaattaaaatgtgcttgtgaatcgtaaaaaaaaaactacataaaatacaaaatgaagtttttaaacttaatagtggtcgtattagctttaatctgcaacgaagttcagggtctaaagttgcaggcaaatgttggagaactcttcacctacaaaatcgaaccgcaactctttaactggacacaccaggtgatcagccagcaatttcgctacagaccctcgctgaagaattatcccgatttgcccagttggatgcgatatatgtatagccatgaataccatgccggcttcctctacggaactcctccagcatcgtcggctggcaaggatctaagtctggatgtggtcgcccttaatcgccagaattacgaaacgcgacgcgttgtggtcacaatgtttgtcgcccacaagtttcccacacccaatgtcgtgcagatgaaaataaacaatctgaattgggtgcacctaatggatcccggcagaagggagaacctacgaaatatattccgcaacgatctttggccaaatagcaaggaggacttgagtgtggtcttcatggagtcagctgtgaatatgggcggacgacttccactgcgaccgcagcagcgcgaggggtaatctagttataatttagttatccataacaatctcttatcttattatattcatttcatatttcattgcagagtcattgtccacgtgggcagctttgcccagttctcaccgcggctgcaggaactccaggaggaagtgagaccactgtacaagttgccatcttgcacctacaaacgcacatccgtgcagaaaatctttgagaatgttggcttcaaactggactggtgcgcctttcgaatggtgggcatggaatcaccaacggaaatcctcttccacagtggcaagcagaacgagcagcagatgcccgatgatctgaatcagaggcaagaggatcgctggatgggaatcgccagggaggatgtgcccgaacgcaattacatcgatgaattcgcctttgcctttgccattccgggcatgatttttgccattttaatcggaatgctatcagctgttttgtgtttccagcacgagaagttgtgagtttcccaactgggaaattacgaaattgatttcttcattttatattttctttaattgtttttatctttcgtttacttcagttacgatccgcattctgagtttttctttgccaacattttccacatctgcgaagagtcctgtgcgccgcaaagcgcgtcaagcgattctggtgcggatgatggttctgagaggtgatttcacttcttattttcctatttgctcattgaaagcagtgattgtatatgattggtatcgcttacagctcttccaattcggattatcccatggcatccactgtgcagatggttcagtgttcggatagcaaatccaatcagcccataacaacattgaaaagcctcaaggatcccaattttctactggacaacactagcatgagatctcagaggtggagctgtctagctattcatattcagaactctcatattcaaatatctatttatctattgtagtcccaacaacagcttttaccagttggactgcggaaactccagcatttatgctcgtcccaagccaccgccatataagggcggtactttgggtcgaaatggagtggacatttgacaaacatctccccgagtgctctactgctgaggagtgttggattcgagcgcatacaatttcaataagcaatatcgaggaggagcgttatatcaattgcataaatactcacacctgccgaactagacaaaccatatcgtaattatcattttatatagatatgcaagcatgaaactagccaattagtttgccatttaagaataaaggcaatcaaataaagcataatattttagaagtctttcgttttaactattttatgacctactcatctctgctaaagtcgaattcaaacacttttcttttataaaaaggaagtactaaattctttacgcgcctaattttaaattcaattgaaaccagtttttatgcataaaatcgatatttcagtttgagccaacgtatcgatgtatcggttgtaaaatcgttcttatttccagctctagaatgaatgttccgcaagttttcgtttttcggagaaagtttttacagtttttgcgggctgcatagtgccgaatcatttcgcaatggcgccacccgaaaatgggatccttgaggtcctcgaaaatctacttgaccggtacaaaatcaacctgctgcaaatgatgttcggcaccttcatcgccacgatcgtgttctttggcggactgatgactttcgtggagaagtacctgcccaatagcatacgccagtcctttcggtatggcaagcacagtttcaagggtgaaacggatcctttggtggcctggctggaggttccgaagtcctggttcaagcacttctacacatttgccctgttctggagctggctggcattttatgtgctcgtttcaaccgttcgggagcaaaaggaggcgcccgaatatgtactccaattcctggacatcatgggcggcggacgtagtcaccggaaggtggagatcgactcaacgactgcctgtgtgggcgcatttatgctcacgttgcagtgcacccggcgtttttacgagaccaattttgtgcaaat

SEQ ID NO: 17426 - DNA, 1391 bp, DROSOPHILA
tttatagtcaattaaaatgtgcttgtgaatcgtaaaaaaaaaactacataaaatacaaaatgaagtttttaaacttaatagtggtcgtattagctttaatctgcaacgaagttcagggtctaaagttgcaggcaaatgttggagaactcttcacctacaaaatcgaaccgcaactctttaactggacacaccaggtgatcagccagcaatttcgctacagaccctcgctgaagaattatcccgatttgcccagttggatgcgatatatgtatagccatgaataccatgccggcttcctctacggaactcctccagcatcgtcggctggcaaggatctaagtctggatgtggtcgcccttaatcgccagaattacgaaacgcgacgcgttgtggtcacaatgtttgtcgcccacaagtttcccacacccaatgtcgtgcagatgaaaataaacaatctgaattgggtgcacctaatggatcccggcagaagggagaacctacgaaatatattccgcaacgatctttggccaaatagcaaggaggacttgagtgtggtcttcatggagtcagctgtgaatatgggcggacgacttccactgcgaccgcagcagcgcgagggagtcattgtccacgtgggcagctttgcccagttctcaccgcggctgcaggaactccaggaggaagtgagaccactgtacaagttgccatcttgcacctacaaacgcacatccgtgcagaaaatctttgagaatgttggcttcaaactggactggtgcgcctttcgaatggtgggcatggaatcaccaacggaaatcctcttccacagtggcaagcagaacgagcagcagatgcccgatgatctgaatcagaggcaagaggatcgctggatgggaatcgccagggaggatgtgcccgaacgcaattacatcgatgaattcgcctttgcctttgccattccgggcatgatttttgccattttaatcggaatgctatcagctgttttgtgtttccagcacgagaagttttacgatccgcattctgagtttttctttgccaacattttccacatctgcgaagagtcctgtgcgccgcaaagcgcgtcaagcgattctggtgcggatgatggttctgagagctcttccaattcggattatcccatggcatccactgtgcagatggttcagtgttcggatagcaaatccaatcagcccataacaacattgaaaagcctcaaggatcccaattttctactggacaacactagcatgagatctcagagtcccaacaacagcttttaccagttggactgcggaaactccagcatttatgctcgtcccaagccaccgccatataagggcggtactttgggtcgaaatggagtggacatttga

SEQ ID NO: 17427 - protein, 443 aa, DROSOPHILA
MKFLNLIVVVLALICNEVQGLKLQANVGELFTYKIEPQLFNWTHQVISQQFRYRPSLKNYPDLPSWMRYMYSHEYHAGFLYGTPPASSAGKDLSLDVVALNRQNYETRRVVVTMFVAHKFPTPNVVQMKINNLNWVHLMDPGRRENLRNIFRNDLWPNSKEDLSVVFMESAVNMGGRLPLRPQQREGVIVHVGSFAQFSPRLQELQEEVRPLYKLPSCTYKRTSVQKIFENVGFKLDWCAFRMVGMESPTEILFHSGKQNEQQMPDDLNQRQEDRWMGIAREDVPERNYIDEFAFAFAIPGMIFAILIGMLSAVLCFQHEKFYDPHSEFFFANIFHICEESCAPQSASSDSGADDGSESSSNSDYPMASTVQMVQCSDSKSNQPITTLKSLKDPNFLLDNTSMRSQSPNNSFYQLDCGNSSIYARPKPPPYKGGTLGRNGVDI

SEQ ID NO: 17428 - DNA, 4575 bp, DROSOPHILA
caacagtttaaatacgctcgaaatggatttgagggaacacaagtgagtcaccgggggcccaaagatggatgacacgtctgtttgtgattttgggcaagtgggagaatccctgcagacacaatgacataactccttatcctccctagaactgtgatagaaactctggaggcggcggatcccgaacggaaatgctttcgtcaaattggtggtgtgctgtgcgaaaggaccgtgaaggaggtgctgccacagctggtggagaacaaggatttcatcgccaagaccatccaaatggtcaccaatgacctgagcaaaaagggcagtgagctgaacaagttcaaggaggagcacaatatcaagattcgcggcgaacacttggttgccgaaggagccaagggcgacgatgcggaggacaaggcggagaaccgtaatgtcctggtgttcaactgagagcgattgattacctcaccacaccgtatttattgtgtctatgttgagagggaactctgccaggatttgcgagcgataatccgcgtttattgaacacttctaatgttgtatgtacttctagctgtaaggcgcagttcgcgaaacgcctccaatcgcaccttcacaccaacactatccatcaattcccctcatttaaacttaacccactctggccacgaattaaagataccttaaacttccgattgaaattagtcatgtgtcttgtgattcattcaagatctgaaaatggatggacctctatccaccgactggaaacaaaaactatataaactatatgattatttatcccttttatgccatttgttctgaaacattttattggtatgttagtcaaattagtttcctataaggaagtgatttcatctacatttttacacttatgtattcttgcttcataagtcttttaatttaatatttgtggctaaatcaagtaagcagtagtttattttccattccccgtatcgtggttaatccggttagtcgggtattcgacttattcgacttctgtaactatcccattttgcggctcctccctctggaagtccctttttccgccggatttgcttagcaggcggacatttgtgatgcagatatcgtgagaaacagccttgcacatgtcgtacacagttaaagcggccactgaaactgcagttagtgcctccatctcgactccagtttggcccgagcagcgaacggttgcctccagccgcacagattgttcggttttcagaagagtggcctgcactttcacggaggacaagctgatgttgtgacacaggggtatcagttcggcggttcgcttagcgcccattatgccagcaatttgggctacggttagaacatctcccttggccacttgattgtcggctataagttgggtaagtttctcacccacctgaacggtggcctctgcacgagctaatcttgtggtcgaaggttttgcgcccacatccaccatttgggccttgccctggccatcgacatgggtgagttggctgtaatttcgggcctgaagctgcagccttgaagtatgatatgcgtggtgatacgaataaggatgaagatgatgatggagtcttggcgcagcatctgcaacgggagaggggagagagtgtggtgtgtctactagccgccaatgagtatcatgggccggttctccatctgcgacaggttcagcatgcctgcgaaggagtaccaagttctgaagactttctacgtttcattcggaatcgaaactcacctgcatgctgtttcttcttacgctggacggctgctccaatgagatccaccaactgttcctcgctaacactctcatctcgcatggcatctctcaacgagaactctttgttgccaaacaagcacacctttatgtttccatccgcagtgagtcgcaatctattgcaggtaccacaaaagtgttccgtcatggaggtgatgaaaccgacctgacccttaaatcccggaactgcataggctttagaagtgtcattaggtccattgggaagggccttgaagtctggccacctttgtcgaatgatttgcagggtatctttatacgaaatgagcctctctgtatgccacttgtttccggagaatggcatgtactctatgaaccgcacatctaccggacgattcctggtgaactcaacaaaatcacagatttcatcctcgttgaaatcccgcataaggacgcagttcaccttggggcgatagcccaattggacagctaaatcaatgccggctatcacccgctcccatccttttcgcctggtgatcttctcaaagcgatcccttttcagcgtatccagactgatgttcaggttatctagtccagctctctggagcggcaacagcaggcgtgtcagcaccaggccattggtggtaattccgatttgctccagttcgggtagtgctttcatttgtgccactatctctacgatatccctgcgcacagttggctctccgccggtcaagcggatctttcgcactccctgctccacgaaaattcgagctagacgaaggatttcctcggtggtcaggagtttgtttttcggctgtagcggaacgccttcagcgggcatgcagtagtcgcctgaaaatatgaccacattatagttataatagaattttccaattggaatttaataaaagttaactgaagagtatcatggaagtttctcgaattcaagttaagaacattaaattatctaatatcaatggggggtttgctatctatcagtaatcgaaatcagaaacgttgttaatgtcgccaaaattatctgattataatagcagctacaaatgaaattagaccatctgctctaatttgtcaacaattggctgatatggttggactccataactattatgttgaccgcagttgtgcgtgtgtaagacacgaatttcgccacattattcaatcaaggctgggatccacttcactgcgagtattatcaaataggtaaaacaataacagggcaaactgataagggtcgaaaacataggtggttggtttacttacatcgcagattgcagcgttcggttagagaaattctcaaataggtgtgatgccggccaaaggagtccgtgagtggcgaattctggttaaattttcgattagcgaaatcgatacggaaactttgtgcccaccaaatggagtactcacctttctcagcacctgtttctccggctccaatggctgaacacttgccgtggccagattgaggtaaccggttgtggccttcagccggattgctcctctcgaaagtgaagccacctcgcccgcgctattctcctgacccagcaatcgaatcgcgtgtctggccaatagccgcatgtttttttgttatttgtattttgattgatgttctctcagctaaaacgaatacaattggcttacgtaagccggcaatttgcggggggtggcacgagttgttgggggatctgttgtcgctggagcgatttcggacagtcagactgtgataagcaattacatatgctgacggcggtcctatgtcctacgaattgatatcgccgattacgcgctctccgtttccaactgcagccggcgagcgttgtttataaactaaattgagagtgacgatcatatggacgagctgccagcgcagctttcgccaaagcttttgttctagtgccagtgttaggcagcatttgaaattttttgccggttgattgattgtatgggggggggggagccaccagggggttgacgcttcagagctttgacctgcaaaaaacctagcagaaatgaagatgcagtgacagcagtttacttataagtgaatggagtttaatttcatttattttagtacagtatacaataaatgattaatatttgctatacagatgtaatgccttgcaaagagttacaagtgttataaacattcaagcatctaaattttgacattcttagtttgctttttaaaatttttttttttaaattttacccaaacttaaacataagaaatgatcaaatacgagatataaagaccatataaatacaggcccttcttataatttttaagtttaaggctataccagttcattataaactgttattcaaaggaaagtcttaaccccatagtgtacaaaacaaaagcaacaaaactccccacgaaagaagaaagatatatgtatacccttttccagccgccactgtacttataagaagcctttttgtttatcaaaatctttgtggtgaattctgtggcacatgttcatttgaaattcgaatagtcagtccaccatatatacacacaataatcgccagtcgacgtcggttatccatgatgcacacaccccgcctgtcgaatattaagcgggcatcggtgctcctcgtcaccgccctgctcctctatgtcttcgttttctccagtggctatcagaagtaccagatcgagggcattatcaagcagagtcaaccggaaaaggtctgggagtatgtggcggattttaataagatgcgtctgctcaatcccaccatgtaaggaaaactctttcttcaaacttaaatcagtttatacgataatcagatattttccccatcac

SEQ ID NO: 17429 - DNA, 1891 bp, DROSOPHILA
ccggctgcagttggaaacggagagcgcgtaatcggcgatatcaattcgtaggacataggaccgccgtcagcatatgtaattgcttatcacagtctgactgtccgaaatcgctccagcgacaacagatcccccaacaactcgtgccaccccccgcaaattgccggcttacgtaagccaattgtattcgttttagctgagagaacatcaatcaaaatacaaataacaaaaaaacatgcggctattggccagacacgcgattcgattgctgggtcaggagaatagcgcgggcgaggtggcttcactttcgagaggagcaatccggctgaaggccacaaccggttacctcaatctggccacggcaagtgttcagccattggagccggagaaacaggtgctgagaaagaattcgccactcacggactcctttggccggcatcacacctatttgagaatttctctaaccgaacgctgcaatctgcgatgcgactactgcatgcccgctgaaggcgttccgctacagccgaaaaacaaactcctgaccaccgaggaaatccttcgtctagctcgaattttcgtggagcagggagtgcgaaagatccgcttgaccggcggagagccaactgtgcgcagggatatcgtagagatagtggcacaaatgaaagcactacccgaactggagcaaatcggaattaccaccaatggcctggtgctgacacgcctgctgttgccgctccagagagctggactagataacctgaacatcagtctggatacgctgaaaagggatcgctttgagaagatcaccaggcgaaaaggatgggagcgggtgatagccggcattgatttagctgtccaattgggctatcgccccaaggtgaactgcgtccttatgcgggatttcaacgaggatgaaatctgtgattttgttgagttcaccaggaatcgtccggtagatgtgcggttcatagagtacatgccattctccggaaacaagtggcatacagagaggctcatttcgtataaagataccctgcaaatcattcgacaaaggtggccagacttcaaggcccttcccaatggacctaatgacacttctaaagcctatgcagttccgggatttaagggtcaggtcggtttcatcacctccatgacggaacacttttgtggtacctgcaatagattgcgactcactgcggatggaaacataaaggtgtgcttgtttggcaacaaagagttctcgttgagagatgccatgcgagatgagagtgttagcgaggaacagttggtggatctcattggagcagccgtccagcgtaagaagaaacagcatgcaggcatgctgaacctgtcgcagatggagaaccggcccatgatactcattggcggctaccaactcacccatgtcgatggccagggcaaggcccaaatggtggatgtgggcgcaaaaccttcgaccacaagattagctcgtgcagaggccaccgttcaggtgggtgagaaacttacccaacttatagccgacaatcaagtggccaagggagatgttctaaccgtagcccaaattgctggcataatgggcgctaagcgaaccgccgaactgatacccctgtgtcacaacatcagcttgtcctccgtgaaagtgcaggccactcttctgaaaaccgaacaatctgtgcggctggaggcaaccgttcgctgctcgggccaaactggagtcgagatggaggcactaactgcagtttcagtggccgctttaactgtgtacgacatgtgcaaggctgtttctcacgatatctgcatcacaaatgtccgcctgctaagcaaatccggcggaaaaagggacttccagagggaggagccgcaaaatgggatagttacagaagtcgaataa

SEQ ID NO: 17430 - protein, 552 aa, DROSOPHILA
MRLLARHAIRLLGQENSAGEVASLSRGAIRLKATTGYLNLATASVQPLEPEKQVLRKNSPLTDSFGRHHTYLRISLTERCNLRCDYCMPAEGVPLQPKNKLLTTEEILRLARIFVEQGVRKIRLTGGEPTVRRDIVEIVAQMKALPELEQIGITTNGLVLTRLLLPLQRAGLDNLNISLDTLKRDRFEKITRRKGWERVIAGIDLAVQLGYRPKVNCVLMRDFNEDEICDFVEFTRNRPVDVRFIEYMPFSGNKWHTERLISYKDTLQIIRQRWPDFKALPNGPNDTSKAYAVPGFKGQVGFITSMTEHFCGTCNRLRLTADGNIKVCLFGNKEFSLRDAMRDESVSEEQLVDLIGAAVQRKKKQHAGMLNLSQMENRPMILIGGYQLTHVDGQGKAQMVDVGAKPSTTRLARAEATVQVGEKLTQLIADNQVAKGDVLTVAQIAGIMGAKRTAELIPLCHNISLSSVKVQATLLKTEQSVRLEATVRCSGQTGVEMEALTAVSVAALTVYDMCKAVSHDICITNVRLLSKSGGKRDFQREEPQNGIVTEVE

SEQ ID NO: 17431 - DNA, 8366 bp, DROSOPHILA
ttttttccggtgcaaaactcctgtctcgacggggcacacaatttacgttccaattaaatgcgaaatgttatgtgatgaagtgatacactttttctcgtcaggtcgcgatccggttcagaactggttcggtgctggttccccaccccaactctccgctcctgaacgggttccgaaaccatatacaccctattgtagtagtgttattttcggaaccagtacaactcgtttatatacaccaacggtatatataacaaaaagggtggtaaaatatgcagctttacttattgctcaagttttaaaaaacaaacatatttttcgatgcaattgtttttcgcaagtatttttctgctggtattttaaagaaacccccttatgcttttagttgaattattataacggtcattttcttttggtttactcctacttacacagcctggtcatactggcgaccaaagtagtttgtttttgccaaaaaaaaactcaggtctgctctactccgcgatatttgtttgcccagctggtctttgttgttggtaggtccaaacaaacacgcagccagtgttaacccagttttggggctagtgattgctgtggctcccacggcccagcagcgggttaaatacgacagtgtaattgtgaaagaggagagtgttgtgttgttggtggtggacgtgggcaacgacattggcatagaaaattttgcatacactctccttcgcacacgcacaccttcgtcgaaattgtaaaaataaaacaaacaagtaaaaatagcacttggcttgttgttgtgcctaaagttgtacgtattttgcagacggaaattgattggttgtgtaaattcgaaagtgcacgaaatcgcgagcgcataacggtacatgtatacacacacaagcagcacacgcacacacatggaggcagtgctttttgtttgatgtcccatttggcggattaaagacaaagagagagagacagagaaacggaggaggaggacgaggacgcgatgaccacaagggagaatgtggtttctagtcgcctgtccaagctgatgctcagcagcgggagtggaaatggcagtggcaatggaagtggtcccaacatccaggtggctccatcctccaccctggtgcaatctcccacctcgcccggggagcagtcccaatctcagtccgagctgaaccaactgaagcgggatgcggatccgcagttctcgcgcttcgccgactactttgtgatatgtggactggatctggacacgggtctcgaaccggatcgctttgcgggtaagtgatgaatgctcgccgagattgggattaacttcacatctacgcctcttaggggacaacctacattgctcgccgctggatcgcgcctacaagagcaagcctttggcccattatcccgagaacgtgccctggaatcccttcgatgcccacggcatatgcatggtaatcataaagactgtttgaagtcactccctagccatcttagggtggatcggttaatgtcgattagataatgtatgatagtctaaactatttaaatggcttccttcatgcttattcccaaacacacatcattttgatgaatcattaggtcagagagtgatttattgccatctgtcaatggaatcagttcagactgctaaatgtgaatttttaattatttttatatttacatttttacatcattacattgtaagtgtagaactgaagcatagaaaaacttatatcttgcgaatgaccgagccaccctaatccatattcatgtctaattgagctcaattggctgccctttcggtggaaattcatgcttggctagctagttcattgatacactcgtcccgagttgttgtgagagaagcacttataattgatgccacgaatacgacagcgtcacccctccaccgataaaccttatctcgggcatctgggcatgtgttcgaatgaatggattttatttatgcccgccacttgagatcgagaactcacccccgccatttgtcttccacagctctcactaccgcagggcctgcgcttccgcacccagaaacattgcatcgaaccccgtttccactcgtttgccacgacacgagaagatggaaagcggtgctatgggttcagtctggtgttctacgaggaaattcggaatcgaaacatttgcggggccattcacacgctacagagcatgttcatcacagagctctcgaatggccagcagacgcattccctcagtcgggtgaaacaggatggtccggtcagccggtcactgccaaggcactttaaggtggccggacaggcgccgcagtctgcacaaagttactacgacatcaacaaggacaagttgtacgtggcaaagagcatcacgctgatatgtcaggctccgtacgcctttgccgctcagatgtttcttaagaatctgtataggtaattgagatacatataaacgcagaatccttgtactaaatttcattacctcttattacctagatgtcttcctcgacagcctggtgctggtatcagcttggagtcctacgtatacaacatactctacgaggttatgctaccgcaaccgggcaagtccattcgggtttacctgcctcccacagagccacatctgccacccattgctttgattcttcagcgtccgcttcttgctaccgagttgcctctgctcgactttccgctcaggctgcttttcaagtacctgggtgtggagtgtgtcatacagctgctgacgtgcgtgctcttagagaatcaggtcctgctccggtccacaggtcagaacttgcaatattgcgaattcgtaacatatcttataaccttttcatttcccctgcagactatcaaagacttatgatcgttggtgagtgcattacctcgctgctgtttccgttcgtatggccgcacgtgtacgctcccattttgccggccgccctgcaccactttctggacgcaccagtgccctttgtgatgggattacatgctgagtgcgaagcggctcacaagatcggcagcgaagcaaccctttgcttcgtggacattgacaagaagcacatccagctgcccgaggagcttccagtctttcctcacaaggtggattttatggccgagattggttcggtgctggacaagtttgagatcgagcgagaccgcgaccaggagcctagtttccgaaacggctatgtgggcagaggagccggaggaggagtttctggatctggaagtagcgggtcaggtggcgtcgatgccatgatctccagctgcaccctgcccaccgggttacaggcagcacggcgaagcaaggagcgctttcagcagatgcaggagaccgtctatactctgtcgggatcgccgggtggtggcgtcgtggattaccaaccgctcatagcgcatccatcgcgaatcgatcatgtgccacggatcgcggactttctgcgtaggaagggaggtatcaggggagctggctctccggtgggaagtcccaccgtttcgctctcttcctcgccggttggcatctaccacgacgtagacgcagtggacgccaccatgccagtcagcactcgtcgcgcagagaaacaaaaactgagccctgtggatcagtactaccaggatctgcgcatcaacaactcggtgcgggagatctttctcaaccgattcgtgcacatgttccatgcctacgagtactttgtgatctacccaaatcaggctcgggacgaatggatctcaaaccgtgagactctgcagaacttcgacaaatcctcgtttctgtccgaccagccggagcaccatcgcgcgtttctttcgcgcttccttgaatctcagatgtttgccaccctaatcgacaacaagatcctggctatgtgggagtcgcagcccgatgaacagctccagctgtttgatcagcgcgtgaaattgctgaggtaagtcgctaaagtgcaatgataatcgctctattacttgtggttgatggccagcaaaattacttaccaccgttacaatgcagaacactaaggttttttcttgttgcattcgaatatttcaggcgacgacacggggaaaacatgattgccgccaccagctacgagccgtgcgtgctcagccaggactcgcagcagggcttcgagaagcggctcaactgcatcgacatcgaggtgacgcctcccagcgaaattctggccaaccgagcggcctacttccgcagctttccgctgctcgagaagggcgtgctcaaccaggagtgcgcctcgaggtagttgccctagtcgcctagttccgacacagttcccctgttcttgtatagttagtcgtagagcacgtcctgctttaagaccaaccaccagttcccattcctaaccctcgcactcatcctataaccaaaatccccgccggggataagtgtaccttggccccagaaggggtgacaaacgtttgatattatctaaatgttagttatagataccatagattcctagctgtagatgtatatcatgtaccttagttagctcaaattggatcaaatcgaatcaagtagcgcgttttacactggatactcccttccgttggtatcatacttttatttctatttctattcgtattcgtattgtttctcttagtgcataccacttaacaataaattctgcattctccaatcgttaaccgagactcttcttttcgtttgttttgtttcgttctcccgccgttaattgcaccgcatgcaccgcccacagctcaccgcctgctccacctccacccggtcacccatccaccccatcctccaacccccttcggagttcccactaatccgctgtctctttattctcggtcgaaattcaaactaaactcaaaccgatcttcaaactcattcgcgctaacatccatcaaacaaccaacctcaaccaaataccgtatccgaatccgcctccgattccgcatccgaatcccaaacagaggcaacagcctgcgacgggtgaagaacggcaacaagtggcgggcccgggagatctcgctggaccagaagcctggctcgaatgccatcaaccgactgtcggcgaatctgaccacggcggacgtgagtccggctctaatcgcccaggccaactggacgtttgtggagcgactgctgaaggtgtgtgttttggataacaaggtattgaatagaactaagccctattgtttgccctattgtaggatataaaatcgaagaccaagcggatgctgctggaaaaaatgggtaacgaggcggtggcgttgggcctcaaaggcgacggcattgaggagaacaccttgatagccagcatgtgcgatttgctggagaagatctggtcgcacggcctgcagaacaagcagggaaaatccgctctgtgggcccatttgcaggcctatctcgagatgcaggaggcccgaggtgctggcgacagctcaggaacagagcagacgccgccggtgtccagcagtccgggcggcaagatgaccatagccacagcatcgcccgctctggcctggaacgcaatgcgcaagcgcatggactgtaagtggagtttgtgttgcaatcaatcaattgtatatttcaatgtttaatctctattgtcagatctctccacattccaaacggacttcgacagcccgcccagtccgaatcgcagtcgctcgcgagatcgaaacaaattcgtgggcctggagcagctgtgcccacttcccgagtcgctggagttcgatgtgaagtaagtagcgaatcaggaaatctgcttccctaagtcaccaaacacttgcccctgcagaaatgtgctggccatggcggatatcaagacgcatattggctatacccgcgcctgggttcgcctgtcgctggagaagaagctgctgtccaggcactttcgtaccctgctctccgatgaggctctgctgcgatctctgtacaagcgatcggccttcttgcgctgcgaggaggagaaggaacagtttctctaccatctgctcactttgaacacggtggactacttcagctttaccaacatataccccacgacgagtaggtcacgctagcagtccaatatattgcctgtgctcacactcctcttggtttcgcattcccttcccgcccacagagctgccctaccgcgtcgtgatcttcccctcccgcaagtacggctcctaccacacctccagcaatgtctggatcatggtctcgggcaccatgaacgaaacgcaacgggtgcccgtgccgaagggatccttggagttcatattccatgtaagcttttcgctcgtgcatcatcactttcagatagccacctattgaattccctttcatttgcagtacaagaaccttggcctactgacaaccatgcgcattggacacgacaactcgggacccagccacaagtggctggttgagcaggtggtgatgcgcaatgaggtcaccggccacacctacaagtgagctaacagcaagttgttcaaccatgggctttgagtaacacaatattttcttaacccaaaaagattcccttgtgggcgctggctgggccgtggcgtggatgacgattccacggagcgactgctggtgggccaacgtgttttgacgaacgcgaagaatgcagagttagttcctggatctgatacgcgcacccctccacggacgcggagccccagtgtgcagcgccaggagacactggcaccatcagagattcaacaccagctgggcaactgcgtcaacgtgctggtcaaatggcattataagcccagccgggatcgggatgtgggcaccctgaccaacctgctgtgcggggacgatggtttggtcaagtgtctggagcaggtcttcctctgcggcttccggtcggcgcgattctttggacgaaatctgtacatctgggactatttcagtaagacacatagacattagggctttaatttgctttatgaataaaccttttaccattacagccaaaatcaaggagctgtttgaacacaatctgcagatggagctggaggactcatcctcaagcctagactcctcgtttagcaatggaagcggcagcggaggaaacagcctgcaacgtcgggaaatctccagcatttggcgtctgtacgtacagcttatggacgagatcaacggcacggcactcggcaaggacggcaagttccagctgcttatctgcttgagcttgcgggagcacctgctgacgcgtctgataaagccaatggccttgaccaaggtgacgcacgagatgtacgaggaggagagcttccttaggcgtcgcaacctcctcacctttctcatccaaatcctggagccgctggacgactgccacatcgtgctggaaaactcaatcacacagggcattcgcatcgcgtcccaatgctgaggatcggatgcaatacctaacgctcccactgcaatactcatgccacatctcacccacggacatttgcaaccagtgacctagagaatactcacatacatatgctcttgaggaatctcggaactctcgaattcgttgttagcttttaatgcgaagcggaggaactcctgcccctattacacctatttctagttctaactataatcccaagcctagccactaaccacttgccattcgacccttcgacagcttgccaagaaacagagtcaaacgctgaacgttttagggtaatggatgccagtcccgggaacactgaagccaaagttgaacaaaattccttgtcatcgacgcaatcgaattttaaagacatttactgtgcaattaagacgtttactataacaaattctaaaatgttgttcaaaaatctccatatatttgaaacgtatgcgtgtgtgtagcttagtagataaggtgtcccaatccgaaaccaaatccagtcaattatcctgagttccattatcaacagtagcttttagtttagttgattttaccaaagaatctttgttttttataacgaccaacttatggcgtacatattttttgtatattattatattttggtacttgagtgagtgaaatgagattaacccaaaggtgtttatgttataatcaagctttatttttacactttagccaaacacgtttgcagacactaccttaagaccctgaaagtcaataaatacaaatacgcaaatgatatatacgatttagttcgaataccgctggaaaatctacaaaattctggaagttccgcacagatataaatttaataaggtcgttacgaaagacagccagttaccaaatatattgttgacgccattgcgagcaaatgttatgcgaactcaaacccatggtcaacaatgtgttctgcatcccaaaacgttgtcggtcgcttgggaacattggacgccatctctcgcaaaatgtttccaggaggagcata

SEQ ID NO: 17432 - DNA, 4350 bp, DROSOPHILA
atgaccacaagggagaatgtggtttctagtcgcctgtccaagctgatgctcagcagcgggagtggaaatggcagtggcaatggaagtggtcccaacatccaggtggctccatcctccaccctggtgcaatctcccacctcgcccggggagcagtcccaatctcagtccgagctgaaccaactgaagcgggatgcggatccgcagttctcgcgcttcgccgactactttgtgatatgtggactggatctggacacgggtctcgaaccggatcgctttgcgggggacaacctacattgctcgccgctggatcgcgcctacaagagcaagcctttggcccattatcccgagaacgtgccctggaatcccttcgatgcccacggcatatgcatgctctcactaccgcagggcctgcgcttccgcacccagaaacattgcatcgaaccccgtttccactcgtttgccacgacacgagaagatggaaagcggtgctatgggttcagtctggtgttctacgaggaaattcggaatcgaaacatttgcggggccattcacacgctacagagcatgttcatcacagagctctcgaatggccagcagacgcattccctcagtcgggtgaaacaggatggtccggtcagccggtcactgccaaggcactttaaggtggccggacaggcgccgcagtctgcacaaagttactacgacatcaacaaggacaagttgtacgtggcaaagagcatcacgctgatatgtcaggctccgtacgcctttgccgctcagatgtttcttaagaatctgtatagatgtcttcctcgacagcctggtgctggtatcagcttggagtcctacgtatacaacatactctacgaggttatgctaccgcaaccgggcaagtccattcgggtttacctgcctcccacagagccacatctgccacccattgctttgattcttcagcgtccgcttcttgctaccgagttgcctctgctcgactttccgctcaggctgcttttcaagtacctgggtgtggagtgtgtcatacagctgctgacgtgcgtgctcttagagaatcaggtcctgctccggtccacagactatcaaagacttatgatcgttggtgagtgcattacctcgctgctgtttccgttcgtatggccgcacgtgtacgctcccattttgccggccgccctgcaccactttctggacgcaccagtgccctttgtgatgggattacatgctgagtgcgaagcggctcacaagatcggcagcgaagcaaccctttgcttcgtggacattgacaagaagcacatccagctgcccgaggagcttccagtctttcctcacaaggtggattttatggccgagattggttcggtgctggacaagtttgagatcgagcgagaccgcgaccaggagcctagtttccgaaacggctatgtgggcagaggagccggaggaggagtttctggatctggaagtagcgggtcaggtggcgtcgatgccatgatctccagctgcaccctgcccaccgggttacaggcagcacggcgaagcaaggagcgctttcagcagatgcaggagaccgtctatactctgtcgggatcgccgggtggtggcgtcgtggattaccaaccgctcatagcgcatccatcgcgaatcgatcatgtgccacggatcgcggactttctgcgtaggaagggaggtatcaggggagctggctctccggtgggaagtcccaccgtttcgctctcttcctcgccggttggcatctaccacgacgtagacgcagtggacgccaccatgccagtcagcactcgtcgcgcagagaaacaaaaactgagccctgtggatcagtactaccaggatctgcgcatcaacaactcggtgcgggagatctttctcaaccgattcgtgcacatgttccatgcctacgagtactttgtgatctacccaaatcaggctcgggacgaatggatctcaaaccgtgagactctgcagaacttcgacaaatcctcgtttctgtccgaccagccggagcaccatcgcgcgtttctttcgcgcttccttgaatctcagatgtttgccaccctaatcgacaacaagatcctggctatgtgggagtcgcagcccgatgaacagctccagctgtttgatcagcgcgtgaaattgctgaggcgacgacacggggaaaacatgattgccgccaccagctacgagccgtgcgtgctcagccaggactcgcagcagggcttcgagaagcggctcaactgcatcgacatcgaggtgacgcctcccagcgaaattctggccaaccgagcggcctacttccgcagctttccgctgctcgagaagggcgtgctcaaccaggagtgcgcctcgagaggcaacagcctgcgacgggtgaagaacggcaacaagtggcgggcccgggagatctcgctggaccagaagcctggctcgaatgccatcaaccgactgtcggcgaatctgaccacggcggacgtgagtccggctctaatcgcccaggccaactggacgtttgtggagcgactgctgaaggatataaaatcgaagaccaagcggatgctgctggaaaaaatgggtaacgaggcggtggcgttgggcctcaaaggcgacggcattgaggagaacaccttgatagccagcatgtgcgatttgctggagaagatctggtcgcacggcctgcagaacaagcagggaaaatccgctctgtgggcccatttgcaggcctatctcgagatgcaggaggcccgaggtgctggcgacagctcaggaacagagcagacgccgccggtgtccagcagtccgggcggcaagatgaccatagccacagcatcgcccgctctggcctggaacgcaatgcgcaagcgcatggactatctctccacattccaaacggacttcgacagcccgcccagtccgaatcgcagtcgctcgcgagatcgaaacaaattcgtgggcctggagcagctgtgcccacttcccgagtcgctggagttcgatgtgaaaaatgtgctggccatggcggatatcaagacgcatattggctatacccgcgcctgggttcgcctgtcgctggagaagaagctgctgtccaggcactttcgtaccctgctctccgatgaggctctgctgcgatctctgtacaagcgatcggccttcttgcgctgcgaggaggagaaggaacagtttctctaccatctgctcactttgaacacggtggactacttcagctttaccaacatataccccacgacgaagctgccctaccgcgtcgtgatcttcccctcccgcaagtacggctcctaccacacctccagcaatgtctggatcatggtctcgggcaccatgaacgaaacgcaacgggtgcccgtgccgaagggatccttggagttcatattccattacaagaaccttggcctactgacaaccatgcgcattggacacgacaactcgggacccagccacaagtggctggttgagcaggtggtgatgcgcaatgaggtcaccggccacacctacaaattcccttgtgggcgctggctgggccgtggcgtggatgacgattccacggagcgactgctggtgggccaacgtgttttgacgaacgcgaagaatgcagagttagttcctggatctgatacgcgcacccctccacggacgcggagccccagtgtgcagcgccaggagacactggcaccatcagagattcaacaccagctgggcaactgcgtcaacgtgctggtcaaatggcattataagcccagccgggatcgggatgtgggcaccctgaccaacctgctgtgcggggacgatggtttggtcaagtgtctggagcaggtcttcctctgcggcttccggtcggcgcgattctttggacgaaatctgtacatctgggactatttcaccaaaatcaaggagctgtttgaacacaatctgcagatggagctggaggactcatcctcaagcctagactcctcgtttagcaatggaagcggcagcggaggaaacagcctgcaacgtcgggaaatctccagcatttggcgtctgtacgtacagcttatggacgagatcaacggcacggcactcggcaaggacggcaagttccagctgcttatctgcttgagcttgcgggagcacctgctgacgcgtctgataaagccaatggccttgaccaaggtgacgcacgagatgtacgaggaggagagcttccttaggcgtcgcaacctcctcacctttctcatccaaatcctggagccgctggacgactgccacatcgtgctggaaaactcaatcacacagggcattcgcatcgcgtcccaatgctga

SEQ ID NO: 17433 - protein, 1449 aa, DROSOPHILA
MTTRENVVSSRLSKLMLSSGSGNGSGNGSGPNIQVAPSSTLVQSPTSPGEQSQSQSELNQLKRDADPQFSRFADYFVICGLDLDTGLEPDRFAGDNLHCSPLDRAYKSKPLAHYPENVPWNPFDAHGICMLSLPQGLRFRTQKHCIEPRFHSFATTREDGKRCYGFSLVFYEEIRNRNICGAIHTLQSMFITELSNGQQTHSLSRVKQDGPVSRSLPRHFKVAGQAPQSAQSYYDINKDKLYVAKSITLICQAPYAFAAQMFLKNLYRCLPRQPGAGISLESYVYNILYEVMLPQPGKSIRVYLPPTEPHLPPIALILQRPLLATELPLLDFPLRLLFKYLGVECVIQLLTCVLLENQVLLRSTDYQRLMIVGECITSLLFPFVWPHVYAPILPAALHHFLDAPVPFVMGLHAECEAAHKIGSEATLCFVDIDKKHIQLPEELPVFPHKVDFMAEIGSVLDKFEIERDRDQEPSFRNGYVGRGAGGGVSGSGSSGSGGVDAMISSCTLPTGLQAARRSKERFQQMQETVYTLSGSPGGGVVDYQPLIAHPSRIDHVPRIADFLRRKGGIRGAGSPVGSPTVSLSSSPVGIYHDVDAVDATMPVSTRRAEKQKLSPVDQYYQDLRINNSVREIFLNRFVHMFHAYEYFVIYPNQARDEWISNRETLQNFDKSSFLSDQPEHHRAFLSRFLESQMFATLIDNKILAMWESQPDEQLQLFDQRVKLLRRRHGENMIAATSYEPCVLSQDSQQGFEKRLNCIDIEVTPPSEILANRAAYFRSFPLLEKGVLNQECASRGNSLRRVKNGNKWRAREISLDQKPGSNAINRLSANLTTADVSPALIAQANWTFVERLLKDIKSKTKRMLLEKMGNEAVALGLKGDGIEENTLIASMCDLLEKIWSHGLQNKQGKSALWAHLQAYLEMQEARGAGDSSGTEQTPPVSSSPGGKMTIATASPALAWNAMRKRMDYLSTFQTDFDSPPSPNRSRSRDRNKFVGLEQLCPLPESLEFDVKNVLAMADIKTHIGYTRAWVRLSLEKKLLSRHFRTLLSDEALLRSLYKRSAFLRCEEEKEQFLYHLLTLNTVDYFSFTNIYPTTKLPYRVVIFPSRKYGSYHTSSNVWIMVSGTMNETQRVPVPKGSLEFIFHYKNLGLLTTMRIGHDNSGPSHKWLVEQVVMRNEVTGHTYKFPCGRWLGRGVDDDSTERLLVGQRVLTNAKNAELVPGSDTRTPPRTRSPSVQRQETLAPSEIQHQLGNCVNVLVKWHYKPSRDRDVGTLTNLLCGDDGLVKCLEQVFLCGFRSARFFGRNLYIWDYFTKIKELFEHNLQMELEDSSSSLDSSFSNGSGSGGNSLQRREISSIWRLYVQLMDEINGTALGKDGKFQLLICLSLREHLLTRLIKPMALTKVTHEMYEEESFLRRRNLLTFLIQILEPLDDCHIVLENSITQGIRIASQC

SEQ ID NO: 17434 - DNA, 8482 bp, DROSOPHILA
tcgcagaccctttttaatgacaatgtttacgcagctgtgtgaattcgaattcttcagataaaaatgacagattagcaaactaaattagacatgctgtgcgagtagtaaaaataatatctatccgctgcctctgcttcgcaaataaataaataccagaaatacaaagttttcgtgttgatttgtgtgttgttcaagaaatatgttgttgccgcagtgtttttccaatgtgttattacttcacaacatcatcggctgtttgaaaagtaacaacctgcggattcgtatgatatccatgtgttttcattaaccgacatgtgagacatttaggatatactcatcacccacgtttgtataaatcacactcggtcttcgttgacctctagccttgccctgcgcagcatagttcgcttttccccatgacgtaataatcggttcagcacaaaatcccatttatgatcccatttattgtatgattatgattctttgttcgaatggcagttgaaatgcgctttaattagaaaccaattggatgctgacggattcaattcgcatattcaaaatagtcggacgtgtgtgggtcgaaaatagatgaaaggtgttgactatggctatattgtcgggcagccctttgaaataatgtagaaccagctgggttttatttagctaaacgactttttaatatgggcaaataataaacaggtggattgcacaatatgcgaacatatttattatcaaacattccttctatttaaatctctagatagatttcataatagtacgagatacgagatacaacgagtttacgctgagaattgggctgttttcatggcgtttattggcctcgtaatctccattacgctcaaatgaagtcacaaaccaaattacctcttgcattgaccacgtttttgcaactatattatggcctttgatgccactgactgaaccgactgtttaacaaatttttgaactcgttcgctagcattctaaaagccataagttgatggccttcgtgtctggtttcttcgacgattggagttgggcctgcattatgtacataactttatattttcgcatacccggccatgttctcatgtatctttgtacacacgaatgcctgtgctaatattacagattgagattgaaaggccaatctttcgagagctggcgatcactatctgttcgaactgtaatctacaattactttattctcccagctatttctaatgatttgtgaagtcaggtctcagactcattgcttagccatgatgtgctgttaatgaagttatattacctttcaatccacttagcagcttatgtcataagtcgttctctctgaaaataacccgaataagccataacatctgctgtgcctaaccaacatctgataatatcccatgccgcaagatccatcacctcatccagtgttctgtttcctgttctgtgttcctgtgttctgtgttctgttctctgttgaaaccgaggaatatgcgttgaatccaaggagtttttgcctcaccagctttctcgcgcttgcgatatgatatctaaaagatccacctatcctcttcctcaatcggaaactttgcagctaatgtcataaggagtctcaagcgccgtctcgcaaagccgctgaaaatgtccgaggacctggacgagctcttcctgacgcccattccggcgccctcggccgtggagctgcagcagtgcatactgttcggcttccggcgccgccttcatcccgcccagatattcgaggagtgccgcaacgcctttgggcccttctgccccagtgcgcagtacgtggcgaagtggtaccagcggttccaggacggcttcttcaatctggacgagaaggacgacgaggagctgaggatcgggcatggcggcacgcccaccacctgcagtgattacgatgatgacagtgattgcggggaggcgaccgttctgcccctgatcctaagtgaaatgatccaacgcagtgaggaggatgacgatgatgatggtactgatggttttgagaaggagagtgatgatggtctagatggtcatgtgattggttattggcagggttatggctatttgggtggcaagcaaaggtatagttgggctggaactaaactgtatgtacttaaccccagtttgtactccatgatattgatccgtgtcttccaatcaatcttctccttgcagtggaaactcggcttgcgagctgcccccgctgccgaaatctctcatcggcttcaacaagttactgtgctccgattcgggactcctgagtgatgtggaaggaaacaataacagcagcgatggcagccgaaaaccaaacgacaatcttgctgtggagacacaggataccaaggagcatgccaccgataagtcactgccctcctcgccgaacggaaacacatccataccaccaatgctggtggccaaatccgaggccaagtcccccagcttatccgccaaaggaaacccccaggcggtcgaggcgggcagcactctggatgcccagattgcgacgctgcggaaggaaatggtgagatctcaatcatattttattgtacaatagttgggatgaaagcgtgtgccatacgattgcttccatatatatttatagtttatgttggagagtttccataataggtaaaagtatctttagaatgccgaaacaccttactttcgaccactgactcagtttggaactgaagtatttcataaaatttgcatcttaaacgaagcaatttaattcgccggccaggaaccagttgtgtgaagtgacgaagcaagctatttttattcgcgtgctgtcactgtagtgccgaaatataacacacttctcgagggtacgagctgcatttcgatgtgaactttattgacctgctgggtatgccgcagttcagccgcctaatggcaacttctgcggcggggcaaagtctaaatgttggccaaacctttcacatttaatttggtttggtggctggcagtggctgcggttcgatacatatagttagatagattccatggcattatggtcgtaagaacctgtttaatgcccgcttaggcgtaggtgtaagcaccccccacaagtgtagtaagccttgggttaggagcggccacttcggcggtattcaagtctcggatcaaatcaaaagcgaagtcttctgagtaaaaacgctgacttttcgtgctgctccgatttagacgtcgatctgtggcggcgctcaacaattggaaataaatactaaattgtgcaccatttaaagcattttgcgcaatttgcatgtctgctgttgtgcaatatggcttttaggacgtggccgagacgcggtcttgggcgcaaatgtgaaatatttgtgggccacatttcctgtgcaatatgactgttacacgcgcatttcacgcggttcaagcgattctattagctcgtagatttcgccgccacaaagcctaaatccaatgacactttaattggtcattgtatttgcccaaccatttgtgattgtgtgttattgctgcggggcatttgaatctatttgttgccacaatatctctgcgggctttgtttatctaactctaccgggtcttagtcactttcgggccaagttgggccgcaaaaatctaatcgaaatgccatcgggcggacataaagccctggcattcgaaggaaaacactcgtttcttagcaaagaaaaaagaaaataaataaaaatagatccgcatcaatgggggaagtgattttggatttattttttaaactaattaccagcaccatttgttagggtatcgcagtgctgacctatctgaactatctttccatggttttcgcaaatgtttcggtctcggtcggttgattaacgattcaagctctgatcgctcagttcggtgggtgtgtaagccagtaagtatgggtatgggtattatgggtccggtgtgtgaatgtgtttcttattttgcaattatgctagttggccgcttttgcttttgcttttgcctcgctgtgcttttgctttcgaatgccgaatactgggcagagattgagtggttagccttcttggtgaacccaagatactgatatgcattgttcactcactcccttatttgatataaagccgcttttactcattcgatattgtagattgtagacgaattgaaagtaaatatttgccgaaggtcagtgcggtaaaggggctattattgggttattagatcggctttcagtcggtggcacaatgggcttttggcttgccacctataatgcgattatccattctacagaagcatgcttttcttaccacaattaatgcgtttacatttggttaaacaaagaaacggatgcttgtacaagttcaactcgatctattggctcccttagacctagatttttgttgtatttctggtatatgtatgtatcttgtaaccccaattgcaattattccttggcatagttgcagagcttgaaaccatcctaccttatgccccccatattaatagatgattgtcaagtcaaattacgctcaattgttagagccgccattcccagcgccatcagcggcaccatctctaatgtgagcaacgatgaaaatgaagtaataaacccggttaatgcaacacaacgcatcggggagaaataaacccgagtggggccacaatgggagaaaacaggagtacgactaatcagcgcatgcgcagccattaagccaggcaatccagcaaactggcaagctggcaagctggcaacttggcaatcgggcaagtgggcaagtaagcaagtgagcaagtaagcaagctggcagcaaagcaacaacaaagcggcgggtccgcttcagctaatttatgttgccagatacctcggttatggcagcaaattaaatttatgaacaaaaaaaaaaaaaaggcagcaaaagcaagagcaggcagctagctaagcaactaaagagccagcggacagtttgtgagaagaaatgcatcaatgcatgaaatggatttttacggcttacataaaacggccttgaacgaccaagcccggcccgggcattctttctccggctccaagatcgtcggctagcgattaggccaagtctcaagtctaaagtctcgcagctcgaatctcgagtctgaagagacttggccaagaaatatccccatttgtggctaatcgcttctcacttgttccactttatttggcacatgcgaaccgagctcagtttatcagaccgcgaacatgacacgccaacctcttgccgagggctctgccacatacgagtatgtataaagatacacattcgttctgcaatcccaagttgccacatttgcctgcctctcgagttaattaaatccgtgcggcgaatcacacacgtacataaaagggtgcgaagaagccttacggatctgatcgtaaagcatacaaatcatcaatagatggcactcgcaaatgttcgaatagctaaatggcaaaccatctgggcggttccatttgacaccagaaaatcgctgagattccttcccgtttcctgatcttccgcatttcgcgaaaaggtgccgcgttcggctgcagagttcacgcatcggtgcagaaatgtttgatgtgagctgaatggcttcgcggctaaagatagaacgcgccagtatttatcttggatcttgggcagatccgtgtgtctatatccagctaaatatatatatatatacatatgcactgatttatgcggcagggcggtggcagccttgtctggcatttgcagcgttcattgccatttggcgctgttgcatttaaagatacttctagggcttctgcttgtgtcaaagcctcctaccaccactcaatataagccacaaagcaattttagcgcaaagggcttaaggctaattaaattgtcaactacacacgtatcgattcgatttatgacagcaaatgaattgctaaaactaaaagaaataccaaaagatggaaatacaatattattgaaagatgtagattatatacatatacttaaaggtacttcatacctaaccagcatgacttctaatcaagattgcttgcctatcacccgattggcctacttagtttctggccaagctcgctaatagtattagcacacttgtatttggatcgactttccacggataaccctgccagtatgttaatttgcaactaattcacattcgacccgaggcgacgcccccgccaaaaatgtggcgaaaagccgaaaggttttgtacagctggcattaatccggcaaaaactggcacacacacacttaacatggccaacggcaaatggttagaaagaagaaactaagatgggctgttttaagcggagaacacgtagatacttcctcgttgttgggaaagttgaggaaaagcggaaaattagccgatgcagaagtattgaatattgaagaggaaacctcaaatgactaattgctaaccgtattctagacggaagtgaggaaaattgagttttgtggtttttctggggcgagcgatcgcaaagggaaagcttcttcacttgacttatggccataaaaggtgtatataaatatttaaatattttaatattttcatttattaagtgacagtcacttcttattaactcaactttaatttgctttcgcagtcaatctgaatgaattagtaagccaggtgggagttgagttggtcgtcagcaaaaacgccggcttgagcggatttggctaataccacgatgctgcggcggctgcagaaagtttttctgcttttcttttggcgcgatattatgccgcgatattaattgacaaatgagatttttccttcctactcgacagcgacaggggaactttcattttgaccacaagcgtcatgccacgaaaatacaggccaaaaactaaaagaggacatgggtattgggattattcatggtcggccggccagccagacgagatatatatttcggataaggcaatctgaatcaataaaatgtaaagtaactactttgcagagataaatcaacgggctacgcccacactgagtataactaagtaactttcaaagtgtcccgaatttagtagtaatcctgtactcgatttttcattccagaacggactgcgtcaactagatctctcgttgctgtcacaactgtgggtgcttaacgaatcgatccaagagttccgcgccctgatcgaagatcaggagaacgaggatgaggacgacgaggtggaggtggaggtgggaaacgagctggacgaggagggcaacagccgggtgtcctcgtccatcgagtcggtgcgattggagggcggtgctgatggcacgtcgaagcatctgggaaccataccaaaggtcataacgacgcagccaaaggtgctgagggactcactggccacggccagcaaggaccagaagccggtgcccaggatgcggagtgccccgccaccgccacctcccgccgtgctgcaatccttgtccctggagcgaaaaccgccggctccgtcacgacccacatgatgttacctctcggacttcctcgccggagtcaggatggtcatgtgcaaggcgatcgtgagcgatgtgcccgcctcatccgcgtccgcgtcccttggaggcgatggagccccgcttggccgggacgcgcagagctgtttgggcaaccagactggccaggtcctccaagcatagttttagttgatatatccgataaacaaggtgtacgagcgattacgagcgaactgatccaaattctgggtgcactggcagcagttctcgaagtgcccccacaaagaatcccgttgcgaagcctagattatctgctgcttacctcaatataggaagacccaacataatatgtataattggtagaattcgtgagaccagcctctgtggttaggagtcctttgtgatcttcagttgtaagtttattgtacatttttctcttgtggtttgggctgatgggtttcaccgataacacttgtttttgtttaatagccttactcgttaagcttagctatcgaatgcagtgtatcctggatcgatctgcggatcctgtgcatttgaccagtaacatttgtatatagcgattttcccggctagctgctgaacattttataaacctaacgaagagcatacagaataaaaaacttgaaagaagcgttgtttgttttgggtgtcgcatttgtatttctagatcaggctaactccatccatgcccacttggatgcagggaaaatcgtagctggcgacctggttcgtggcataatcggtataaaaggtgggacaggccttgaccgccactcctgccaccttgatgtttactttgatgcacatgtccagggaaaccattgagatgacgggaatgcaatatgtgggcgggttggcggtgctgatggatagcgcggccaccgaatttccatccattgtggcccccaaattgatggttccactggtcaagccaatgcccaaagtgaggcagacttgaaggggaatttggtataaggtaagggttatatga

SEQ ID NO: 17435 - DNA, 1296 bp, DROSOPHILA
atggccttcgtgtctggtttcttcgacgattggactaatgtcataaggagtctcaagcgccgtctcgcaaagccgctgaaaatgtccgaggacctggacgagctcttcctgacgcccattccggcgccctcggccgtggagctgcagcagtgcatactgttcggcttccggcgccgccttcatcccgcccagatattcgaggagtgccgcaacgcctttgggcccttctgccccagtgcgcagtacgtggcgaagtggtaccagcggttccaggacggcttcttcaatctggacgagaaggacgacgaggagctgaggatcgggcatggcggcacgcccaccacctgcagtgattacgatgatgacagtgattgcggggaggcgaccgttctgcccctgatcctaagtgaaatgatccaacgcagtgaggaggatgacgatgatgatggtactgatggttttgagaaggagagtgatgatggtctagatggtcatgtgattggttattggcagggttatggctatttgggtggcaagcaaagtggaaactcggcttgcgagctgcccccgctgccgaaatctctcatcggcttcaacaagttactgtgctccgattcgggactcctgagtgatgtggaaggaaacaataacagcagcgatggcagccgaaaaccaaacgacaatcttgctgtggagacacaggataccaaggagcatgccaccgataagtcactgccctcctcgccgaacggaaacacatccataccaccaatgctggtggccaaatccgaggccaagtcccccagcttatccgccaaaggaaacccccaggcggtcgaggcgggcagcactctggatgcccagattgcgacgctgcggaaggaaatgaacggactgcgtcaactagatctctcgttgctgtcacaactgtgggtgcttaacgaatcgatccaagagttccgcgccctgatcgaagatcaggagaacgaggatgaggacgacgaggtggaggtggaggtgggaaacgagctggacgaggagggcaacagccgggtgtcctcgtccatcgagtcggtgcgattggagggcggtgctgatggcacgtcgaagcatctgggaaccataccaaaggtcataacgacgcagccaaaggtgctgagggactcactggccacggccagcaaggaccagaagccggtgcccaggatgcggagtgccccgccaccgccacctcccgccgtgctgcaatccttgtccctggagcgaaaaccgccggctccgtcacgacccacatga

SEQ ID NO: 17436 - protein, 431 aa, DROSOPHILA
MAFVSGFFDDWTNVIRSLKRRLAKPLKMSEDLDELFLTPIPAPSAVELQQCILFGFRRRLHPAQIFEECRNAFGPFCPSAQYVAKWYQRFQDGFFNLDEKDDEELRIGHGGTPTTCSDYDDDSDCGEATVLPLILSEMIQRSEEDDDDDGTDGFEKESDDGLDGHVIGYWQGYGYLGGKQSGNSACELPPLPKSLIGFNKLLCSDSGLLSDVEGNNNSSDGSRKPNDNLAVETQDTKEHATDKSLPSSPNGNTSIPPMLVAKSEAKSPSLSAKGNPQAVEAGSTLDAQIATLRKEMNGLRQLDLSLLSQLWVLNESIQEFRALIEDQENEDEDDEVEVEVGNELDEEGNSRVSSSIESVRLEGGADGTSKHLGTIPKVITTQPKVLRDSLATASKDQKPVPRMRSAPPPPPPAVLQSLSLERKPPAPSRPT

SEQ ID NO: 17437 - DNA, 3533 bp, DROSOPHILA
ctatataaacatattgaacatacaaggtcattatctattcaagcgttccaaataaattacaagacttttggatttggaaaaaaatttgaattttttagagagaatatcggatatgcaaataaggataaagatatataaatagtcttttccagctaacgtttatttaaatacagctgaatcctttattgaggaatatttttttcatccgtatacaataagacaacatttatttatcacataaaaaaccgaacagctatttccggaattttgaaaaccgatacgttatcggtagttgaagcgaatttggtctggcaactatctgcgacgttgccatattgatgacacagcgatggttcgcataaagaataggtaaatattgaccgcgttttccttaacgatcattaattaaaccatccataaacaggtatatagcggtgcagattgtgccctacacgccaacacaatctctgcgactcaacgaccacagcctgaccaagatcctgcttcagaatgtggagaagtattacggagtctatggcctcgccgtgatcgagcagggatttcgagtgaaatacatcaacgatcgcacgaaaatggcaatcatacgctgtctccatcgaggccaacgcttcgtgtccagcgtattgccattgattactttggttggtctcattgccatgtccttaaaccagctataaaaccacatttctttcagatcggagatgtacgggccaagtttaggacgctgtacattggtgccaccatcatccaatgcaacaagttcatagtcaagcaccaaaaacagttcctggaccgcaccatgggtcagataacctccgccaaggagcgccaggatctcttcaagcgcgtaatggagttcgacatggacagatagcacatagtttgtttagaatgtaattaagtaattatatttaatggttttcttatagaaaacccatgcttccaattcaactaaaatgtgagtgtttttggtatcgttctaaacttcgatgaggaatttgcgactcggtgagcgggcaaccttggctccaaattgctttattctctgccggacgtcggccaacgtcagcttgttcctcttgctgtagacattgagatatatgcccaggacaacgatgaggcccgaccacagatatctgaaagtttgggataggtataatagagctttgtctttagaaatacacagaatagtacttactgtaaggtaaagggcttgctgaaaagcacaaaggagaaggctatagtcacagccttgcgggcggtggtcactgtggcagctatgggggcaccactactcctcaccagagccagcacaaactgaatgcccagatagccggacaaactaaagaggaagccatagccgaaggtctcaacgggatgctaaatggataatacactttagatctcttacatcataaacctcaaatgttacccacctccaaacagaatgcaaagccgctgaagaagttgccggtaaccagcataatcacaaataggtacacaaaacccaagccgtatgagtagaacaccacctcactgctgggcgccttgaattcccgcatcgccttctcctggacattgccaatggctgcgtcgcagagcagcgctcccgaaatcatggccacaccaagcagattgaaattgggcgtcatctgggagtcggccagcgtgaaccaggccaatccgatgcacatgcaggtggctgccgcaaagtccagcagtccgtagcgtttgccctgtatgaggatgctgcccaccagcacgggaatgagcttgcagcacttgaaaatcacctgggtgggatagttcaggtagccgagacttgagttggacagacccatggtacccagcgtgagagcagccagaattaggtatgttctcatgggaatgcaacgtggctccggctcaatgttccaaaaggaaccgccgcttatccgatagccctccagccgccgctccaccaaaccgaagccgatgtagtagccaaactggacgagcgtgaggaaccatccgtagggtttgaatccttcgacggtgaagatcagctcctgcagatagccgtacaggatgtacaggaagaagacgccggcgcagctgagcaggaactgagttgtgcgattgtagtaggtgaggtcaaagcaaaggatacggagttccggcggagattccgacgtcgaggacttccgctgcgagggcggcgagtttcccgccgattcgccgccattaatggtgataacgctccccttattatcggtcattctgctgctagcggatgtgtctatatacatatacacactatatagtggctatttcaagattatatttccagggagcccgtgtaattcaatgccacgctgtccgcggagttgtcggtttaaagtgcggatttgtcatgcctcctcggatgctgcattaatcacgggccggcgtggagatttctgttgggtgcaaattgccctggctaaatgtttgtttaccacaaataaactatttttgtcagcttagaactgagatagacgcgcggcgttgccacgttgtggtaataatagaagagagaccggtataacgtggaacaagttggcagctctgctaccaccgtcattctaattggaacttctgctactggcaataaatacatttaacaaatgagcagcgataaaggtttaagccgcttttttgctcaaaaaagcgtatgataagcgctaaaaactacttaaaaagtagtgccgagagtaactcctagtatttgactacatgtcgttctaagaatacaaagatatgggcacactgtcggaaaaaacaagaagaagcagtgaaaagtgccgctgaaaaagtgcaaaaagttatgaatttagtattttacataggataatagtgctaataacagtcgcaaaatggacgtgcaaccgccacgcggtaagtgcagcaattaaaaagtgctgaatataacttaaaatcaagctaattttgtgcccaagtcgattggcatgcacatgtgtacacatacaaacaaacaagcgcacgcacaacctttgatatgctcacattttttgcaaaaaccatttgctttctatttgcagatgccagtttacgaaatattatcgacaaactggcggagtttgtggccagaaatgggccggaattcgaggcgataaccaagcagaagcagcagaacaatccaaagttcgagttcctctacggcggggagttcgccaactattatcaattcagggtggcagcggaacaagctcgtgagtgcgttctaaattggtggaaaataacccctataatctccttttaacacccaatacagtgctaaagcaacaggccattaaccaacaactgccaccaggtgctccatccggccactacatgcaacatccgccgccaatgcagcaatcccaaccaccgggcctctatccgccacccaatcagcagccaccgcacccgcccgaaaccgcacaagacaatatgcaacagcaaacacagcactcctggccgccgaactccgg

SEQ ID NO: 17438 - DNA, 1415 bp, DROSOPHILA
ctcagttctaagctgacaaaaatagtttatttgtggtaaacaaacatttagccagggcaatttgcacccaacagaaatctccacgccggcccgtgattaatgcagcatccgaggaggcatgacaaatccgcactttaaaccgacaactccgcggacagcgtggcattgaattacacgggctccctggaaatataatcttgaaatagccactatatagtgtgtatatgtatatagacacatccgctagcagcagaatgaccgataataaggggagcgttatcaccattaatggcggcgaatcggcgggaaactcgccgccctcgcagcggaagtcctcgacgtcggaatctccgccggaactccgtatcctttgctttgacctcacctactacaatcgcacaactcagttcctgctcagctgcgccggcgtcttcttcctgtacatcctgtacggctatctgcaggagctgatcttcaccgtcgaaggattcaaaccctacggatggttcctcacgctcgtccagtttggctactacatcggcttcggtttggtggagcggcggctggagggctatcggataagcggcggttccttttggaacattgagccggagccacgttgcattcccatgagaacatacctaattctggctgctctcacgctgggtaccatgggtctgtccaactcaagtctcggctacctgaactatcccacccaggtgattttcaagtgctgcaagctcattcccgtgctggtgggcagcatcctcatacagggcaaacgctacggactgctggactttgcggcagccacctgcatgtgcatcggattggcctggttcacgctggccgactcccagatgacgcccaatttcaatctgcttggtgtggccatgatttcgggagcgctgctctgcgacgcagccattggcaatgtccaggagaaggcgatgcgggaattcaaggcgcccagcagtgaggtggtgttctactcatacggcttgggttttgtgtacctatttgtgattatgctggttaccggcaacttcttcagcggctttgcattctgtttggagcatcccgttgagaccttcggctatggcttcctctttagtttgtccggctatctgggcattcagtttgtgctggctctggtgaggagtagtggtgcccccatagctgccacagtgaccaccgcccgcaaggctgtgactatagccttctcctttgtgcttttcagcaagccctttaccttacaatatctgtggtcgggcctcatcgttgtcctgggcatatatctcaatgtctacagcaagaggaacaagctgacgttggccgacgtccggcagagaataaagcaatttggagccaaggttgcccgctcaccgagtcgcaaattcctcatcgaagtttag

SEQ ID NO: 17439 - protein, 386 aa, DROSOPHILA
MTDNKGSVITINGGESAGNSPPSQRKSSTSESPPELRILCFDLTYYNRTTQFLLSCAGVFFLYILYGYLQELIFTVEGFKPYGWFLTLVQFGYYIGFGLVERRLEGYRISGGSFWNIEPEPRCIPMRTYLILAALTLGTMGLSNSSLGYLNYPTQVIFKCCKLIPVLVGSILIQGKRYGLLDFAAATCMCIGLAWFTLADSQMTPNFNLLGVAMISGALLCDAAIGNVQEKAMREFKAPSSEVVFYSYGLGFVYLFVIMLVTGNFFSGFAFCLEHPVETFGYGFLFSLSGYLGIQFVLALVRSSGAPIAATVTTARKAVTIAFSFVLFSKPFTLQYLWSGLIVVLGIYLNVYSKRNKLTLADVRQRIKQFGAKVARSPSRKFLIEV

SEQ ID NO: 17440 - DNA, 3082 bp, DROSOPHILA
cacccaccactggacttcctttgcgattcagcagacgaggacttgccatgatgagaggattgaggctgcttcttgctgttgctgctgttgttgctgtccatcgttgtggatactggaggtgcacttgtcttggggaatagtaatagtatgggtgctggacagctgccagtgggcggctaattgcgtcttgcctaggtctccacacggagtgcgctgagcaaagtattctcgttgcggattcatgtttactgagccatgattatccaacgggtacgactagaaatagtacttgcgtaatatttccaaaaaatcaaatgcggcttttgcgagtaagtgcagttaaattcgaggcgaaagtacttttttaagtacttggacttgcggctcgattcttcttctctttttctagcacttgttttgttgttctattagtctgtgggtcgtagtattagtagctgtaatcgtattggtgcctaaaaaggtgtgacgtctgcgctagctgctctttgcgggtccaaaaccgaatctttccgacaattaccacttgccaattgcacacacactgccgacacacggtctctgctatcgcggggtttcgatttgacgtctcgaaatcaacaaattttgatggaaaaaccaaatatcctttggtcagggaaaaaaagcatccgtgatgcccgatagaaaatggctgactgtaagtgctggaaagtgcctcgcagagagctgatggtgtgctttggtatggtcgtgattcgtcagagaaaactatcgcacaaggtaattatatataattataatgtcacattggatatttaaataatattaaaggaaatactttttttaatttaatacttcgtataatacgtttgaagtgagcggagctgtgttgtgtaaaatgtgctgttgcaagttgcgttaccgatgttcctagaaagtgtcatctcaattaggcaaaagtataacagctgattttgttatctgagccgcactttgatcggcctttgaataagatatgttagaatcaacattgcagtaacccccaacgacatggactttcggaacgcccgcgcccggcagccggagatcgtgagatccgtgcagaaggatgcacggtacaccaacgagctggccgaagacttgtccgatgtcttgcgcctcaccggtccacggaactggataaagtacaaccagatgtgccgacttctggcggagctcagttaccacggattcgcctcggccaataaccttcagaccctcggcgaagagtacacggggataatacaggtggacgggaactataagcagattcccagcagattggtaagtaaagaatactcgaaaagaaaacatttgtaaacgtcgcgcatcttttagttacaactgattgccattgtcctggagtttggtggcgactccctgttccaacgattgatgcaaaaacttgacacctacgtggccaacaatgacgagattcgaaccgagatcaagccgcagctaaagaagattattcagaggctcaggcaatctcccagctacgtaaaggccctgcacaagtctctattctacttggacgccagcaagtaccagctgtccaagcgcaccacgggcatcaactacgtactaatccgtcactggctgcagccggaattctcgctgtacggctacaagatactgggcgtaatcactttcctgcaggtcagcgtttccttggccattagtggatgggatgcctggagagagcacaagcgccagcagctagaatcaataaagcaggctggaaagaatttcctgcaaagatcttcgagtacaaaggacgtagatccaaacaccccacagtgcatcctttgcctggagccacgttctgacagcagtttgactccatgcggccacatcttttgctggagctgcctgctcgagtggctggaggagcgggatgagtgccccttgtgccgggagtcgctgaaaaagtcccaagtgatattactgcaaaactatgcctaagattggattaagactttttatattcatgttataggaagtatttttgtgtctatgtaatatattttattcatataaatgaaacaagttttatttatttattcacaatttgtaatgtcaaaaaaatggtataaatcttcaacttaaattacgtgaagtcttaaaaagactaaagaaaggatgcacagaaacaaaatataatgatacttcatcgttgatgttaatgatagtttcccagtcgctcgctgggttttgtatgcttaaacgcatttcttacacggtttattcgatttatttaaacaagtttatgtacatgctgcttatatatataatatttttggtgtctggcttaacattatctatttacattatacaattatttgggctctaagctcattgcctagatgatatccaggtagacagtgcggttaaatatctgcttcttgcggcgcgattcgaaggcagaccttgcctccgaaggggactcgaaagcgacgcgagtgtcgccggtgggtttgccttcatcattgaaacgccttataatgtcatccgggctaagcttgtagtcgctaaagaagcgcatgatgtcctttagctccgccttgaaagggacattgcgcatagccactacgcatcccggccgattgaacttgtccgggattatggatgtgggaacgggcaccggagaggttggcttgacttgaccctgattgctgggcgagagggagctgctgctcagaggaggatctggtcgagcgaagggattgaagtgctgtttaacgggtgcgttcgagctagtgctgctgttgtcctccctttccagggatagcggtcgatcctgctgttgcgatggctgttcctgcggcttatcaaagcggctgggtcctcgacgacgagacggctgcgcactggctttatttccacctgcaccgtcattcgcattgttagtttccgctttcctgggaccatttccacccggcagataatccatgaagggctttttcatcctatcagcgatttcctggggcgtgatggccaccactcgcagtccccttcctcgaaagcgtctattgtggaactc

SEQ ID NO: 17441 - DNA, 1028 bp, DROSOPHILA
gcctttgaataagatatgttagaatcaacattgcagtaacccccaacgacatggactttcggaacgcccgcgcccggcagccggagatcgtgagatccgtgcagaaggatgcacggtacaccaacgagctggccgaagacttgtccgatgtcttgcgcctcaccggtccacggaactggataaagtacaaccagatgtgccgacttctggcggagctcagttaccacggattcgcctcggccaataaccttcagaccctcggcgaagagtacacggggataatacaggtggacgggaactataagcagattcccagcagattgttacaactgattgccattgtcctggagtttggtggcgactccctgttccaacgattgatgcaaaaacttgacacctacgtggccaacaatgacgagattcgaaccgagatcaagccgcagctaaagaagattattcagaggctcaggcaatctcccagctacgtaaaggccctgcacaagtctctattctacttggacgccagcaagtaccagctgtccaagcgcaccacgggcatcaactacgtactaatccgtcactggctgcagccggaattctcgctgtacggctacaagatactgggcgtaatcactttcctgcaggtcagcgtttccttggccattagtggatgggatgcctggagagagcacaagcgccagcagctagaatcaataaagcaggctggaaagaatttcctgcaaagatcttcgagtacaaaggacgtagatccaaacaccccacagtgcatcctttgcctggagccacgttctgacagcagtttgactccatgcggccacatcttttgctggagctgcctgctcgagtggctggaggagcgggatgagtgccccttgtgccgggagtcgctgaaaaagtcccaagtgatattactgcaaaactatgcctaagattggattaagactttttatattcatgttataggaagtatttttgtgtctatgtaatatattttattcatataaatg

SEQ ID NO: 17442 - protein, 299 aa, DROSOPHILA
MDFRNARARQPEIVRSVQKDARYTNELAEDLSDVLRLTGPRNWIKYNQMCRLLAELSYHGFASANNLQTLGEEYTGIIQVDGNYKQIPSRLLQLIAIVLEFGGDSLFQRLMQKLDTYVANNDEIRTEIKPQLKKIIQRLRQSPSYVKALHKSLFYLDASKYQLSKRTTGINYVLIRHWLQPEFSLYGYKILGVITFLQVSVSLAISGWDAWREHKRQQLESIKQAGKNFLQRSSSTKDVDPNTPQCILCLEPRSDSSLTPCGHIFCWSCLLEWLEERDECPLCRESLKKSQVILLQNYA

SEQ ID NO: 17443 - DNA, 4384 bp, DROSOPHILA
tgtatttccttttcgcccctgaaccaaccaaccacaaagcgaaaaccactaaaataatccaaaacaagcaactggagaaattgtttaagagaaagaaaacctcgtacatgttaatttagtttaaatttagttgtaagcgattcttaacttacctacctacatatatatacacacgtaaactatattaaacttcacatagaacaatgaaatccaaaatgcactgcaactatttctgctgacttgccacacaaatcgaacccaacccaattcccccaacaatattataaaccccgccatatgcacagcaaagatcttatcaaaactgttctaagttttatcaatccgctatagccactctaatagtttagttacttcttgaaagtgaaaaaagtttgtgttttctagttttaattatttatatgaagcgagtgtgtgagaggattatgattcatttcgtattagatcgtaagtctattaagctaagctacacctgagcagtgtaacgcgaatgctaagtaaaaggaaattataatagtaaccaaaccaactgctgttttcctttgcatttttttaacaggaccgccaaaatgttgaaaactgttatatattttgaatatatggaacataaaagcactgctttgtagccctggagcgcagccagccctgccggtgaaacttggaaacatcgataacaaagtaactgggtatatcgaattgtgaatatagtaattttttttttgtatatatttgtcatttgaattttataattcattaacatttactgctaaaggctgcattggatatagtaaaattaaattacatttatgataagctgatcttgatgaaaagcagatatggtaggcacaggtttaaatttaagtttgtttttatgatttccaggacgattaaccacatgctcaaatttaatcgataatcttccctggttgcgatacaactctcttctaagagcgtagacagaagcgttagtttatagcacacacacaaacgcacgcggtgtcagcgaattgcaaaatcagcgttttcacgtgtgctgttgttttttttccaacgaatctcaccaaaataaagggttccaatatgtcggatctcgattgggacgatccaaactatgtcgagaagccggcggtgcatcaggagtactccaagccgaataataagtacgaaaggagtatccggcgagatggtaactcacgtgcatacaaaggagatcgaaatgactacggcggagaaggacgaggctatcgcgctaaacgcaatgattatggcggtggacgtcgcgacaatcgggataattacggagcagggcatcgtgatagtcgcgacagtgccgggggaggaggaggagactttagcgaatccttgagcatcgcttccgagatggtcggaaaagttattggaagagggggctccaatatatcccggatccagaacgacttcaatgtccgcgtcaaattggacaagtgcgacttaatagtcaagataactggtagcatccagagcaacgtcatcgatgctatcaatcacgttcgcaagcaggtcactaattcgggtgataggggacaggatcgcgataatagggaccacggttccaatgaaagatatgacggaggcggatacgacagatacaaggggaatagctacgagttcaatcccacttcttctgagtccaataaggacaatggggatcttacgggcatcattgattgggaagccctgaataaagcttcggtgagtacaaaagaaaaattagatattatacgttctaaacgatgtatccttacagatagcagctactgcggcacggtggtccaagtgtccaccgctaacaaagaacttttacaaggaggctcctgaagtggccaatctgacaaaatcggagattgagcgcattcgcgaggagaacaacaagataacagtttcttatgttttcgagccaaaggagggggaaacgtcaccgcctattccaaatccagtttggaccttcgagcaatgctttgccgaatatccagatatgcttgaggagattaccaaaatgggcttctccaagccctcgcccatccaatcgcaggcgtggcccattctcctccaaggtcatgacatgatcggtatcgcccaaacaggcactggcaaaacactagccttccttttgcccggaatgattcacaccgagtaccagagcacgcccaggggcacgaggggcggagctaacgttctggtgctggcacccactcgggagttggctctgcaaatcgaaatggaggtcaagaagtactcctttcgtggcatgaaagcgtaattatcctaatcgaacatgaagtgagttccctttttaaccaaaataacacaatttgcagggtttgcgtgtacggcggtggcaatcgcaacatgcagatatccgacttggagcgcggtgcggagatcattatctgcactccgggacgcctgaacgatttgataatggccaatgtcattgatgtaagcaccatcacttatctggtgcttgacgaggcagatcgcatgctggacatgggtttcgagccgcagatccggaaggtgatgctagacatacgtccggaccgtcagaccataatgacgtcggccacttggccaccaggagtacgtcgtttagcgcagagctatatgaagaatcccatccaggtgtgtgtcggatcgctcgatctggcagccacgcactcggtgaaacaaattattaaattgatggaggatgacatggacaaattcaacaccattacatctttcgttaagaacatgtccagtacggacaagatcatcatattttgtggacgcaaggttcgtgctgacgacctatccagtgaacttacgctggatggtttcatgacccagtgcattcatggtaatcgcgatcagatggatcgtgagcaggctattgccgatattaagtccggcgtcgtgcgcattctggttgctaccgatgtggcatcacgtggcctggacattgaggatatcacgtaagcaaatttttcgagtcgaggaacccattagtcattattttttcatccacaaagacatgtcatcaactatgattttccgcacaacatcgaggagtatgtgcaccgtgttggtcgcaccggacgtgctggccgacagggcacatcaataagcttttttacgcgcgaggattgggctatggccaaggaactaattgagatactgcaggaggcggagcaggaagtgcccgacgaactgcacaacatggctagacgctttaaagccatgaaggacaagcgcgctgctgaaggtggcggttttggaggaagaggtggtcgttttggaggcggacgtggcggcggacgccgaaatttcgatcaatttcaatactgattcattctacattttctagttataagagactagagcgcattgaagtgccttgccaaaaattgtttaactatttatctattccaattatagatgatcataacccaaaacatgccgtgttaaaagaacacgcgatttaaatgtatcaaactaagagtttagaatgtttattgagcttagttagtgccaccggcgtatttctccagcagttcccgtttccgctggcgcagcagtgcttcctgtacatcttgttgcgtcggcacgggaacgtgagcggtgaacttggatgccaataggccatgaggatcctccacggcggctcgagccttggcatcctcgatggcttcgcgtgctggtcccgaaaggggatatatttcatcctcctcttcgtcatcgattatgcgaccatctctggccattttctcccgccattcctgcacggccttctgaatggccgctcgttcgatgcgttcctccagagggatcagaacaccatcttcgtcatctcgatagccgtagtattcggcatctatgtccttcattagttcagcgcgtgatttcctgggtggcggcggaggatcctgttcaaagagctcgcgaacacccggcagatccttggcggctccaaagtatttgtagcctcgattgccgggaacttcacggccctccgcatcgaacatcttgggaccatagcgtctatagtgggggccacccaatgaggatatctgattttcccaatgccgtttctcacgcaataacttgttgatttcatcgttcagatcgcgaatccggaattctcccaagccagctataagtggtcgctattagtgtatattgttagggagaaataaataaaccgaaataggtaccattctgtatctgggccaccttcttcgatatgtcgcgtattatctccaggcggaacttctcacatctgggcaaatcgtggcactcggaggccaaatagggccggcgttccttttcaccagattccacttctttt

SEQ ID NO: 17444 - DNA, 2210 bp, DROSOPHILA
cacaaacgcacgcggtgtcagcgaattgcaaaatcagcgttttcacgtgtgctgttgttttttttccaacgaatctcaccaaaataaagggttccaatatgtcggatctcgattgggacgatccaaactatgtcgagaagccggcggtgcatcaggagtactccaagccgaataataagtacgaaaggagtatccggcgagatggtaactcacgtgcatacaaaggagatcgaaatgactacggcggagaaggacgaggctatcgcgctaaacgcaatgattatggcggtggacgtcgcgacaatcgggataattacggagcagggcatcgtgatagtcgcgacagtgccgggggaggaggaggagactttagcgaatccttgagcatcgcttccgagatggtcggaaaagttattggaagagggggctccaatatatcccggatccagaacgacttcaatgtccgcgtcaaattggacaagtgcgacttaatagtcaagataactggtagcatccagagcaacgtcatcgatgctatcaatcacgttcgcaagcaggtcactaattcgggtgataggggacaggatcgcgataatagggaccacggttccaatgaaagatatgacggaggcggatacgacagatacaaggggaatagctacgagttcaatcccacttcttctgagtccaataaggacaatggggatcttacgggcatcattgattgggaagccctgaataaagcttcgatagcagctactgcggcacggtggtccaagtgtccaccgctaacaaagaacttttacaaggaggctcctgaagtggccaatctgacaaaatcggagattgagcgcattcgcgaggagaacaacaagataacagtttcttatgttttcgagccaaaggagggggaaacgtcaccgcctattccaaatccagtttggaccttcgagcaatgctttgccgaatatccagatatgcttgaggagattaccaaaatgggcttctccaagccctcgcccatccaatcgcaggcgtggcccattctcctccaaggtcatgacatgatcggtatcgcccaaacaggcactggcaaaacactagccttccttttgcccggaatgattcacaccgagtaccagagcacgcccaggggcacgaggggcggagctaacgttctggtgctggcacccactcgggagttggctctgcaaatcgaaatggaggtcaagaagtactcctttcgtggcatgaaagcggtttgcgtgtacggcggtggcaatcgcaacatgcagatatccgacttggagcgcggtgcggagatcattatctgcactccgggacgcctgaacgatttgataatggccaatgtcattgatgtaagcaccatcacttatctggtgcttgacgaggcagatcgcatgctggacatgggtttcgagccgcagatccggaaggtgatgctagacatacgtccggaccgtcagaccataatgacgtcggccacttggccaccaggagtacgtcgtttagcgcagagctatatgaagaatcccatccaggtgtgtgtcggatcgctcgatctggcagccacgcactcggtgaaacaaattattaaattgatggaggatgacatggacaaattcaacaccattacatctttcgttaagaacatgtccagtacggacaagatcatcatattttgtggacgcaaggttcgtgctgacgacctatccagtgaacttacgctggatggtttcatgacccagtgcattcatggtaatcgcgatcagatggatcgtgagcaggctattgccgatattaagtccggcgtcgtgcgcattctggttgctaccgatgtggcatcacgtggcctggacattgaggatatcacacatgtcatcaactatgattttccgcacaacatcgaggagtatgtgcaccgtgttggtcgcaccggacgtgctggccgacagggcacatcaataagcttttttacgcgcgaggattgggctatggccaaggaactaattgagatactgcaggaggcggagcaggaagtgcccgacgaactgcacaacatggctagacgctttaaagccatgaaggacaagcgcgctgctgaaggtggcggttttggaggaagaggtggtcgttttggaggcggacgtggcggcggacgccgaaatttcgatcaatttcaatactga

SEQ ID NO: 17445 - protein, 703 aa, DROSOPHILA
MSDLDWDDPNYVEKPAVHQEYSKPNNKYERSIRRDGNSRAYKGDRNDYGGEGRGYRAKRNDYGGGRRDNRDNYGAGHRDSRDSAGGGGGDFSESLSIASEMVGKVIGRGGSNISRIQNDFNVRVKLDKCDLIVKITGSIQSNVIDAINHVRKQVTNSGDRGQDRDNRDHGSNERYDGGGYDRYKGNSYEFNPTSSESNKDNGDLTGIIDWEALNKASIAATAARWSKCPPLTKNFYKEAPEVANLTKSEIERIREENNKITVSYVFEPKEGETSPPIPNPVWTFEQCFAEYPDMLEEITKMGFSKPSPIQSQAWPILLQGHDMIGIAQTGTGKTLAFLLPGMIHTEYQSTPRGTRGGANVLVLAPTRELALQIEMEVKKYSFRGMKAVCVYGGGNRNMQISDLERGAEIIICTPGRLNDLIMANVIDVSTITYLVLDEADRMLDMGFEPQIRKVMLDIRPDRQTIMTSATWPPGVRRLAQSYMKNPIQVCVGSLDLAATHSVKQIIKLMEDDMDKFNTITSFVKNMSSTDKIIIFCGRKVRADDLSSELTLDGFMTQCIHGNRDQMDREQAIADIKSGVVRILVATDVASRGLDIEDITHVINYDFPHNIEEYVHRVGRTGRAGRQGTSISFFTREDWAMAKELIEILQEAEQEVPDELHNMARRFKAMKDKRAAEGGGFGGRGGRFGGGRGGGRRNFDQFQY

SEQ ID NO: 17446 - DNA, 3592 bp, DROSOPHILA
ttgctgggcaattgaataaatgctgataagacaaagaacaaaagaagtatgtatgtaattcgatagcgataaaaaggggacggaaaggaggaataaaattgataactgtgccagttcaccagcttaccacaagtgccgttgattgagcaatttgaagcaatgacccgaccgcatagcaacaacaataacagcaagtacaacaacaacaccagcagcgcacaccactaacaaatcacaattctccaattggagggggcagacgcaacgggtaacgcaacaataacaaaacactttcgtttgcgcggcgacgagagtaaatacgaaatatcaaccgaccggcttgttcagcatttgcatactgcgaaaaaatctttataaacaatatataacgcaggcacagctgagacgctcacacagacgagcagacacccgcacacacctgcacgcaattttggagagcgggagaggagcaacaggcgcaacgtaggattcctggaattccttacttagcggcgcccatggcagttgcactcgcgatcctacgctttaactagaatcttttccgtttattcacgtggcagctgtatctatgtttgattggtttgtttacactaattaactgtaattaaatagtaacgatttaatacgaaactaaacgcgccgccgcaacttctttgcagtgtgaccgcacttcgagtggggagatacaccgatatgaaaataactactcttaaaataccagaagaatacaaaataccacacatactgccttttattttattttcccgcgtatttcaatatttcaaaaaaataactagtgattttaattatttcttcgttccaaaattaaacaagcaatgtgacgaaactttatatatttaaagcgcaatatactaaaggaagacgacttggtatagttactttttttagattactaacaatttagaaccattgccgcgcaattttattcaaatcaattattttttatttgaaaaaatactgtacttaagtacttaactagctagaattcgttacactttatcaggcctacaaaaatagagtttagagttaaaagagttttggtaatgcacgacagcggagtaagttcgacacaaaatgctagttaatattgggaatgagatgccctccaagtccacatcacttttccttcttctgtatggaggcaatccgccaggcgcccaccaaatatcgcacccagatcatgaacaaatccctgcccatttgcagccacgaccaaaatggtgtcagtttcgaaccatcgatctccgtccatcgaacggcaacctcggacattggtagcttcaaattctcagcgaggtacagcagctcaacatcaaaggcccagcgctccacatgcagactggtgaagagtttcctggccgtcgttcgggtgaacagcttgaagccacactgggtatcgcgaatggagcgcacggcaaacagccagacgaggaaatgaaagccgtgcatcaaaattgttctgtggcaacgcagatcagtatttggtcagctaataaatgtaggattttatcttacctgaagaaactccttgttgcaatcgcatcgttctccagatgtgctctcgatccaatggcaatgccatcgtctcgccattcgggagctaattgcttgagggccacctccagtttatcgtagtcgggaaacttggtggctccatccgcatcagcgaagagcagattacgaccccgtgcacttagcatacccatgcgaacggcacctcctttcccacgattttcgatgagttccagcacgcgtaccttttctgctccgtgctttttcgagtaacccaaggcgacggatacggtggcatcctgactgccgtcactgaccacgatgacctcgtatgtgaaattgggagtgccagcagatttctgttccagaaaggccaagcactcgtccagcatagaaggcactaaacgagtataaacacacacaaatgagaacaagaaaatcgaatagcttttggggaaagtaacttaaagtaacatgttagtgtaatgaagtttctgtagataaattcgggtgccagacaatcaatcacaaatgggcatagataaaatgttgactgtgattcaccaaaacaaaaacaaataagcaacatacagcgctgctcctcattgtaagctggtacgatgacactgagctccaaacttggcgagtcctcgagactgggaaaagtcactgttttaatggtgtgcgggtccaggaaggtctcctcatccttgtgccgcttgatgttgggatagggcttcgtcttgtagagcaccagagccgcaatctaaacgatggattatcagtaaaaataagaaagataggcgaatgtattcaagatctgaccgacagcgcagcgactgcaagcgtcgagagtagatagaaacagagctggcagaggcaggtccacattgtagggctttttttagcaactagtttgtatgaacaggtgcgcctgctacctgccagcagacattacttctccaatttgtgcgagataaacagagccacgtatttaattccaagaattttagaccgaaatgccgcagctgattagggttgtcaactcaatttagggatgacacttctccgcaaaacagtgactcattcacagtcaccgcagatatcgattaatggtctatcgcagtaagaattctatgattttgaattaaaataaaatatataacaaaaggcaatttaaaatggttataaactttcttatgcttgcgaatattaagtagatataggttaagtatgtagttttaaataataaatcaaaaactacgatatgatataggactcatggtacaagactttataaaacacattttctgattgatttttttatgttaacataagttactctatatattttagtcaattctaacctataaatactattaaaaactgaccttagtcacaaatatctctgcttaaggatcgaaacacgcatgcgcgctctttgaaattcaaaaacaacaagttctgagaatatacgtagtcctctcccattcagatacacaccattggaatttttcatcgcctctgcgctgggcggaataacaatttgtttatagtcaattaaaatgtgcttgtgaatcgtaaaaaaaaaactacataaaatacaaaatgaagtttttaaacttaatagtggtcgtattagctttaatctgcaacgaagttcagggtctaaagttgcaggcaaatgttggagaactcttcacctacaaaatcgaaccgcaactctttaactggacacaccaggtgatcagccagcaatttcgctacagaccctcgctgaagaattatcccgatttgcccagttggatgcgatatatgtatagccatgaataccatgccggcttcctctacggaactcctccagcatcgtcggctggcaaggatctaagtctggatgtggtcgcccttaatcgccagaattacgaaacgcgacgcgttgtggtcacaatgtttgtcgcccacaagtttcccacacccaatgtcgtgcagatgaaaataaacaatctgaattgggtgcacctaatggatcccggcagaa

SEQ ID NO: 17447 - DNA, 1286 bp, DROSOPHILA
ccctaatcagctgcggcatttcggtctaaaattcttggaattaaatacgtggctctgtttatctcgcacaaattggagaagtaatgtctgctggcaggtagcaggcgcacctgttcatacaaactagttgctaaaaaaagccctacaatgtggacctgcctctgccagctctgtttctatctactctcgacgcttgcagtcgctgcgctgtcgattgcggctctggtgctctacaagacgaagccctatcccaacatcaagcggcacaaggatgaggagaccttcctggacccgcacaccattaaaacagtgacttttcccagtctcgaggactcgccaagtttggagctcagtgtcatcgtaccagcttacaatgaggagcagcgcttgccttctatgctggacgagtgcttggcctttctggaacagaaatctgctggcactcccaatttcacatacgaggtcatcgtggtcagtgacggcagtcaggatgccaccgtatccgtcgccttgggttactcgaaaaagcacggagcagaaaaggtacgcgtgctggaactcatcgaaaatcgtgggaaaggaggtgccgttcgcatgggtatgctaagtgcacggggtcgtaatctgctcttcgctgatgcggatggagccaccaagtttcccgactacgataaactggaggtggccctcaagcaattagctcccgaatggcgagacgatggcattgccattggatcgagagcacatctggagaacgatgcgattgcaacaaggagtttcttcagaacaattttgatgcacggctttcatttcctcgtctggctgtttgccgtgcgctccattcgcgatacccagtgtggcttcaagctgttcacccgaacgacggccaggaaactcttcaccagtctgcatgtggagcgctgggcctttgatgttgagctgctgtacctcgctgagaatttgaagctaccaatgtccgaggttgccgttcgatggacggagatcgatggttcgaaactgacaccattttggtcgtggctgcaaatgggcagggatttgttcatgatctgggtgcgatatttggtgggcgcctggcggattgcctccatacagaagaaggaaaagtgatgtggacttggagggcatctcattcccaatattaactagcattttgtgtcgaacttactccgctgtcgtgcattaccaaaactcttttaactctaaactctatttttgtaggcctgataaagtgtaacgaattctagctagttaagtacttaagtaca

SEQ ID NO: 17448 - protein, 326 aa, DROSOPHILA
MWTCLCQLCFYLLSTLAVAALSIAALVLYKTKPYPNIKRHKDEETFLDPHTIKTVTFPSLEDSPSLELSVIVPAYNEEQRLPSMLDECLAFLEQKSAGTPNFTYEVIVVSDGSQDATVSVALGYSKKHGAEKVRVLELIENRGKGGAVRMGMLSARGRNLLFADADGATKFPDYDKLEVALKQLAPEWRDDGIAIGSRAHLENDAIATRSFFRTILMHGFHFLVWLFAVRSIRDTQCGFKLFTRTTARKLFTSLHVERWAFDVELLYLAENLKLPMSEVAVRWTEIDGSKLTPFWSWLQMGRDLFMIWVRYLVGAWRIASIQKKEK

SEQ ID NO: 17449 - DNA, 4204 bp, DROSOPHILA
ttggtaagagcataacatttacttgttaacaaaaatggggcattgaaatgtgggacactgcaaaattgattaaaaacttggggcttaggtgcttagaaaatatactaaacactatttaaacgaaataaataacaatatgtggatatatattaaattgtaaatatgtttatagaaactgtagaataaaatcaatgtaacttattcacaaaactcatactagttactgagaaaaaacaatgatgatctttaacttacttttttgtatatgatcataagttcgacttctctattgtttagtatttttttttttaagctgtctatactaatcactaacttaacgaacaaatctattgccataaactacattttcttaattaacaaaatttttttatatttgaaatataattataaaaactctttcactgggcgtttcttgagcgcttgcagtttataaatagttgtattattttaacttgaaattcaagtaccatttataaaattccttagcattagaagacaatacaaatctgcgctaaaaataagcaaactgtttgtattgattttatagctcacttgttttgctcaaaaggtatgtacactatatatataatcgagtatcaaaattggcggttttgtttatccttgggcagaaggaaaccctaatccgacaacaaaataatataagcaataatttgtcgctgtgaagaaagctaatgactaattggctagccattaattttaagttttgctgctcggcaaaaagtataaataagtgaaagtataaataacactcatataaggaaaataaactcagaagtgctgggaaatcctctatatatttcaagactgattaagatttatggcatttctccagtgctcaaagtacattctatttgttcgcattatcaaagcgaaatatatggacgtgtttgtttggcggcaaaaaataatccataaacaaatgaaaacaagagtgaattgttttttggtttttttttttcattttttttttttgccatggcataacatttattttttcgcatacacagtattccgttgcttcttttagtataaaaaagtagtacaaaagttctatttctactcgtgtttggcattgtcaaactgaagtacgtggatttgtttgctccgcgaaacaaaaacaaaaaaaatggtaaaatggttggggcaaaatgcaaataaaaagcgaaacaagtgtgcaaacaggagcaaacaaacgtgtgtccaacaggtgtgcgtgtgcgtctgtgtgtgtgtgtagagtgtgcatgtgtgtgttgttttttttttctgggagggtgggaaagtgggtggtgttttccagggtgggttggcggttggtgggtggcagacgcattgcgtttatttactcgccagtcatcatctccatgaattctgtaaattaaacaaaatgacagacattaaaccgatgccatcgcgccagagcaaccgctatatgcatttataaataaatattccataaacacgaaaacaaaatgtaaatatgtacgttattccgagaatgaaaaatgcgtgtggtggaatcgaatttgtgtgtcgcgcccaaaaatagccaacgatatgctcctccatgggagcgttgatcacatcaagctgtcataatcgagcgatctcaagatcatcgaaatttatgatcactatacatatatatgtatgtatgcatgtgggtggatatggatatggatgtgaatggaaagccactagaatgtattaatatcaaacggaatgggcactcaccatcgaaatccactgtaccggagccatcggaatcgatctcctcgatcataatgtccagctcctgttcggtcagctggtcgtccagctccttgaggatctccttcaggcaggtggtgggaatgaagccattgccctgcttatcgtacaaacggaacgcctcgcgcagctccttctgcatggcctccgcatcctcctccacgatgaacttggcagccagctggacgaactcgccgaattccaagcgaccggactctgaaatgtgccaaatattccaagtgtttataattaactgcaaaaacgactggaaagccagcggctaatgatggggcaaccaaaacgactatgatcataaatcaatgacagcgagtaactaaaatttaatcatcactcgatggtgaatcatctgtgatttgctgtaatagccagctaaaccttattcaataaatatatacatttattacttgcagctgtcataaggttattttttttatattttgttcacttttgttattggatcatagagtcacttttgcatagagtctgcacataattacacctatataatatctaaaaaactgatttcatttctaattgtaagataatattttttttagatgatagatttttatagattatagactatagatgttgaaggaaaatgtgtatatataactacacaaatcgattaaacgaaagaaaaaaacatccatgaaatcggcacaagtgtacatatatattattgatgcatttctcatttttattttgtttcattttataataactatatgcatttagtttttgtagaattttcaccctgttctacttggggactgaaataaattaaattaaatatatgccacacaattattttaattggcagtttgactcaatgactcaaatgcaaatgttgtctattttgaattgtattcatattaaaattgtaaatataataaaatatcattgaaatactcagcaactttcgactatatctatcatacgttgtaaaaatagcgtttacttactgtcctcatcgacctcctcgatcagttcctccaggatcttcttgtcgaagggctgacctgcagttgtaaaaacaataagtactccttcatccaaatggacatcctcaaccccaaaactcacccatcaggcgcagtatgtcggcgaccatctcggtggggatggagccagtcttctggtgatcgaagctgttgaacgccttctggagcacggcgatctgctcgggtgtaagatcttcatcctggaattggacacacatttaggtattaatcatcgacaatcctgtggagctggaaaaatctcagatgcttacgacgctgctcatgttgctgctacttttgggtatatctttgccaatgggatctgtctgatcagcctaatcttgcgaagcgatcgtcacggagtattcgttccaactgcgaggctgcgcggatgcgttttccaaaatatagaccacaatcggtgaacttgccacggaaaagcggaaaaacacgaatgcggctgccgatcaatcggtggatgttcggatcgttggagtatatgtagcgtttttccacgccgctgcccgaattttattgttttttagaaatgactgtaaagtgcgatgggaaaaagcaaaaataaaacgcgatcggagcgtatcccgccgcattcgctgccccggagactgaacacgagccgtatagtggttttccacggccaccgatcgctcgttggatggagcacatcccatccagtggagcggcatggggagccgtcgacggggcagccacgatatctgcatatgtgcgccagccagctataatgcgatgcgttgcgctgagatccccgcatccccaagtctgcgaatatatatctatatattatatagatatgtgtttagattcaacgaacagatggagaaatccccactggcactggagcaatgccccccattccgtttgtcgccggagagcgaaacgtgggcagcggcagtgaggaatgttctgcccacatccatgaattggtcgacaagttgccagtttctctgtccgattccccgaatccattgttcaattgtcaaaatacaagtgaatgggtggaaaacaatgtatgtccatgcatttattttcaatacatcaaactcgaacaaaagactttctaaaaagtaaaaggttgatttttcgattgaaaatatacaccaaataagaaattctaagttctcacgctatataaacatattgaacatacaaggtcattatctattcaagcgttccaaataaattacaagacttttggatttggaaaaaaatttgaattttttagagagaatatcggatatgcaaataaggataaagatatataaatagtcttttccagctaacgtttatttaaatacagctgaatcctttattgaggaatatttttt

SEQ ID NO: 17450 - DNA, 935 bp, DROSOPHILA
aatactccgtgacgatcgcttcgcaagattaggctgatcagacagatcccattggcaaagatatacccaaaagtagcagcaacatgagcagcgtcgatgaagatcttacacccgagcagatcgccgtgctccagaaggcgttcaacagcttcgatcaccagaagactggctccatccccaccgagatggtcgccgacatactgcgcctgatgggtcagcccttcgacaagaagatcctggaggaactgatcgaggaggtcgatgaggacaagtccggtcgcttggaattcggcgagttcgtccagctggctgccaagttcatcgtggaggaggatgcggaggccatgcagaaggagctgcgcgaggcgttccgtttgtacgataagcagggcaatggcttcattcccaccacctgcctgaaggagatcctcaaggagctggacgaccagctgaccgaacaggagctggacattatgatcgaggagatcgattccgatggctccggtacagtggatttcgatgaattcatggagatgatgactggcgagtaaataaacgcaatgcgtctgccacccaccaaccgccaacccaccctggaaaacaccacccactttcccaccctcccagaaaaaaaaaacaacacacacatgcacactctacacacacacacagacgcacacgcacacctgttggacacacgtttgtttgctcctgtttgcacacttgtttcgctttttatttgcattttgccccaaccattttaccattttttttgtttttgtttcgcggagcaaacaaatccacgtacttcagtttgacaatgccaaacacgagtagaaatagaacttttgtactacttttttatactaaaagaagcaacggaatactgtgtatgcgaaaaaataaatgttatgccatggcaaaaaaaaaaaatg

SEQ ID NO: 17451 - protein, 155 aa, DROSOPHILA
MSSVDEDLTPEQIAVLQKAFNSFDHQKTGSIPTEMVADILRLMGQPFDKKILEELIEEVDEDKSGRLEFGEFVQLAAKFIVEEDAEAMQKELREAFRLYDKQGNGFIPTTCLKEILKELDDQLTEQELDIMIEEIDSDGSGTVDFDEFMEMMTGE

SEQ ID NO: 17452 - DNA, 5608 bp, DROSOPHILA
tttacccaatgaattcatagggaagttccaattacctcttgaatccgtgcctaatgataccggaagtggactttccgccggagaacgcagccgaactggtgggcagccaaaagtttcagaagcccatttggttcacaccaaccgtggacacagcctactctcgcggggatccggaggcatatccggagatccccagctctgcttgccgccaggcgatgcgcaaggtgatgtgcggcatgctgcgcctggccggcttcaccgactgttccgagtcggcggtgcaactgctgacggacgccaccgaggagttcctgcgcagctttatcggcgagtatcgcggctactatgacagtcagccgcggctgcagaattccacggtgctgcagctggtcccactggagcgcgcccatttcgcccaaacgggcacctcgctcacccaggtgcacaactactacaagcacaaggtgctggccaggaatcgcgcggagatcgctgagttcaacagcgtactgcaggagtacgacaaactgatgaaggagagccagagcagcatgcagaagcagcacaacgagttcaacggccacgactttctcaacatcctggacaacagcgccacaggcagcagccagagcataggcggcatggccatgggcgatatgctgcaggatctgggcggtagcacgggctccagtggcacagtcagctcccagcagatgctgtacggcctgctcgatggccagatatcgtccaatacctccaacatgacggggacgagcggcaatggcagcacgggcggcaatggaaatggcaatggggccacgattagcaactttcacgccacttttgaaacgtaattgttaaaattgcggggataacttcattatctcacactgagatatctctagcaatcaaatgtttcacactttttatagaacgactaagatctctaggctcaagttaagttaagctctaaggaaacgtactaattaaatagtttttattacgtgttttgtttattgctcatctttttgctaatcctcgactcgttccagttgttttgtcgcctccgcttggtgaactcgttggtgggttcaatggccacaagtttggttgcattcggatcgctggctctgtactggaacactttgtcgtggcgcgtctttttctgggcccacgccagcaggtccctgccttccagtatggagttgccagtgaccaccacagagtccagagcttcgggcgcggattggtcttcttcgggggtccgtctccttatgttaggtttctttttcggacctgcaggaccttccaccaccaaatcggcgatcaaatagcaatcggcattggacacgagcttgactttgtcgggtgggggcttctgtttgcctacgccattgggtacatccagagagaactcgatttgctcctggattatgccgctcagtctgcgccaaatgtgcgtttgcatctcctgcgagatctgcagatcgctggcaggcgcgtcctgatcctccacgtagcgttcactttttaccggctgtgcttcgtccttcctagtggccaacggttgctcctcgttggctacttcatgcgcctcctcttttggctgcgattgatacatggcatttgtgagcaacgtggtgtccgccgcctccaggaactggcgcatctgggcgtcgtcctcggaatcagagtcgctatcccttgatttaactggcattttttgtacgctctttgaatatttatttatttacatttaatttttaaacgataggtgtgccgttaacgtgcacgatggttggaactgccattttccaaagcgataagtatcgatagattctaaaagcgctatgatggaattcgaaattacaaataggagattgataatatttttgatttggccatttagcagactttttaataattttaaaagaatctaaacaagtgatttaatgtgattgattgttaattaaggaagtgcagtccaactttccacggtgattattacatttaatgctgtttcctgtaaaacaaattcaaccgctcaaaatcaatctattcgaaataatgccagctaaaagttaacgcttttattgcttatacagggatttgagtgataacttcgggacccaggaaccccactaggccaccgaactgcacagaccgcagttgctcaccgggcacatcttcatctccacatcctcgcccacccgcaccactgcggccattccgttctccgagtgcggcgatatgtgacagtggaacatccagtagccgggactgttcgagtagaaccgcaggatcgtgtacccgaaggcgggcacctggacggagtccttcagcggagcacctttggcgcgtcgcggcagcggcgtcttcttgtcgatctgttcgatctggccaatcttctgctcccccagcactcccatcccgacgacacggaatgtgtagccgtgcaggtggatgggatgcggcgtctgcgacaggctggagatgacgaactccacctgctggttggctggcacctggatgacgttggagcactgacagtgccgctggcggcaattgaaaccaagatccgcctgttgggagcgattgcagaagaactggccaacgcccaggttgcgcgtctgcagcagcgacatcttgggcatgctgaagctgatgtcgtccatctggaagcggaagccctcgccctgccgcacctcgaacgcgttcatgctggtgtagaaggtcaccgatggcgccacttccggttccggtcgctgggcattgagattggccaacgatatgctattcccagcacgcgcaccgctcgcatcgtcgcccagttcattgagcgtcttgcccggcgcatcgtaggcatagctcagggtatgcgtgtccagcgcccgggtatccgcgtccctgtagtgcaacaccgcctcctgatgcagctggttcttcgcacagaagctgtagcccttcacccggatccagtagttgctcacctcctggttggcgtgcagcacgaagtcgaagcgctccgcgccgtggaacatgatccgctgcacctccaccggctcgatgtcgttgccatcgctggcgatcaccaccaggtcgtgcttatcgatgctgaagctgatcggacagttcgaaacgcctgcaaatggatggaggtacgtacataagatgaactcaaatccattgccaaagcgccctagcttcactcaccgttgaagatcacccggaagcgatagcgtccgcccctgaccaccggaaagtgggcatagagcgtgggcttggcggccttgacgcccttcttcagattcctgccccgcccgttgatcagaatgttctcggccacgctctccacgaagttgtgcacccagtcctggatcatgatcacgtgctccgacatgtcgaagtcgtagagatgcgcgtggggattgagcttgggcggcattcgcaccaccagtggcccagcgagtccgaaggcccgctgatgttccgtgtggctgtgccaccagttggtgccgccgtgatccacctcgaagcggtagcggaacgcctgacccgcctcgattggatactgggtgacgtggggcactccgtccatgaagggcgttagtcgctggtgcatcccgtgccagtggatcgtcgtcgtctcgtgcatgctgttgatcacgtccgccaccacggtgtcgccgtagcacacctcgatgttcatccccggcagctggccattgaccaccatcacctcgctctccagtccatcggcgtacttgcagtcgtcgttcgccgccagctgcgttgccagcgcaatcccatcgatgtactccttgccgctcagcttgaagcggaatttggactggcaatatacaagagattatatagtgggtataatccccggtagttttaagcagactcgtggccattatcattaaccaatgtccatatgaatccataggcacgtggctttcaacatctcggacaaataattctggagatacggagtgttggctccttccgacagctcaagttgtgaaatctaaataagaagtcttcaatctgtctacatcttgctggaaacttaagtatacaatacacaaaagtcaaaatcctttgggtaacttttagattgaagctactacagtcatacactttggttttgttaatcaaataaaagttatccacaatggtgaaagtgataatctcctaacaggtaacagaaagtatgcagtagtatagcttgattcttaaaaaacaactttattctttagacacctctctagatgcctttttcgactgcatcaatattattttttggattgcaactacatctcaacaccatctcacctggaggtagcgcttgcaggtctccgccatcgtgtcgtcgtagtggaccaccatgtagtagtagcaggtcatcggctgcttgtcggcgcagtcgcgtctgcaaggatgccgctggttgtccttctcggccgcccgccactgcgaggattcgcctgcgccggaggagagctgcggatacatctgcatgatgcgctcgtacttgctaacgatccgcttgccactggcatctgttggtgttgtttggaaactgggatttaatgcaaatttcatattcactagcataagcttagttaattagttattgccgttttaaatatttttatttggcattcagagtatcatgaataattataaataattttagatccaacactcaagttgatatatagatttagtacatttgtttttagttaaaagaccagttgtccttaaaatatgtttgttcgttatttcaaaaatatatttttatttttagtgtcaactccttggtatttcatgattggttttatgtgcttaaatgccaatatagttcaatattattcattttccaagtggctcgcataaaatggcactttagttaaccgatttgcttaatatccaaaacaaagcgttgagaaatattttaaattttgaaacaccaagtatttacttatttaaaaataaactttaactttaaattttgatttgattttccatttcacttaagcaccttgaatgccatatatttgcacgctgatgaggcacaaagtgaagaccagtgtctgcaccaaattgaatttcatgctcgcatccaattgaatcaaaaaaaattaaaacaatatcactgtgcttagggtaaaaggtaaaaatgttgcaaagaagccgcctttgtggccgtggctgagggccaaatgttactgtcagtgggcttccgtcatcgcttacctttttgtaagcaactccgtcgggaaagtctaaaaattacccggaatcggttgcttgttgcccgttgtcgaacatctcgtatcggttaattgaagattgtgcggccgacaaggcacgggaagaacagaggatgccgattactgacgcacataaacgaataatttaccatgttccagtcgctactgtttggcaaaatcaaatatgcagtgccattggcctagtttttgcatttgccaaaaaaaaaatgccggctcaatattacatttttaagtgtaatatttaaaatttgtgtatttactgtgagcagacaatgattaattaattaatgattaattaattaatgtaa

SEQ ID NO: 17453 - DNA, 2604 bp, DROSOPHILA
atgaaatttgcattaaatcccagtttccaaacaacaccaacagatgccagtggcaagcggatcgttagcaagtacgagcgcatcatgcagatgtatccgcagctctcctccggcgcaggcgaatcctcgcagtggcgggcggccgagaaggacaaccagcggcatccttgcagacgcgactgcgccgacaagcagccgatgacctgctactactacatggtggtccactacgacgacacgatggcggagacctgcaagcgctacctccagtccaaattccgcttcaagctgagcggcaaggagtacatcgatgggattgcgctggcaacgcagctggcggcgaacgacgactgcaagtacgccgatggactggagagcgaggtgatggtggtcaatggccagctgccggggatgaacatcgaggtgtgctacggcgacaccgtggtggcggacgtgatcaacagcatgcacgagacgacgacgatccactggcacgggatgcaccagcgactaacgcccttcatggacggagtgccccacgtcacccagtatccaatcgaggcgggtcaggcgttccgctaccgcttcgaggtggatcacggcggcaccaactggtggcacagccacacggaacatcagcgggccttcggactcgctgggccactggtggtgcgaatgccgcccaagctcaatccccacgcgcatctctacgacttcgacatgtcggagcacgtgatcatgatccaggactgggtgcacaacttcgtggagagcgtggccgagaacattctgatcaacgggcggggcaggaatctgaagaagggcgtcaaggccgccaagcccacgctctatgcccactttccggtggtcaggggcggacgctatcgcttccgggtgatcttcaacggcgtttcgaactgtccgatcagcttcagcatcgataagcacgacctggtggtgatcgccagcgatggcaacgacatcgagccggtggaggtgcagcggatcatgttccacggcgcggagcgcttcgacttcgtgctgcacgccaaccaggaggtgagcaactactggatccgggtgaagggctacagcttctgtgcgaagaaccagctgcatcaggaggcggtgttgcactacagggacgcggatacccgggcgctggacacgcataccctgagctatgcctacgatgcgccgggcaagacgctcaatgaactgggcgacgatgcgagcggtgcgcgtgctgggaatagcatatcgttggccaatctcaatgcccagcgaccggaaccggaagtggcgccatcggtgaccttctacaccagcatgaacgcgttcgaggtgcggcagggcgagggcttccgcttccagatggacgacatcagcttcagcatgcccaagatgtcgctgctgcagacgcgcaacctgggcgttggccagttcttctgcaatcgctcccaacaggcggatcttggtttcaattgccgccagcggcactgtcagtgctccaacgtcatccaggtgccagccaaccagcaggtggagttcgtcatctccagcctgtcgcagacgccgcatcccatccacctgcacggctacacattccgtgtcgtcgggatgggagtgctgggggagcagaagattggccagatcgaacagatcgacaagaagacgccgctgccgcgacgcgccaaaggtgctccgctgaaggactccgtccaggtgcccgccttcgggtacacgatcctgcggttctactcgaacagtcccggctactggatgttccactgtcacatatcgccgcactcggagaacggaatggccgcagtggtgcgggtgggcgaggatgtggagatgaagatgtgcccgagcgtacaaaaaatgccagttaaatcaagggatagcgactctgattccgaggacgacgcccagatgcgccagttcctggaggcggcggacaccacgttgctcacaaatgccatgtatcaatcgcagccaaaagaggaggcgcatgaagtagccaacgaggagcaaccgttggccactaggaaggacgaagcacagccggtaaaaagtgaacgctacgtggaggatcaggacgcgcctgccagcgatctgcagatctcgcaggagatgcaaacgcacatttggcgcagactgagcggcataatccaggagcaaatcgagttctctctggatgtacccaatggcgtaggcaaacagaagcccccacccgacaaagtcaagctcgtgtccaatgccgattgctatttgatcgccgatttggtggtggaaggtcctgcaggtccgaaaaagaaacctaacataaggagacggacccccgaagaagaccaatccgcgcccgaagctctggactctgtggtggtcactggcaactccatactggaaggcagggacctgctggcgtgggcccagaaaaagacgcgccacgacaaagtgttccagtacagagccagcgatccgaatgcaaccaaacttgtggccattgaacccaccaacgagttcaccaagcggaggcgacaaaacaactggaacgagtcgaggattagcaaaaagatgagcaataaacaaaacacgtaa

SEQ ID NO: 17454 - protein, 867 aa, DROSOPHILA
MKFALNPSFQTTPTDASGKRIVSKYERIMQMYPQLSSGAGESSQWRAAEKDNQRHPCRRDCADKQPMTCYYYMVVHYDDTMAETCKRYLQSKFRFKLSGKEYIDGIALATQLAANDDCKYADGLESEVMVVNGQLPGMNIEVCYGDTVVADVINSMHETTTIHWHGMHQRLTPFMDGVPHVTQYPIEAGQAFRYRFEVDHGGTNWWHSHTEHQRAFGLAGPLVVRMPPKLNPHAHLYDFDMSEHVIMIQDWVHNFVESVAENILINGRGRNLKKGVKAAKPTLYAHFPVVRGGRYRFRVIFNGVSNCPISFSIDKHDLVVIASDGNDIEPVEVQRIMFHGAERFDFVLHANQEVSNYWIRVKGYSFCAKNQLHQEAVLHYRDADTRALDTHTLSYAYDAPGKTLNELGDDASGARAGNSISLANLNAQRPEPEVAPSVTFYTSMNAFEVRQGEGFRFQMDDISFSMPKMSLLQTRNLGVGQFFCNRSQQADLGFNCRQRHCQCSNVIQVPANQQVEFVISSLSQTPHPIHLHGYTFRVVGMGVLGEQKIGQIEQIDKKTPLPRRAKGAPLKDSVQVPAFGYTILRFYSNSPGYWMFHCHISPHSENGMAAVVRVGEDVEMKMCPSVQKMPVKSRDSDSDSEDDAQMRQFLEAADTTLLTNAMYQSQPKEEAHEVANEEQPLATRKDEAQPVKSERYVEDQDAPASDLQISQEMQTHIWRRLSGIIQEQIEFSLDVPNGVGKQKPPPDKVKLVSNADCYLIADLVVEGPAGPKKKPNIRRRTPEEDQSAPEALDSVVVTGNSILEGRDLLAWAQKKTRHDKVFQYRASDPNATKLVAIEPTNEFTKRRRQNNWNESRISKKMSNKQNT

SEQ ID NO: 17455 - DNA, 3112 bp, DROSOPHILA
caagcgcctccaagcggtttttgaagtcctccacttgggtctgtcgctcagcgtggcctggcagctgttcctgggcgtgcagggacttttgcagggctattagcttatcacagactccctgtaaagagttaattaatatgggatctcagtagtgagactgctttgctatgcacacctttagatcattgcgttcaaatccatcctctagttcagctagtaggtttccccagccatcagactcctgtagcgattccttggccacttggagcttttggcttttggtgttcaagcgctccaaggtggccatgcattcgccggtttcgctttgcactgcagctacctccaatcgcatggcactcatcttctcttgcagccggtgtacatctgcctgcagcgctgcggattccttagcgatccttggcatgctggccaccacttggcgacttgactcctccacagcattgtttacctggaaatcgataatgtttacaacagatccatggatgtgcagctccacttacgttgaatatatacagctgcaacttggccacgtaactcctgatgaaggcggaggcagcctcgctatcatcgcgaccattctcctccacaaacttcttgtagtttgcgtttatccattccgcaggactaaaagttgtctccgaaagagccgaaacatccatggtgttgatggcgttgatccaagcagtatgaccgtgtcgcgagcgtgaaaataccgggtgggtaatttgcggataatttgtttaaatgcgaaaacttttaatgctagtctctttaaatattatgcagagcagatacatgaaaatatgttcttttacgatcttagttaaacaattattttttattaaatttgaggaaacctattaaaattaaattattgcggatgtcgtgcggatgtcgaatatgctcgcggggcgttttggtatttcaggaggattgccctaacgggcacactgcaaataatacaatattttcgtaggagttttttggatttatgtaggtttatttggtttttaaaacatgtcacttggcaatgccgatccctggcacttgaaaaatactatagttaagcaaggaatctccgggtccgcgaataatagcgaaagttttgaggacaacttcacgcccttgccctctggaaacgagagcaacgtccaaaaggacgggaaaatcgagccccttccggattccagcgactatttaaagctacttggtacggggacacagtttgtcaaacgaagagcagcccactaaatagcattcatttcagagcggaagctggcccgggtgcagaagggcaacaagttgttggacaacctgcgagacaagcggcaggattgcatgcggggattgctgtcttcggagggagtgcccatttccattttcgagcagttccttgagctagacgcgcccatcgaaagcggtcgcctccatcggcacctgctgcccgttcaggccgtaaacgtgggcgaaactttccacatagtggagcacgacgctctgcagcagtcggcagaagaagctcaggaggaggagtaggaggataagccctcggttgagcattaacaaaatcacaatggaatccacgttcggtaaagtcttcatgtttctcacggacctcgcttggaaaagtcgtctcaccatccctgtcatagtcacaactgcatttctcgtcatggacatccgcctgcagatcgagatcaacattcagtccgggcaatttgtgagtgatgcagttgtcttgcaaatctaattcgttgatactcgtattttaaaacctgtttacttgattgttatgttttttttacggttattgttgcttgttattaaaatgcatatgtggcattataaattggtattttttttgtttagaatgccagcgatgtggacgacgttcaggatggcctcgacgatcagtttaggatgcacgatcactggtcggacgacgaaagcggcagtgacatctatacagatgaggagtacacaaacgacgatggcaacagcgaagcgtcccactacagcgtggacatctacgatccctgggggtcagaagacgaggtagacgcgagctattcgcgaaggatgcggttctaagacacaatataaattctacataggtgtaagcgagagtaactagctttatagcttatgtacattcagtaatgtcgagcccctatttattcatctcaaacagtcatattaaacaaaggtatttaagtgcaatatctttattcgcccttacatgtagagtttgatcaactcgtcgcttacggccgagggtgttagtcttccgaggtcggtgaagagcagggtgatgtagacgggtggcgtatagtcgaccagcgggtgcactttgcttacatcgtttaggtgtttgcgggagtactataaataaacccactcttaatcgccgttcctgctttaatgacgcagtaagaacctaccttgtactcgtttggcagatcgcgctgattgagtggatacagacggctgaacttgaagctttcggccagaacgtagaaaggtttcttcatctcacgggcgcacagacccatggtgtaggtgccaatgcggttgataatgccaccactctccaccacggcttcagcccccacaagcacaaagtccaccgattccataacatagccggtggctgagtccagaatgagcgtgcaatcgatgccggccgcatgcagatccttaaccatctcttcgctaagaacggacaatgcttacacctgaattctatcggaaacacaccctagcttacccagagtttcccgtgccgccctgcgtcacataaacgtggaaggactttttgttctgcgaggctgtaatcagcgccttgaggaccacccgggatcgggagtgcgtcaatatacggcagccatcggtaatgaacctttgggcctgctgggcaatcacctggattgggtggtacaatgaggggttagttcatgcgctagcactagcttttcgtatgagagccaacctgccgggaattgagcaacttggtgaggaagatttttccgcgattcaacataatctgccggcactcctccatgtgcttgtcgtccagactgagggtgatgaa

SEQ ID NO: 17456 - DNA, 906 bp, DROSOPHILA
ttttttggatttatgtaggtttatttggtttttaaaacatgtcacttggcaatgccgatccctggcacttgaaaaatactatagttaagcaaggaatctccgggtccgcgaataatagcgaaagttttgaggacaacttcacgcccttgccctctggaaacgagagcaacgtccaaaaggacgggaaaatcgagccccttccggattccagcgactatttaaagctacttgagcggaagctggcccgggtgcagaagggcaacaagttgttggacaacctgcgagacaagcggcaggattgcatgcggggattgctgtcttcggagggagtgcccatttccattttcgagcagttccttgagctagacgcgcccatcgaaagcggtcgcctccatcggcacctgctgcccgttcaggccgtaaacgtgggcgaaactttccacatagtggagcacgacgctctgcagcagtcggcagaagaagctcaggaggaggagtaggaggataagccctcggttgagcattaacaaaatcacaatggaatccacgttcggtaaagtcttcatgtttctcacggacctcgcttggaaaagtcgtctcaccatccctgtcatagtcacaactgcatttctcgtcatggacatccgcctgcagatcgagatcaacattcagtccgggcaatttaatgccagcgatgtggacgacgttcaggatggcctcgacgatcagtttaggatgcacgatcactggtcggacgacgaaagcggcagtgacatctatacagatgaggagtacacaaacgacgatggcaacagcgaagcgtcccactacagcgtggacatctacgatccctgggggtcagaagacgaggtagacgcgagctattcgcgaaggatgcggttctaa

SEQ ID NO: 17457 - protein, 153 aa, DROSOPHILA
MSLGNADPWHLKNTIVKQGISGSANNSESFEDNFTPLPSGNESNVQKDGKIEPLPDSSDYLKLLERKLARVQKGNKLLDNLRDKRQDCMRGLLSSEGVPISIFEQFLELDAPIESGRLHRHLLPVQAVNVGETFHIVEHDALQQSAEEAQEEE

SEQ ID NO: 17458 - DNA, 5375 bp, DROSOPHILA
gcccacgactggcgttacacggtgcagtacacagagcgactatcccattggccatactggctgaatacggctacggccaagtacgtggtcaccaagtcattacccggagtatcgcccgtggcctatgccattaagtccacgcatcagacttgcttctttgccggattctattgccgtaagataagacggaagtgatatgaatgccctcgctaatcgtaaatgaatctctattgcagtacaatcactgagtgaattcacgttcagaaactccaatggtgatacctttgcccaggagaacatccagtatcagtgtccaccactcttgggcggcatgtgtaggcgggaactggagttccagcgccaggcggtgatgcacaacttaacgataatattcggaaaacagagaggatagcataccaggatctagttcaaatttaaatcatatgtgcaaacaactaattgacttacctaccaataatcttaattcctaataaaaaaaaaacacacacaatactttgtttttaaatgtaaaccctgtgtttatttaacgatgatacaaaattacacggtacttgcttctaaaaacgatatctttcgttactttaaaattgttgaatacactttgaatgcgtattgaaataatttaaaaaaaaaaaaacacgtctaaatcaggtggcacattttggaaaatgaattgagaaactagataaacttgtgaactaataatttaccaattatatctacttacaagatacgcatacaatattatgcagtgtcttttcaattttatggtaaccttactcttcaaaatgcgcacacaaagtataattttaactaaattagctagacggtcctgtgcaatttgattttacaacctcatatttggatgctgttaacttttgatttcgtactatatgttatatattccttcattcattatatattcaataattggatttgatttgatttggtttttgtcattttcattgattgctgttcatcacttgaacagttccaatcgctttcttttggtcggtcctgatgctccaccacttctcgccgatcgcgtttgacaagctgctgcacttgtggatgaattcaccggcgtacttggtgcactaaccgattccacggagctggtctgtgaggctccaccgccgaagacggagccaaaccagcgtgttagtttcgtggcctgagtggatttagcaccctgtttgggagatttgggtgacttgcgcagcgatgcaagaatggaattgcgattaccattcgaaggttgcgttcgctcctgcgtaattccagaacctatcaaataattggtgattttattggcctgcgacggcctgacggactgttgatccggttgcacgggcgatacttcgccagaggagttcaatcgcatgcgactgccaaattggccattgttcgttatctcaaagaagtcatcttccagcagggttcttcttctctgcgtaatggtagactctgcatcatccttctgggtcagtggcaaggttggcaagactttgggactagttttagccgactgctgttgtcgtggctcgaacatttgctccaggatatccaaacacgagcgatctcgcttcttttttggcaccgatatatttactttcgctagctgctgctgaaactgcttcacctcagagccaaagatcttaaagccttcgaagggcgatgagggtcttggttgcgccagcggaatctgcgagtgttccgaggatatgctaaatagatctggagatttgttggcactcctcttggccggtggtagacccaatccgccgccgaaacttgaattgacggacgtcacgggtttgcgttttcttttcaaagccttggtgcgacgactctgcgatggatcctgcggagaacactcatcgtgcgagctattgatcaccactgtctcaactggatctttgtaaagcggaatagacaccacctcagaatcgttgagcaaattgtgtgtagacggcaaggttagaagcattggagtttgttgaggtgtaaagggcacacgaaaagcgggcgactcaatggcatccaaattgtctggtattcgctgagcacattgcatgtactccgaggacaacgagctaccactgagaacttgaggagtaggtggcaagtgctttgaattcggcttagtctttgtcttccccaaatcttcagtcttggtttggcattttctcggacgtccaggctttcgtttcgcagttccttgagcaggtacatccaccgtcttctgtttcttttcctgcccgactttagacttaggctcctgcttcactatttgtttgctacttctgggcgtttggttaccctccaacttgactctccttggaaagctacgcttgacatcatccaatgagcgatgtttcaagtacttactgtttatttttgtttcagcggatcgtgttaggcgctgcattccccttgtggctggacgacccacatccactgggctcaccgtgcgctttttcagattttttcttctagctgtgggctccgttttgggcgttacgatcgcagtagtggttctggacggtggtggtgtgctcagagtatcgagggaaacccttaaaattcgaacattgagtctccttgtcttaggtgtcagatgaacggtggctgcacgagttctcttccttggcggcatattatcggtcgcttcatcatcctcttcggaatcggtgagatcagcttttttgcgcggtgacgtttttttgctaaattttttctttgatttcgtccttggtgattcatttaatgagggcgttcgattttgcggagtacttggaggtgttacaatctcacaatcatcgctggatacaactaataccgggttttgatctgcatcaggttctactgttaggggttcatcgtcagactcggaatactcgaatatcagcggtgacattgccacatcatccacgctgtgctcggataacctatccgtttcttcaaagagcccagttttattttgctgagccggattgttgtctatggaagcgattgtagagcacacatctgagccgcttattgtgctctggctgttctttgaggccaaccagagattcagattgtgtttgtattgctccggtgcgacaagtggcagtgacttgtcgaattgatgacgaaaacgacgcagacgaaagtccctacaaattatataagttattttcatatgcaactgactattccggtcttatgcaacagtgaaactgatcgttgctggttcacctacttgatgtactcgctgaggaatccccgctgcttgtagtattcctcgagatctatgcgcttactgaatacctccttcggatctggcagatggaattttcgatcgaagctcgcaaagcttttgtactgatgctccagtcggccgcccaaccgtagaacattgtagagcaacctaacgtcggactgcagagagagagaaaccacataagctaaaatgatataaaccatattatgaatgcattgcctcaccgtaacgtcaacactggagataagaacgtttacccgtccctcgaattgcttcagcagcatggaagtgcaaaagctgttgttcagcgaatgcccccgattatccaccataatgtagtcgaacttgaggcgactgagatctccaatgctccgtagttggctccatttcgccaggtaaacgctgtgcggggagtcggtggtatctgtaaaggcagaaagtgaaggtgttgaagtttaatttttaaatggcaataatgtgaaattacgataacattcttatcaacaaatccatttaaatattaggcattaccttgcaccccctgaatgatgtacacctggaggtcagtgagagtgtccaaatggaatcgccaaccggtgagcagttgctcatcgttctggagcaccacaagtgtttttttggcgggtggtagggcacttagaagtgccgccaccgtagcgacctttccaaggccactctcatcattcaggatgcagaattcccgcttagccaaacgatcgtagacgaagcggacggcatccagttgaaagctcttgaggtactgcgtcacgtggctcgtgaccagtgcctcatctgtgagccgcacctccggcgtttgctcggatacaaagtgatacatgatccttcagagaattcgaatcaatggtgtgcgtgatgcagggccagatagatggcaaccaggatgtagaatagttgcaggtacgagaagatcacgaacatcgaaaatgaaccaattatcatctttcgcgccgcagacggcccatcgaattcgatattctccggatgcagtatgtccaccacgttgtagttgttgttgatgataacaggatgttggatctcgtacatgtgttgaaactagttaagcttcaattttttcggaggacaattttcgtcccttttgggaaattgggttaagcgctgttagtcatggcgggggcgcgggaaaaggcttaacaatcgaacaagaagaaaatattatttttggctccaattctatttcaccattcacacagaaccggctgcgtcttgttggcgcgatcagctgttggacgttggtagtgttggcaaacgaagcaatgtctagaaatagccaaaagagatactgctcttgattaatagcaaaatattaaaaaaaacttactgaaccgacaaggattagtaaaatacattaggttggaaacctttggcgagtaaaatgtttttaaattaaattatttattctgccaactcaaaacttgtgtaaggaattcatttttatagctgcatttagctcatcactgttgcaactgttgtgatttcgtttgcggtttgtttcgcatggaatttgtttaaatttattcagaccaaattgccatggctgttgcaaagaaggaaaaatttgaggcaaaaaagaaaagccctgaaaagggaaaacagcagaaagccaaagttgttcctgtcacaccgccaccaaatgtaaaacaacgaactgtggtcactccttggcgagacacgtgcgtagacaaaaagtggaaacaaatccaatccgttgataaaaacattacattttcaggctggaatttaatacaacgtacaaatggttgtttggcaagtccaacacaccagccacatggcgtcaagcgctcagtaaaatccgcatttggtgtctgcgaagaggaagtctctgcccggcagcggttttggccacatcggtgcttgttcaggcgcacttggaggaccaggagggcagcgccaaaatacaggacacctatgccagtgcctttacacgattctacaactttatgtcctccattatccagggacacaacatgtccagcatgtatgaaacggccaaggaactgggcct

SEQ ID NO: 17459 - DNA, 3021 bp, DROSOPHILA
atgtacgagatccaacatcctgttatcatcaacaacaactacaacgtggtggacatactgcatccggagaatatcgaattcgatgggccgtctgcggcgcgaaagatgataattggttcattttcgatgatcatgtatcactttgtatccgagcaaacgccggaggtgcggctcacagatgaggcactggtcacgagccacgtgacgcagtacctcaagagctttcaactggatgccgtccgcttcgtctacgatcgtttggctaagcgggaattctgcatcctgaatgatgagagtggccttggaaaggtcgctacggtggcggcacttctaagtgccctaccacccgccaaaaaaacacttgtggtgctccagaacgatgagcaactgctcaccggttggcgattccatttggacactctcactgacctccaggtgtacatcattcagggggtgcaagataccaccgactccccgcacagcgtttacctggcgaaatggagccaactacggagcattggagatctcagtcgcctcaagttcgactacattatggtggataatcgggggcattcgctgaacaacagcttttgcacttccatgctgctgaagcaattcgagggacgggtaaacgttcttatctccagtgttgacgttacgtccgacgttaggttgctctacaatgttctacggttgggcggccgactggagcatcagtacaaaagctttgcgagcttcgatcgaaaattccatctgccagatccgaaggaggtattcagtaagcgcatagatctcgaggaatactacaagcagcggggattcctcagcgagtacatcaaggactttcgtctgcgtcgttttcgtcatcaattcgacaagtcactgccacttgtcgcaccggagcaatacaaacacaatctgaatctctggttggcctcaaagaacagccagagcacaataagcggctcagatgtgtgctctacaatcgcttccatagacaacaatccggctcagcaaaataaaactgggctctttgaagaaacggataggttatccgagcacagcgtggatgatgtggcaatgtcaccgctgatattcgagtattccgagtctgacgatgaacccctaacagtagaacctgatgcagatcaaaacccggtattagttgtatccagcgatgattgtgagattgtaacacctccaagtactccgcaaaatcgaacgccctcattaaatgaatcaccaaggacgaaatcaaagaaaaaatttagcaaaaaaacgtcaccgcgcaaaaaagctgatctcaccgattccgaagaggatgatgaagcgaccgataatatgccgccaaggaagagaactcgtgcagccaccgttcatctgacacctaagacaaggagactcaatgttcgaattttaagggtttccctcgatactctgagcacaccaccaccgtccagaaccactactgcgatcgtaacgcccaaaacggagcccacagctagaagaaaaaatctgaaaaagcgcacggtgagcccagtggatgtgggtcgtccagccacaaggggaatgcagcgcctaacacgatccgctgaaacaaaaataaacagtaagtacttgaaacatcgctcattggatgatgtcaagcgtagctttccaaggagagtcaagttggagggtaaccaaacgcccagaagtagcaaacaaatagtgaagcaggagcctaagtctaaagtcgggcaggaaaagaaacagaagacggtggatgtacctgctcaaggaactgcgaaacgaaagcctggacgtccgagaaaatgccaaaccaagactgaagatttggggaagacaaagactaagccgaattcaaagcacttgccacctactcctcaagttctcagtggtagctcgttgtcctcggagtacatgcaatgtgctcagcgaataccagacaatttggatgccattgagtcgcccgcttttcgtgtgccctttacacctcaacaaactccaatgcttctaaccttgccgtctacacacaatttgctcaacgattctgaggtggtgtctattccgctttacaaagatccagttgagacagtggtgatcaatagctcgcacgatgagtgttctccgcaggatccatcgcagagtcgtcgcaccaaggctttgaaaagaaaacgcaaacccgtgacgtccgtcaattcaagtttcggcggcggattgggtctaccaccggccaagaggagtgccaacaaatctccagatctatttagcatatcctcggaacactcgcagattccgctggcgcaaccaagaccctcatcgcccttcgaaggctttaagatctttggctctgaggtgaagcagtttcagcagcagctagcgaaagtaaatatatcggtgccaaaaaagaagcgagatcgctcgtgtttggatatcctggagcaaatgttcgagccacgacaacagcagtcggctaaaactagtcccaaagtcttgccaaccttgccactgacccagaaggatgatgcagagtctaccattacgcagagaagaagaaccctgctggaagatgacttctttgagataacgaacaatggccaatttggcagtcgcatgcgattgaactcctctggcgaagtatcgcccgtgcaaccggatcaacagtccgtcaggccgtcgcaggccaataaaatcaccaattatttgataggttctggaattacgcaggagcgaacgcaaccttcgaatggtaatcgcaattccattcttgcatcgctgcgcaagtcacccaaatctcccaaacagggtgctaaatccactcaggccacgaaactaacacgctggtttggctccgtcttcggcggtggagcctcacagaccagctccgtggaatcggttagtgcaccaagtacgccggtgaattcatccacaagtgcagcagcttgtcaaacgcgatcggcgagaagtggtggagcatcaggaccgaccaaaagaaagcgattggaactgttcaagtga

SEQ ID NO: 17460 - protein, 1006 aa, DROSOPHILA
MYEIQHPVIINNNYNVVDILHPENIEFDGPSAARKMIIGSFSMIMYHFVSEQTPEVRLTDEALVTSHVTQYLKSFQLDAVRFVYDRLAKREFCILNDESGLGKVATVAALLSALPPAKKTLVVLQNDEQLLTGWRFHLDTLTDLQVYIIQGVQDTTDSPHSVYLAKWSQLRSIGDLSRLKFDYIMVDNRGHSLNNSFCTSMLLKQFEGRVNVLISSVDVTSDVRLLYNVLRLGGRLEHQYKSFASFDRKFHLPDPKEVFSKRIDLEEYYKQRGFLSEYIKDFRLRRFRHQFDKSLPLVAPEQYKHNLNLWLASKNSQSTISGSDVCSTIASIDNNPAQQNKTGLFEETDRLSEHSVDDVAMSPLIFEYSESDDEPLTVEPDADQNPVLVVSSDDCEIVTPPSTPQNRTPSLNESPRTKSKKKFSKKTSPRKKADLTDSEEDDEATDNMPPRKRTRAATVHLTPKTRRLNVRILRVSLDTLSTPPPSRTTTAIVTPKTEPTARRKNLKKRTVSPVDVGRPATRGMQRLTRSAETKINSKYLKHRSLDDVKRSFPRRVKLEGNQTPRSSKQIVKQEPKSKVGQEKKQKTVDVPAQGTAKRKPGRPRKCQTKTEDLGKTKTKPNSKHLPPTPQVLSGSSLSSEYMQCAQRIPDNLDAIESPAFRVPFTPQQTPMLLTLPSTHNLLNDSEVVSIPLYKDPVETVVINSSHDECSPQDPSQSRRTKALKRKRKPVTSVNSSFGGGLGLPPAKRSANKSPDLFSISSEHSQIPLAQPRPSSPFEGFKIFGSEVKQFQQQLAKVNISVPKKKRDRSCLDILEQMFEPRQQQSAKTSPKVLPTLPLTQKDDAESTITQRRRTLLEDDFFEITNNGQFGSRMRLNSSGEVSPVQPDQQSVRPSQANKITNYLIGSGITQERTQPSNGNRNSILASLRKSPKSPKQGAKSTQATKLTRWFGSVFGGGASQTSSVESVSAPSTPVNSSTSAAACQTRSARSGGASGPTKRKRLELFK

SEQ ID NO: 17461 - DNA, 10425 bp, DROSOPHILA
gagtttggtggcgactccctgttccaacgattgatgcaaaaacttgacacctacgtggccaacaatgacgagattcgaaccgagatcaagccgcagctaaagaagattattcagaggctcaggcaatctcccagctacgtaaaggccctgcacaagtctctattctacttggacgccagcaagtaccagctgtccaagcgcaccacgggcatcaactacgtactaatccgtcactggctgcagccggaattctcgctgtacggctacaagatactgggcgtaatcactttcctgcaggtcagcgtttccttggccattagtggatgggatgcctggagagagcacaagcgccagcagctagaatcaataaagcaggctggaaagaatttcctgcaaagatcttcgagtacaaaggacgtagatccaaacaccccacagtgcatcctttgcctggagccacgttctgacagcagtttgactccatgcggccacatcttttgctggagctgcctgctcgagtggctggaggagcgggatgagtgccccttgtgccgggagtcgctgaaaaagtcccaagtgatattactgcaaaactatgcctaagattggattaagactttttatattcatgttataggaagtatttttgtgtctatgtaatatattttattcatataaatgaaacaagttttatttatttattcacaatttgtaatgtcaaaaaaatggtataaatcttcaacttaaattacgtgaagtcttaaaaagactaaagaaaggatgcacagaaacaaaatataatgatacttcatcgttgatgttaatgatagtttcccagtcgctcgctgggttttgtatgcttaaacgcatttcttacacggtttattcgatttatttaaacaagtttatgtacatgctgcttatatatataatatttttggtgtctggcttaacattatctatttacattatacaattatttgggctctaagctcattgcctagatgatatccaggtagacagtgcggttaaatatctgcttcttgcggcgcgattcgaaggcagaccttgcctccgaaggggactcgaaagcgacgcgagtgtcgccggtgggtttgccttcatcattgaaacgccttataatgtcatccgggctaagcttgtagtcgctaaagaagcgcatgatgtcctttagctccgccttgaaagggacattgcgcatagccactacgcatcccggccgattgaacttgtccgggattatggatgtgggaacgggcaccggagaggttggcttgacttgaccctgattgctgggcgagagggagctgctgctcagaggaggatctggtcgagcgaagggattgaagtgctgtttaacgggtgcgttcgagctagtgctgctgttgtcctccctttccagggatagcggtcgatcctgctgttgcgatggctgttcctgcggcttatcaaagcggctgggtcctcgacgacgagacggctgcgcactggctttatttccacctgcaccgtcattcgcattgttagtttccgctttcctgggaccatttccacccggcagataatccatgaagggctttttcatcctatcagcgatttcctggggcgtgatggccaccactcgcagtccccttcctcgaaagcgtctattgtggaactccctgatggccagtttgcaactggcaggatcactgaactccacaataaactcgccggagctctggttgcgttcattgaaaagctgttcgatatgctcgattcgtaggtgctcgagggaaaacagttcacccaaatcattggctctcgtggcgtactcgcagttgtggacacgaacgaagacatcctcttggcggggtcgctggatgacaccagcgcctccattatcatttggatagttgggtccgttcccattggaattcccgttatagttatagttgttattcatattgaagggaaagttattgacaccgttctgctgaagcggcggcatgtggaagggcatgttgccaccattgacaaagggagccatcatgttgggactcatgttggaattaaaattgggtcccatattcatctgttgctgctgctgctgatcttccgcctggcgtctccttggatcagcggcgaatctgttggcctgaatattctcattctcctgctgctgctgcttctgtcgcctttgctgatcttttaggagctcttcccgctgatcggcttcctcctttagcagctgctcattggctcttcgttgcttctccttggcattctgcatgtcctcctcgctgctggatctcactctcagctggcggaaccctatatagtgcttgctggtatcctgcagagcagagtcggcttcagcttccctggcaaaaaggacaaaggcaacggattctcgtcgattttttggactggggctcagtaggatgtccacaacggtatagctggcggagaacatcttcatgatatcttgctcagtggtggtctgtggcaaatcctctatatagaggacattggtaacgggtctgggaacgggaacaggtgcgccaccgcctcgttcacctctgtcaccaccattatgattgccatgactcctgctgccgtcctgcccctggcgactagcacgttcctccgccatctcaaactcatcgtcgcccacgggaacaatctgaatcaggcgatctcgaaacattgtgttattccgctgcactgccttttgggcactggacacacgagagaactccacgtaggccactccggtgcgactgccattcaccatcatgatcttgatgccattgtgcggaatgtacatgccctggaagtacttgcgaatatcgctgtacgacgtgttttggcacatgccactcatccgaatgtaacaggtgtccgcaacaacctggggcgtgctgcctccgcccggagagccacccatggtgggcgacactttggcctgtgtctgttgctgctggagtagcatctgctgctgctggaagagctgcgggtacatctgggcatagggatttacgctggcaaaggcaatgggctcgctctcggatttcgaaggctgcgctggagccgcactgccgctggacacctgctgcaaagcggtcagtagctggacactggtagcacttggttcgagattgtagttgttggtcacatttgtggtggtcgtactagtggtgtagctctgtagagagggtatctgcggcagattcaggttcaagcccatgttgagacccagtcccacagctggcaactgattctgaggtggttgcgcccatggagatggcagtgcaccaccgccggcaaccattttcagctccctttcctggcttttatccaaccggtcggagcgacgtttgcgacctcgttcccgttcccgttgacgatcccgctcccgctccctatcgctatcatcggaactggacgatctgctgcgactgcggcgacctgtgacatcagagagcgtgatccccgcctgctgttggtaggtcagaaaagagggcactgtccctgtggccacacccttgacttgaccttgacccaagaaggtgtttaggcccccaataatcggaggcagtggcgcagccggaccagccacctttgccgccgtaacggggacgacaacgggcataggaactggaaccgatactggcgcttgagcggacgccgctttccgagcagtctcaataaccttttgcatctcggcccgcgaggatagcagcaggcgcacctggatctccattagtttctcgcgatccttcagcattgcgcagcgggcatcctcgtcggtgctattggtttgtagaaattggggaaaaaaaaatcaaaggcgaaaaatcaggggtgttacataataagggtgagggcaatatcccgagcagttttcgagaattcggcgtgtttaatggccccatatttgtcatcagccagcattttaggcagtcaaaataatagcactttatgtatatttattccatatgttatctgcatcatcatccacgttcctggtggaaccattcttgatttgccataacatgaacctaggatcacagaacttgaactcaatttacccgatttaatctatttaaaaccaaacaactaatttcaaatcatcagcgaattcccgataaaagcacaaaggtaaaaggaaatgaatccttatctttacacagcccactaaatgtaatataaagatcaaaactaaggtctgctaaaactgcacgctaaaatcgttggcgatttgaaacctttttacattctgaagttacggtggtcccattataattcgaaaatatttcggtttcatatacattgacgtacttacttcggttacttccaatgccaaacatatatttaaaaaaaatgatccaccaaaaataataacattttccgattttgccgctttctgaatttaaatctatcgatatttgaaatatatatgaaatcatagggtttttgagatatgcattctggaatgcttattatggaatccgagtgataaaatgtgccataactagcccgatgagataactctaaatggaatgaaatagccgaggggctcgttattacctgttatttcagtccataaaaccatgagctatgcaagtattttcatgtgaactttcttagtgctattactttgaccaccgccttgggtacatgcaagttaggagcgtctctggccccgacccaagtccaggccggctggagctccgagattgctaggggtttacttatagatcagtttgtggctaactacctgaaagcgatgaaagcgtcgcccatctcgccgccgattatgtggacaccgccctcgggaattgagaggcccgagaagaagtttcgaatgtcgcgcgcatttgccgtccacggcaaattttgtaaccgaataatcacactcatcttgatcaatcaattgcttagctttgattacttatttatttcgtttctagtacagactgtcttcacttgcgctccacttccattgactggtcgctggctcctccgttggacatcagacgcgtattgacctgatattgatgatactgatgccgctgcccgtggattcttaaatctgtaacgataatcgcatacttatggaggatttaccaacaaaatgaaatgtcttaaaataaagatttcagctcagtttaaggaataaaagagaacagaccgctgcaatccattattgatgaatcacttaacattcattgtatacccttcagctaatcttccaatataagatgcttatgcactatcagcggatcacacaagttttaaccaaaatctttcggaagaatttagattaaacaatgactttaataaaaactacagaagaccaataagatgataccctgtaggcgcctggcaattctgtatttcctacattactactttccaacttccttgggggaaaagctgtgctctgctcctgattaaatctcgagttgatcgctcggttgcacacacattagacccactatttcatggattcgcatggcagtttctcatgacaatctttgaggctggccaagacaagcgtgcgttttggtattgcgtaagacgaccagtttgcagccagccagctaggaggagctactctctccctagcttttcgccagaataaaggtctaattgagatgtctcacttacagtagcagctggtgactttcgcacatgatcttaccaaggacatgaggcattgtgtagaaaaaagaaaactatctctacttaagctgtgtggttaacaggcagccacccactggagctaccacagatccacatgctccacgatcattagccagattcaatttcctcattagtcgcactcaattatgtgccgacgagacggctccgcagcgtccactggaggatgagggatcaatagttcggggctggcgggaggatcggcggcaactgctttcccaaaacagtagtggctggagaaaactcgttgatcgttttggacgtaatgggaaagctattatgcagctttaattcaatcggcctgctagttgtgtgctctgagctaatgcgattggctcgttgtcggattgtttgtatctcggtgtcaaagactttagatatccagagccggggagctacaggaaacccaaaccgaagctccactccttccgcctggctatataaaaagcattgttgccatctcggccggcagtaggaaattcgaattgaccgcgttaccgtcaccgtcaccgtctccttgcccgccgcagtcggccgtcattgatcctcgtcacaattatcatcgcatcgcattgctcatttcatcgttaaacgatcggatcatttgattgatcgatcgcatgtgcgaaggattaaagcgatgagaagatcgaaagtgagtgatcgatgtgcatgggattattacccttaaaagtgtgccatgaataggagtagtgatttggtggcagtgattttgagcatatccttggactacatgctaatcgatcgattttacataacaacatgtttgattcacaaaagcaacttactgttcgacttctgatcgggtcttcacttgaaccaaacaatcttcacctcttacttatccatgaccgatagacttaacttgcagtgccatccagttgaaataagagattcaatctttattactgctgatttattccaaactctgttcataacacatttaaaagaataacatgcagaccaccactgcaatacacaatttaaaacttgattatttccttggattgacttgcataacatttacgaatcgcttgatgaacttaccaacatcattcgattaaaggtctaaataggcgggacttaaattagtattagattaaagccccaatcacaacaatcccttattaaattgaataagatgatcacaaaaactagggccttactaacccaaattggattcgaaaacgaaagagtgcaaatgaagagagttataactagaaaaccaaatttcccagattgcccgctttcacacaatggccgcgttgggcctactgctgctggtgggcgtgcatggagccacgataatcagcatcaagtacccggataagcccgccgtggagccgcagccggccaagagggatctcagcctgagctacgcagccaccaacatcgactccaaggagggtacccgcgtgaagaccatcacggtgatcaagaatgtgggaggcatttcggcgcccgaagaagctgcggccttgggatcctccatcgccagcagccacaaccacaagcagcagccgaaactgatcattgatcccagtctgcacaagagcgaggagtgggcaagtgctttccgagacaactttgactcctacggagcactgcccgatgtgcccgacatagatgacctattcgagtttgtcaatcgcaagaagcccgagggtgaaaagaaaccggaggaggtgcccagccagaaggaggaaagggtgccgaaggagttgcaaaagccggcggaggagaccaccaccaagaaagccggagccagtgagcaaagcgagggcgggatcgtacccagtggcaacatcgatagcgacgaggctgtggtcgagaagataaagggtgatgccgaactgttgccgcacattaagcaggccaacatcctgcgcctccaggcggcccacgcccaagcccgctcgggagtacgaaccaaggagtcgctgatcgccgtcaactactccacgcccatgcatcaggtgagccagtacttcgacaactatgtccaagcggtgccaaatggctacgactacccaaagccctgtggcatgcagcctggcaacagtatccaagtgaccacgccttcaggccgcacctacgacattccgcagagcaacagcagtggcactggtggtggcaaccacccgtacttggctccagcgctcacaaagaagacgcagattccgccgatcacggtgcagcctccggtgcaacagcagcagcctcagcctcccaattactcctccgtgaactcgattgtgccgcctatagtgcaaccgcagcctcagggcaatgcaaatcttccacagcagccgcaacagcctccggtggtgaatcctccaaacggaggtatcctgccgcctctgggaacgggcggtatctccaccagccagcgtccctatgtggcgcccaggctgcgaaacaacggcctaggcatcagcagggcgcccagcactccgggcccgattcagattcccgggcaacctggcctcgtgggtaacaacaatccacagcagaccccgaacttccgcacgagcatttttggcggtggctcaaatcgtcccaacacgctgcgatcgcgtggtctaaagtattgaaaacttaaactaagtgtacactcttaaaaacagtcgaaattatagttcttagagggagattaccatcaaaattgccaatcgaagccagcattgtggctgcatttatccatatatcatttataattatagaaatatattttaaaaattgtttgatagccttaaagttatgtaccaatatgaaatagtggtatgttttccgatcaaacagctattaagactatttaatggtaagcgctataaaacccaattgatatgttgccttggcaatgctaaacaaatccgttgttttattttctgcattttattagcatgcttgttaataagagatctttcagttcctgagtgatcctagctaagcaagactttgtatcggactacctatgtttcggtttaaagccaattcaggtatgttcgctaatacaggtatttactacgaccaagagcaatatatatatttctacccccgaatgtgtgacaggcggtacacaatttattcgcggaaatgtatttacataatgcctttcatcttgaaatcgaatctggaacggggctgctagtagaaccgagactgtaccctaagcataaaatatgaattgcacaccgaaacgaaacagagcgcaaagaggaatctgcgagtcgttaagcaccaatcaatactgatcaacatacttttgggtaatggttttaaccgattttcactgtttccagcagtttcttggtttttcttctcgctcccgtgcagtgttgttgttgctgcttcgaagtcgttgatgttgaagcatctccacgggaagaagcagaagcgaaacgaacgaagaggagaagcggagggggcgaggtgtcgctgttttaagtacgagtactgaatttattcaatgaactttactcaccatgaaaaccattcaaaactccacttattctggaccaccaatgcacaaaaacagttgggtttgttttggctcaattgctatatatttattttgattattcctgctgatgatcggcctgaaaaatttatattttcctggcaacacaaaaagtgaaatgctgttttgtaattcctacgcttgcgagggtttggtgacagaaaacaacatggctgacacgaaaagtgtgacctgtagtcgtgcagcagaaaaaaatcactccgaagaccacgggcaccctgtgagcaaaatatgaaggggtttctgaaatgcgatttggttaattgttaaaaacaattctaattcgttagtcactatatgacgtttatttaaaacaataaagtaaccaaacaattacatttattaaccttttaaattttaatataatctatggtatatgttgatcttgcaagattgtgctggagtattgaacaattgaacattaacgagtcttaaatgtgcaagtgctacaaaatatttttccctgttaatttaattgttactgctaacttaagtttgttaccatattagttggaattgcttatgttattttatccgaagtcaagcggagcgcaagtgataagatgcgcctgtgcgcgtgatgcacagtgtgaacacttgtggtatttaattagcaaacgaaaagaaaataactacgcagcactcccacgcaaatactgtaaaacatatgtttcggtattttttatgtattggcacgcagattttagcgcttagtgtagttaggtcacacaccaacacgattcgtgcgtagttttcatttattttgctccgctttccttcgctgttttcacacccacgatccgcgaaaaaaacatccaggaatcgtgttcaaacattggcaaacatattgcgtaccgccgcggccataagtcaaccgctgtaggccattcttttagccccaaacaagagcgacgacgtcagtgggcgacgcgactggcgtcaggtgaaaaaaagaaagaaaaacgtattgagatttgaaaatctatataaaacgggtgcagcgaaattaaacggaatttgcaactgtgaaaacgctctaaagcgtggagagttgcatttgaaaaaaggtaattagcgtaccaattaaaaaaggaattgttcagtttgtgcgtgcaggttttctgcatgtgtgt

SEQ ID NO: 17462 - DNA, 3320 bp, DROSOPHILA
caaaccctcgcaagcgtaggaattacaaaacagcatttcactttttgtgttgccaggaaaatataaatttttcaggccgatcatcagcaggaataatcaaaataaatatatagcaattgagccaaaacaaacccaactgtttttgtgcattggtggtccagaataagtggagttttgaatggttttcatgatttaagaatccacgggcagcggcatcagtatcatcaatatcaggtcaatacgcgtctgatgtccaacggaggagccagcgaccagtcaatggaagtggagcgcaagtgaagacagtctgtactagaaacgaaataaataagtaatcaaagctaagcaattgattgatcaagatgagtgtgattattcggttacaaaatttgccgtggacggcaaatgcgcgcgacattcgaaacttcttctcgggcctctcaattcccgagggcggtgtccacataatcggcggcgagatgggcgacgctttcatcgctttcagcaccgacgaggatgcccgctgcgcaatgctgaaggatcgcgagaaactaatggagatccaggtgcgcctgctgctatcctcgcgggccgagatgcaaaaggttattgagactgctcggaaagcggcgtccgctcaagcgccagtatcggttccagttcctatgcccgttgtcgtccccgttacggcggcaaaggtggctggtccggctgcgccactgcctccgattattgggggcctaaacaccttcttgggtcaaggtcaagtcaagggtgtggccacagggacagtgccctcttttctgacctaccaacagcaggcggggatcacgctctctgatgtcacaggtcgccgcagtcgcagcagatcgtccagttccgatgatagcgatagggagcgggagcgggatcgtcaacgggaacgggaacgaggtcgcaaacgtcgctccgaccggttggataaaagccaggaaagggagctgaaaatggttgccggcggtggtgcactgccatctccatgggcgcaaccacctcagaatcagttgccagctgtgggactgggtctcaacatgggcttgaacctgaatctgccgcagataccctctctacagagctacaccactagtacgaccaccacaaatgtgaccaacaactacaatctcgaaccaagtgctaccagtgtccagctactgaccgctttgcagcaggtgtccagcggcagtgcggctccagcgcagccttcgaaatccgagagcgagcccattgcctttgccagcgtaaatccctatgcccagatgtacccgcagctcttccagcagcagcagatgctactccagcagcaacagacacaggccaaagtgtcgcccaccatgggtggctctccgggcggaggcagcacgccccaggttgttgcggacacctgttacattcggatgagtggcatgtgccaaaacacgtcgtacagcgatattcgcaagtacttccagggcatgtacattccgcacaatggcatcaagatcatgatggtgaatggcagtcgcaccggagtggcctacgtggagttctctcgtgtgtccagtgcccaaaaggcagtgcagcggaataacacaatgtttcgagatcgcctgattcagattgttcccgtgggcgacgatgagtttgagatggcggaggaacgtgctagtcgccaggggcaggacggcagcaggagtcatggcaatcataatggtggtgacagaggtgaacgaggcggtggcgcacctgttcccgttcccagacccgttaccaatgtcctctatatagaggatttgccacagaccaccactgagcaagatatcatgaagatgttctccgccagctataccgttgtggacatcctactgagccccagtccaaaaaatcgacgagaatccgttgcctttgtcctttttgccagggaagctgaagccgactctgctctgcaggataccagcaagcactatatagggttccgccagctgagagtgagatccagcagcgaggaggacatgcagaatgccaaggagaagcaacgaagagccaatgagcagctgctaaaggaggaagccgatcagcgggaagagctcctaaaagatcagcaaaggcgacagaagcagcagcagcaggagaatgagaatattcaggccaacagattcgccgctgatccaaggagacgccaggcggaagatcagcagcagcagcaacagatgaatatgggacccaattttaattccaacatgagtcccaacatgatggctccctttgtcaatggtggcaacatgcccttccacatgccgccgcttcagcagaacggtgtcaataactttcccttcaatatgaataacaactataactataacgggaattccaatgggaacggacccaactatccaaatgataatggaggcgctggtgtcatccagcgaccccgccaagaggatgtcttcgttcgtgtccacaactgcgagtacgccacgagagccaatgatttgggtgaactgttttccctcgagcacctacgaatcgagcatatcgaacagcttttcaatgaacgcaaccagagctccggcgagtttattgtggagttcagtgatcctgccagttgcaaactggccatcagggagttccacaatagacgctttcgaggaaggggactgcgagtggtggccatcacgccccaggaaatcgctgataggatgaaaaagcccttcatggattatctgccgggtggaaatggtcccaggaaagcggaaactaacaatgcgaatgacggtgcaggtggaaataaagccagtgcgcagccgtctcgtcgtcgaggacccagccgctttgataagccgcaggaacagccatcgcaacagcaggatcgaccgctatccctggaaagggaggacaacagcagcactagctcgaacgcacccgttaaacagcacttcaatcccttcgctcgaccagatcctcctctgagcagcagctccctctcgcccagcaatcagggtcaagtcaagccaacctctccggtgcccgttcccacatccataatcccggacaagttcaatcggccgggatgcgtagtggctatgcgcaatgtccctttcaaggcggagctaaaggacatcatgcgcttctttagcgactacaagcttagcccggatgacattataaggcgtttcaatgatgaaggcaaacccaccggcgacactcgcgtcgctttcgagtccccttcggaggcaaggtctgccttcgaatcgcgccgcaagaagcagatatttaaccgcactgtctacctggatatcatctag

SEQ ID NO: 17463 - protein, 985 aa, DROSOPHILA
MSVIIRLQNLPWTANARDIRNFFSGLSIPEGGVHIIGGEMGDAFIAFSTDEDARCAMLKDREKLMEIQVRLLLSSRAEMQKVIETARKAASAQAPVSVPVPMPVVVPVTAAKVAGPAAPLPPIIGGLNTFLGQGQVKGVATGTVPSFLTYQQQAGITLSDVTGRRSRSRSSSSDDSDRERERDRQRERERGRKRRSDRLDKSQERELKMVAGGGALPSPWAQPPQNQLPAVGLGLNMGLNLNLPQIPSLQSYTTSTTTTNVTNNYNLEPSATSVQLLTALQQVSSGSAAPAQPSKSESEPIAFASVNPYAQMYPQLFQQQQMLLQQQQTQAKVSPTMGGSPGGGSTPQVVADTCYIRMSGMCQNTSYSDIRKYFQGMYIPHNGIKIMMVNGSRTGVAYVEFSRVSSAQKAVQRNNTMFRDRLIQIVPVGDDEFEMAEERASRQGQDGSRSHGNHNGGDRGERGGGAPVPVPRPVTNVLYIEDLPQTTTEQDIMKMFSASYTVVDILLSPSPKNRRESVAFVLFAREAEADSALQDTSKHYIGFRQLRVRSSSEEDMQNAKEKQRRANEQLLKEEADQREELLKDQQRRQKQQQQENENIQANRFAADPRRRQAEDQQQQQQMNMGPNFNSNMSPNMMAPFVNGGNMPFHMPPLQQNGVNNFPFNMNNNYNYNGNSNGNGPNYPNDNGGAGVIQRPRQEDVFVRVHNCEYATRANDLGELFSLEHLRIEHIEQLFNERNQSSGEFIVEFSDPASCKLAIREFHNRRFRGRGLRVVAITPQEIADRMKKPFMDYLPGGNGPRKAETNNANDGAGGNKASAQPSRRRGPSRFDKPQEQPSQQQDRPLSLEREDNSSTSSNAPVKQHFNPFARPDPPLSSSSLSPSNQGQVKPTSPVPVPTSIIPDKFNRPGCVVAMRNVPFKAELKDIMRFFSDYKLSPDDIIRRFNDEGKPTGDTRVAFESPSEARSAFESRRKKQIFNRTVYLDII

SEQ ID NO: 17464 - DNA, 3213 bp, DROSOPHILA
gcaacttctgctgtaggttggagtccttgaccaggtgcgctggatggatgtaggacctgttgggacagccgagcactgggcatcgaataccaatgttgtccgtgatgatcagcatcaccgagtcgcggtcgtagatgtggccgcactttttgttgcgcacggggttctttatcaaggctttggaccagggatcgtagagcgagaagacctcgccgccggtggcttccatgataaggtcctcgtcatgggcggcgctattcgcttgaccatttgtttccgcacccgcctggggagctgccgctttcatgaagtttttgaactcggctgagttcttgacatcgatgcgcttctgctccaccgcttcggagcgctccttccagacttcctcgaacttctcgatggtgttgctagagtttttggcatgcttcatagccttgctgagcaattggtgcttgctcttcattcggatgagattctcggcgagatccacgttctggtccaacaacttctggatctccctgccatcactgaaatcggacacgactgtgggtaggttttaaagatgtctcagtgtgtcgcatggcttaccttctgccatttctttgaagaacttttggttttccaataaagtggtaagtgccgaatccacatggtaattgaagtccattttaaagcccagattctatgcagacgctttgcaaattgcaaatccagaatatttggatccaaatgttcaagactgacgcttagctaggttcagctaggaccgataagttcgataggcagcctaacgagggtgtaatcggtatttggcgaactgttaataatcgtggtgtataagcatggattttatgcctgaaatttaagtaaaataaatgtgcgtcaaattagcgactctaaaataaaatgtaaaatgagttaacttagagtgaccatatccccaacatacggtcttatccacccgcgagctatcgcggttatcggtgttatcggccaatgtcaacctggataacgagcggcggccaacttttcagtgtgccaaacgccgagcagacggacgagcagcgccagcgcgaccgccactgccaccagttgctgcggaccaatccaagtcacaaccaatccgctccgatccgatcccagccaacgagtgccagctgtgcgccccagctgcagctacacgtgtccccagggtgaaagcgctatccaagatgcggacgcacggactacggttggtgctcttggccctgctgcccacgatggccctgggcctgctagagggcctgtactgtggcaaggaaaactgttacgacgtgctgggcgtcaccagagagtcgtccaagtcggagatcggcaaagcataccgccagctggcgaggcgctatcatccagatctgcatcggggtgccgaggccaaggcggcggcggagacgcagtttaagctggtggccaccgcctacgagatcctgcgcgatgaggagtcgcgcacggactacgattacatgctggacaacccggatgcatactatgcgcattactatcgctactaccggcgacgcgtggcgcccaaggtggatgtgcgcgtggttatcgtggtcgtcctaaccattgtgtccgtcatccagtactattccggctggcagcgctacgattctgccatcaagtactttgccacggtgcccaagtataggaaccaggccctggaaatagctcgcgacgagatccaggaaaagatccagaagaagggcaagaatcgtatgtccaagaacgatcagcgcgatgagctggaacggatcatccggcgggtgatcgaggagaagatggacgttaagggcggctatgcgaagccgacactctgggatgtgctgtgggtgcagctgatcatctgcccctacacgatactctcgttcatcgtgtggcacgctcagtggttctggcgctacacggtaatgaagcagccgtatggccgcgagcagaagctctacctcatccgccggcacctgggcatgggccagcatcagttcgaggcgcaggaggacaagctgatcgaggagtacctgcatctgaagctgtggaagcgcgagaacttcgtcgcctggaaggcagaacaggaagaggagatgaaaaagaagctggcggagaatccacgatacaaggcgtacaggcgatacatgaagaaccacggacccggccgcatcacctttgaggattagccgctgctctgcgatgttcaagtttcattgttccatctaaaagtctgttgtgtgcgtgttgtaaaaccgatcccaaattcctcgccctcggcatccccataccgtctaaattttgatacatttatatatatatatttagaaattttttgtacaccaactatatcaatatgaattatgttaatgtcccggtgttgtccgccaaagggcgaaacgttgaccccgccggagcgatccgccaaaaccggttcaagaacgtggccacgttcggtacgcgtcggcacagtgtccactggctgccgtgaacgaaccatcctagaacaattatacccctacctggctggtcacaaaaaaagcacgccacattcgcgtgtttcctaactaacttgactaaaccgattactgtaataaactagataaaattcaaacgtctctcttactggttgttcactgtgcctggtttgcacagttgttctggatggccaaaaattcgatctcgtggcatttattcgctctaaacagcatctctccgtgcttttgtttacacagtttgcttagaaacaatttcgttttttattgtttcttggtttggtgcggttgctgaaagttaaacttaagtacgtgcttgaaaataagctgaagagtaaagaagtctagatttttcaatggtagccttcaaataaagttgatttgttttgcgaaatgctgactttagtttcggatacatgcgtgtggctcttgcatttcgctattcgcagttcacgtataccaatttttatttaaacatgtcttcaaagtcctcaatttgtttaaagtaatataacagcataaggtagtgaaataataagcatttattaccttatcatttcttctaaagaatcaaagtcctcaagttgtttaatgtaatataatagcataaaataataaacatttacaatcgtataatttcttctaaagaatcaaagtcctcaatttgtttaaagtaatataacagcataaggta

SEQ ID NO: 17465 - DNA, 1213 bp, DROSOPHILA
caacctggataacgagcggcggccaacttttcagtgtgccaaacgccgagcagacggacgagcagcgccagcgcgaccgccactgccaccagttgctgcggaccaatccaagtcacaaccaatccgctccgatccgatcccagccaacgagtgccagctgtgcgccccagctgcagctacacgtgtccccagggtgaaagcgctatccaagatgcggacgcacggactacggttggtgctcttggccctgctgcccacgatggccctgggcctgctagagggcctgtactgtggcaaggaaaactgttacgacgtgctgggcgtcaccagagagtcgtccaagtcggagatcggcaaagcataccgccagctggcgaggcgctatcatccagatctgcatcggggtgccgaggccaaggcggcggcggagacgcagtttaagctggtggccaccgcctacgagatcctgcgcgatgaggagtcgcgcacggactacgattacatgctggacaacccggatgcatactatgcgcattactatcgctactaccggcgacgcgtggcgcccaaggtggatgtgcgcgtggttatcgtggtcgtcctaaccattgtgtccgtcatccagtactattccggctggcagcgctacgattctgccatcaagtactttgccacggtgcccaagtataggaaccaggccctggaaatagctcgcgacgagatccaggaaaagatccagaagaagggcaagaatcgtatgtccaagaacgatcagcgcgatgagctggaacggatcatccggcgggtgatcgaggagaagatggacgttaagggcggctatgcgaagccgacactctgggatgtgctgtgggtgcagctgatcatctgcccctacacgatactctcgttcatcgtgtggcacgctcagtggttctggcgctacacggtaatgaagcagccgtatggccgcgagcagaagctctacctcatccgccggcacctgggcatgggccagcatcagttcgaggcgcaggaggacaagctgatcgaggagtacctgcatctgaagctgtggaagcgcgagaacttcgtcgcctggaaggcagaacaggaagaggagatgaaaaagaagctggcggagaatccacgatacaaggcgtacaggcgatacatgaagaaccacggacccggccgcatcacctttgaggattag

SEQ ID NO: 17466 - protein, 333 aa, DROSOPHILA
MRTHGLRLVLLALLPTMALGLLEGLYCGKENCYDVLGVTRESSKSEIGKAYRQLARRYHPDLHRGAEAKAAAETQFKLVATAYEILRDEESRTDYDYMLDNPDAYYAHYYRYYRRRVAPKVDVRVVIVVVLTIVSVIQYYSGWQRYDSAIKYFATVPKYRNQALEIARDEIQEKIQKKGKNRMSKNDQRDELERIIRRVIEEKMDVKGGYAKPTLWDVLWVQLIICPYTILSFIVWHAQWFWRYTVMKQPYGREQKLYLIRRHLGMGQHQFEAQEDKLIEEYLHLKLWKRENFVAWKAEQEEEMKKKLAENPRYKAYRRYMKNHGPGRITFED

SEQ ID NO: 17467 - DNA, 4221 bp, DROSOPHILA
tttcccaaaaataaccaacgatgtacttacatggcgcccacatatagcgcattgttgcgctcatccatgtagaaagtcttgtagtgcagcggcccgcaactgaagtcctgcacatgttctgcaaaagatgaacaaagagacgatattgagtatacgcaacgtgtacattgtacattgattaacaaaagttgagacagttaattaaagcctaatgaaactgtcagcagcaggagttgggtgggccaaaaaaaagcgaaatgaactaattaaactattataatttcggctcaacaaacacaaagttaatttatgggggcctgagtaaatacaagagagcataaggacacggctccttgtccacatcctcattctcatccatgtccttgcacatttgacactgacagtgtcacgtactccagccagcgatgtcacgtgctcaaagccggagcttggacccaaaaaaaaaaagaaagaaagaaaaaaaaaaacaaacacaagtcgaaaaagttgcaccgctgtcaatgtcattaacaaaagattgaggcatttagctgaaatttttacgacattaagttgtcaactaatttggcacaattagtgaaacaacaagaacacagtgcacacaaacaacacccagtgagatacacaaacacagaggcatacactctaacacacacacaaacattaggacaaaggaaggaagggacagtgggcaaggacaagtttttatttttgggccaaagcccaagcaaatcctttgatggccgcgctaagagtcatttgtgctgacttggcccgctcctttgtccttcgacctctcgctctggtcattgacaaccctaatggccggccaacaacaatagcagttacaaaagtgatttccataataatgcataatgagtgatagatacggaacggcctgtgacctcatgcaaattagccctcatttcgactgtgtcgcttttttggcacaaattcccccgaaatagccaggagttttgttatgttttgttttatttactaaacacaaattattccattagttctaatggctattttatctggtgtatctggtgctttaagaaaggtcacatctaaagaataaaaattaattattgccatagctaaaaataccaaaagaggctgtgcatcaaaaatcatttaattttctgacactgtaattttattaaatttgcagtccctttcaagatgagtttcttcaggttattgaactttggcattacacgaggatcttcgatatcgaagacacatcaatcaaattgcgagtgtagtccaaatttaattaaaattcgtccgtcttcatcccacgacacaatcagggttcccatagaagtggtgttttccgacaagtgcaataaggtaacttatgctgagtctgtgtgtttacaaagtcatgacaatagatcctgataggccttggccttcacgttggaggaacgccagcgtttgtgtatccatggactcatgccggcctgcgttcgaacgtacgatgagcagatgttggccatcgagtccaactttcactccttcgaatcgaatgtgggcagatatcgttatttgcgggctctgcgccagggttacgagagactgtactttcaattcgtatcgaagaacgtccacgcggtgctgcccattatctacacgcccactgtgggcttggcctgcactgtatacggcatgttgtatcgcggcatgaccggaatacacattaccaaacatgatcgaggacacatgaagcagatcctgtccaactggccgatgcggagatcggtgaaagccatctgtgtgaccgacggccaacgtatcctgggattaggtgacctgggagccaatggcatgggcatagcagtgggaaaaatggaactgtacacagccctggccggaattccgccgagtatgttattgccaatttgcctggatgtgggcacaaataacaaatcgctacacgaggatcccctgtacatcggtctaagggatgagcgtttaaagggcgatgagtacgtgtgctttgtggatgagttcatggaggcagtcgtatccacctttggagatcaaacgctcatccacttcgaggactttgcgacacccaatgcttttatgtttctgaataggtatcagcattgctactgccatttcaatgacgacattcagggcactgccgctgttggtttgggtggattgcttggcatccagaggatcaccaagaagccgctggaggagcatgtcattgtcttcgccggagcgggaagcgctgccatgggcatcgcctatttgcttaaaatggagctgatgtccaggggtctctccgaggctgatgctgccaaaaatatatatttttacgatcaagacggtgtcttgaccacagctaggaagagcataccggatattctatgcgttttcgccaagaacatgaaggaaactaagtccctggagacgttggtcgaacaagtgaagccctcaattattatgggtgccacctcggcaccaggacttttcactgagaaaataatacgcacaatggcagcgagtcacgaacgtcctggcatctttgccttctccaatcccaccatcaaatctgagtgcactgccgaacaggcgtacaaattctcagatgtaagtgttttagaatacttgccgaatatttacccattttattttctgcaatttgtctagggaaaggctatatattcggcaggatctccttttccgcccgtggagttcaatggcaaaaggctaactcctggtcaagctaacaactgttttgcttttcccgctttggttttggccaccatgactgttttggccactcgaatgccagacgagatattccttttggccgcccacgagctcgctgaatttccaaccaatgaggagatgcaaagcggacgtatctatcctctggtgaagcaggccaatgaagttgcctacaaaataggcgtgaaagtggccaagtatctgatagaaaacggtgagagcctacacttacatatatgcgcatattattatctttctaattggttaattaaggttatgctaagcgcaatttagaaccggaagatgttgaggagtatatcgaaaagaatagctataaactgacctatggaagctcgctggctgagacttgggcgtatccaaaaatgaaaccgcatccaagtacagccggccatgaaaataaacatcaaaagaaaaagtaggcgtttcgaataaaaatttaacatctcaaaattcccaaatgaaaaggtacccataaaaattcggacttgcaaaaaaaattttaaaccatggaatttcgccggctgcatccattgctgcgccttgcatcccgtcctcttctgagttccagcaggcggttcagcgtttatgatgacgaaatggaacaaataacaagacctgactggcatgttgttatgaatggaaagtacaataaggtgggtaaggatccatatgccatggaatgcccaaaactaattgtatatatatatgccttctagggccttgcgttcaccattaaggaacggcaacgtttgggcatcatgggattgatgccctgctccgtgcgctccatggatgaccagatgaatgcggccctggcgaattttgaggcgagacccacagatatcgcccgctttacatacttgagtgctgtccaccatcgacaccggcgactgtactaccggttcatcaaggagaacatcgagaaatcgctacccattgtttatacaccaacggtgggcgatgtggtggccacctatggactgaacttccagcaggccatcagcctgttcatcagcattcacgacaagggccacatccgggatcttatgcacaactgggtggacgagggcgttaaggccatctgtgtgacggatggcggaagggtactgggtctcggggacatgggtgccaatgcgatgggcattagtttgggcaaaatgatcctatatacggctttgggtagcattccgccgagcacactaatgcccgtttgcctcgacgtgggtaccgataatcaggccctgctgcaggatcccctttatgttggggcacgaataccgcgggtcaagggaccggaatacgatgaactggtggatgaatttatggagtcggcggttaaatgcttcggaaacaacaccttcatccacttcgaggactttgccactccaaatgccttgaagttcttggaaaaataccagtacaagt

SEQ ID NO: 17468 - DNA, 2107 bp, DROSOPHILA
gttatgttttgttttatttactaaacacaaattattccattagttctaatggctattttatctggtgtatctggtgctttaagaaaggtcacatctaaagaataaaaattaattattgccatagctaaaaataccaaaagaggctgtgcatcaaaaatcatttaattttctgacactgtaattttattaaatttgcagtccctttcaagatgagtttcttcaggttattgaactttggcattacacgaggatcttcgatatcgaagacacatcaatcaaattgcgagtgtagtccaaatttaattaaaattcgtccgtcttcatcccacgacacaatcagggttcccatagaagtggtgttttccgacaagtgcaataaggccttggccttcacgttggaggaacgccagcgtttgtgtatccatggactcatgccggcctgcgttcgaacgtacgatgagcagatgttggccatcgagtccaactttcactccttcgaatcgaatgtgggcagatatcgttatttgcgggctctgcgccagggttacgagagactgtactttcaattcgtatcgaagaacgtccacgcggtgctgcccattatctacacgcccactgtgggcttggcctgcactgtatacggcatgttgtatcgcggcatgaccggaatacacattaccaaacatgatcgaggacacatgaagcagatcctgtccaactggccgatgcggagatcggtgaaagccatctgtgtgaccgacggccaacgtatcctgggattaggtgacctgggagccaatggcatgggcatagcagtgggaaaaatggaactgtacacagccctggccggaattccgccgagtatgttattgccaatttgcctggatgtgggcacaaataacaaatcgctacacgaggatcccctgtacatcggtctaagggatgagcgtttaaagggcgatgagtacgtgtgctttgtggatgagttcatggaggcagtcgtatccacctttggagatcaaacgctcatccacttcgaggactttgcgacacccaatgcttttatgtttctgaataggtatcagcattgctactgccatttcaatgacgacattcagggcactgccgctgttggtttgggtggattgcttggcatccagaggatcaccaagaagccgctggaggagcatgtcattgtcttcgccggagcgggaagcgctgccatgggcatcgcctatttgcttaaaatggagctgatgtccaggggtctctccgaggctgatgctgccaaaaatatatatttttacgatcaagacggtgtcttgaccacagctaggaagagcataccggatattctatgcgttttcgccaagaacatgaaggaaactaagtccctggagacgttggtcgaacaagtgaagccctcaattattatgggtgccacctcggcaccaggacttttcactgagaaaataatacgcacaatggcagcgagtcacgaacgtcctggcatctttgccttctccaatcccaccatcaaatctgagtgcactgccgaacaggcgtacaaattctcagatggaaaggctatatattcggcaggatctccttttccgcccgtggagttcaatggcaaaaggctaactcctggtcaagctaacaactgttttgcttttcccgctttggttttggccaccatgactgttttggccactcgaatgccagacgagatattccttttggccgcccacgagctcgctgaatttccaaccaatgaggagatgcaaagcggacgtatctatcctctggtgaagcaggccaatgaagttgcctacaaaataggcgtgaaagtggccaagtatctgatagaaaacggtgagagcctacacttacatatatgcgcatattattatctttctaattggttaattaaggttatgctaagcgcaatttagaaccggaagatgttgaggagtatatcgaaaagaatagctataaactgacctatggaagctcgctggctgagacttgggcgtatccaaaaatgaaaccgcatccaagtacagccggccatgaaaataaacatcaaaagaaaaagtaggcgttt

SEQ ID NO: 17469 - protein, 581 aa, DROSOPHILA
MSFFRLLNFGITRGSSISKTHQSNCECSPNLIKIRPSSSHDTIRVPIEVVFSDKCNKALAFTLEERQRLCIHGLMPACVRTYDEQMLAIESNFHSFESNVGRYRYLRALRQGYERLYFQFVSKNVHAVLPIIYTPTVGLACTVYGMLYRGMTGIHITKHDRGHMKQILSNWPMRRSVKAICVTDGQRILGLGDLGANGMGIAVGKMELYTALAGIPPSMLLPICLDVGTNNKSLHEDPLYIGLRDERLKGDEYVCFVDEFMEAVVSTFGDQTLIHFEDFATPNAFMFLNRYQHCYCHFNDDIQGTAAVGLGGLLGIQRITKKPLEEHVIVFAGAGSAAMGIAYLLKMELMSRGLSEADAAKNIYFYDQDGVLTTARKSIPDILCVFAKNMKETKSLETLVEQVKPSIIMGATSAPGLFTEKIIRTMAASHERPGIFAFSNPTIKSECTAEQAYKFSDGKAIYSAGSPFPPVEFNGKRLTPGQANNCFAFPALVLATMTVLATRMPDEIFLLAAHELAEFPTNEEMQSGRIYPLVKQANEVAYKIGVKVAKYLIENGESLHLHICAYYYLSNWLIKVMLSAI
